United States Patent Application Publication US 2012/0017338 A1 - sequence listing, part 13

SEQ ID NO: 50526 - protein, 290 aa, Zea mays
  Coding DNA Sequence Number=SeqID_8747
MERSDRIHGGTLAPWSQLGRFKIRTHQIKGTGGMKGPAFQCLVLHVATVTNSSYAAGPLRSGANLTSPPNPQQPALVELLAPTRTRLWAIKASGELLCRHGCGSRSPASGGHAAEAPTTLTALHYKLVVCTLHRISPVVWVASAPRTALRVALPCSPSFLVSGGDLGGLATTSTCFSELRPCRDLRHLGQLLVRAARTRASSSGEECPGPPRNWWPEIIVFARPPRAVGWTFCAAIIGENLSSDLALISAPYSILRLGFVTSSRCAAPYDESAAACALRRRASPAGEDDE

SEQ ID NO: 50527 - protein, 217 aa, Zea mays
  Coding DNA Sequence Number=SeqID_8748
MFYNVCKTGETFLVRGRDGAEAGRVGHRAEGAGAGTSRRATGREGAGAGASASSAPSRTGPRAPEPPRRGGKEGRGEGKRREGGFIARGEAGVEGGGSGRRRGGEGEVNELHGEEDVREGVERRERKGEAVLGKGAADKRAPQGGGGGGSTARAECARGGGGGRLGRQVGPKRGGRGRLATEPAHEGRGRLTRLGRGGGGRGGAVGPRERGAAGPPS

SEQ ID NO: 50528 - protein, 213 aa, Zea mays
  Coding DNA Sequence Number=SeqID_8749
  Subcellular localization annotation: CTP_CleavageSite=41; ConfidenceScore=5.58e-01
MARPWRSHSPRLPPSPWRGMRSRSRPRRPRRGGPPARPQPRLDLGAGPARRAVALAPARLARPATPAPHLASTPSVPYPTRRRARAAPPRPARSPSSASARPNPSLRGALESPTPGPGNPPPRPNLARRCVQSDLGAACPHGLARGTTPRPVRPSLCSGRRGARIQGVVRFTVVPSMGLGVAMRLMVLGFDFGNGEDEAVEGDFQEFQDYDEF

SEQ ID NO: 50529 - protein, 114 aa, Zea mays
  Coding DNA Sequence Number=SeqID_8750
MAQVSVVTAARRELAGALNPDAREFLPWWRLGGSRKQLSADAPEFTRSSLGRAVAAAAANGAVIAAPNNARRGEGGGIFSLRLQAPSLTNDMPIVPSTVPAAATFISPPGSLSI

SEQ ID NO: 50530 - protein, 1068 aa, Zea mays
  Coding DNA Sequence Number=SeqID_8751
  Gene Ontology: Mol. function=RNA-directed DNA polymerase activity; Cellular component=mitochondrion; Biological process=RNA-dependent DNA replication
  Homolog annotation: Hit_ID=UPI00005A975E; Match level="QueryCoverage =95%, HitCoverage=59%, E-value=0.0, Identity=88%"; Hit description =PREDICTED: similar to Retrovirus-related Pol polyprotein from transposon 297
  Pfam annotation: Domain name=RVT_1; Domain location=56-225; Score =139.0; E_value=1.3e-38; Accession=PF00078.17; Description=Reverse transcriptase (RNA-dependent
  Pfam annotation: Domain name=RnaseH; Domain location=455-582; Score =8.7; E_value=9.1e-06; Accession=PF00075.14; Description=RNase H
  Pfam annotation: Domain name=rve; Domain location=780-939; Score =119.3; E_value=1.1e-32; Accession=PF00665.16; Description=Integrase core domain
  Pfam module annotation: Pfam domain module=RVT_1::RnaseH::rve; Domain location=56-225::455-582::780-939
MPGIPRDVAEHSLDIRAGARPVRQSLRRFDEEKRRVIGEEIHKLMAAGFIKEVFHPEWLANPVLVRKKGGKWQMCVDYTGLNKACPKVPYPLPRIDQIVDSTAGCETLSFLDAYSGYHQIRMKESDQLATSFITPFGMYCYVTMPFGLRNAGATYQRCMNHVFGEHIGRTAEAYVDDIVVKTRKASDLLSDLEVTFRCLKAKGVKLNPEKCVFGVPRGMLLGFIVSERGIEANPEKIAAITSMGPIKDLKGLQRVMGCLAALSRFISRLGERGLPLYRLLRRAECFAWTPEAEEALGNLKALLTKAPVLVPPADGEALLVYVAATTQVVSAAIVVERQEEGHALPVQRPVYFISEVLFETKIRYPQVQKLLYAVILARRKLRHYFESHPVTVVSSFPLGEIIQCREASGRIAKWVVETMGETISFAPWKAIKSQVLADFVAEWVDTQLPTTPIQPELWTMFFDGSLMKTGAGAGLLFISPLEKHLRYVLRLHFPASNNVVEYEALVNGLRIAIELGVRRLDARGDSQLVIDQVMKNSHCRDSKMEAYCDEVRRLEDKFFGLELNHIARRYNETADELAKIASGRTTVPPNVFSRDLHRPSVKIDDVPEPEAPSAQAEAPSARPEAPSAQPEVPLAPEGEALDVEEEQSGATPDRDWQAPYLQYLRRGELPPDQVEARRVARRAKSFVLLGDEEELYHRSPSGILQRCISIAEGRELLQEIHSGACGHHAAPRALVGNAFRQGFYWPTAVADATRIVRTCEGCQFYAKQTHLPAQALQTIPITWPFAVWGLDLVGPLQKAPGGYTHLLVAIDKFSKWIEVRPLNSIRSEQAVAFFTNIIHRFGVPNSIITDNGTQFTGKKFLDFCEDHHIRVDWAAVAHPMSNGQVECANGMILQGLKPRIYNDLNKFGKRWMKELPSVVWSLRTTPSRATDFTPFFLVYAAEAILPTDLEYGSPRTRAYTDQSNQASREESLDQLEEARDRALLHSARYQQSLRRYHARGVRSRDLQVGDLVLRLRQDARGRHKLTPPWEGPFVIAKVLKPGTYKLANNQGEVYGNGWNIKQLRRFYP

SEQ ID NO: 50531 - protein, 126 aa, Zea mays
  Coding DNA Sequence Number=SeqID_8752
  Gene Ontology: Mol. function=nucleic acid binding
  Homolog annotation: Hit_ID=Q9C8M0; Match level="QueryCoverage=92%, HitCoverage=42%, E-value=1e-21, Identity=44%"; Hit description=RNA -binding protein, putative; 40942-42923
MFPNVSDEAIASLDLDGYIISVSPLSVSRSRTAICPINPKFLPQSEAEWETCLRTIYCTNISKNVCRVRLLDNKERSTNIAFIEFVEVYGAIAALGSGGIYVDGVPIRMCPSKSPIRTHCFGKLSS

SEQ ID NO: 50532 - protein, 487 aa, Zea mays
  Coding DNA Sequence Number=SeqID_8753
  Gene Ontology: Mol. function=serine carboxypeptidase activity; Cellular component=cellulose and pectin-containing cell wall; Biological process=proteolysis
  Homolog annotation: Hit_ID=Q69ME0; Match level="QueryCoverage=95%, HitCoverage=95%, E-value=0.0, Identity=74%"; Hit description =Putative serine carboxypeptidase
  Pfam annotation: Domain name=Peptidase_S10; Domain location=80-479; Score=620.3; E_value=1.6e-183; Accession=PF00450.12; Description =Serine carboxypeptidase
  Subcellular localization annotation: CTP_CleavageSite=50; ConfidenceScore=5.10e-01
MRSISACFFFVLLIVCLLGSHANSSQEARLREFILSRRSSGSAFSAHDESASTATSRLRSEYSGTDQSAQKAADKITELPGQPGGVGFDQYSGYVTVDEESGRALFYYFVEAAHDAPAKPLLLWLNGGPGCSSVGYGAMIEIGPFRITSDNKTLSRNENAWNSEANVLFLESPAGVGFSYSNTSSDYGKSGDQRTADDAFVFLINWLERFPEYKARAFYISGESYAGHYVPQLATAILSHSIKSESGIINLRAILVGNAYLDDNKNTKGQIDYLWSHGVISDEVWANITKNCKFSLADGDACSDAMAAYDSGYISGYNIYAPVCIDQPNGNYYPSSNVPGIDPCSNYYIQAYMNNPLVQMAFHARTTEWSGCTNLHWKDAPVSMTPTIKWLLGLGLPVWLYSGDFDAVCPLTATRYSIADLELSVMEPWRPWTATREVGGYVQQYTGGLVLISVRGAGHQVPYFRPERALVLLRSFLKGTLPPYVVD

SEQ ID NO: 50533 - protein, 108 aa, Zea mays
  Coding DNA Sequence Number=SeqID_8754
  Homolog annotation: Hit_ID=Q69MD6; Match level="QueryCoverage=73%, HitCoverage=14%, E-value=4e-19, Identity=63%"; Hit description =Ternary complex factor MIP1-like protein
VTETDPRKTVTPVKGSGNAGTRGTMNRIQSRRERKLALQQDVDKLKKKLRHEENVHRALERAFTRPLGALPRLPPYLPSQILVRQWGYRAKVDPVLVLDAKGGENRPK

SEQ ID NO: 50534 - protein, 279 aa, Zea mays
  Coding DNA Sequence Number=SeqID_8755
  Homolog annotation: Hit_ID=Q9FMZ6; Match level="QueryCoverage=76%, HitCoverage=89%, E-value=1e-58, Identity=54%"; Hit description =Arabidopsis thaliana genomic DNA, chromosome 5, P1 clone:MJB21
  Pfam annotation: Domain name=DUF617; Domain location=68-245; Score =251.2; E_value=2.1e-72; Accession=PF04759.4; Description=Protein of unknown function, DUF617
  Subcellular localization annotation: CTP_CleavageSite=26; ConfidenceScore=5.13e-01
MPSFIDGPTFRALLRPSTNGRRTKISDSGGGGGGIFKMFKLMPMLSSGCKMVALLGKHNNRALLADHATTVTLFGPRRGRVSLAIHEDTRAPPLFLIELPMLTSALHREISSGALKLALESDTRSARRRLVEEYVWAVYCNGRKAGYSIRRKEASDDERHVLRLLRGVSMGAGVLPAAPEKEGGVPAGPDGELTYVRARVERVVGSKDSEAFYMINPEEGGNGADNNGGGGGAGGAPELSIFLIIDFVNRAEIKSGVHIVLSGVARTLLYMKESGTSFG

SEQ ID NO: 50535 - protein, 477 aa, Zea mays
  Coding DNA Sequence Number=SeqID_8756
  Homolog annotation: Hit_ID=Q69MD6; Match level="QueryCoverage=57%, HitCoverage=46%, E-value=1e-39, Identity=40%"; Hit description =Ternary complex factor MIP1-like protein
MAKGSPPLDISIICHYTRCLDRNWIHFVELSVKQVTETDPRKTVTPVKGSGNAGTRGTMNRIQSRRERKLALQQDVDKLKKKLRHEENVHRALERAFTRPLGALPRLPPYLPSQVSGTSTASCSTRLLVTLRAVPWIALNPLARNCAAKTLALLAEVAVLEEEVVRLEEQVVSFRQGIYQEATVFSSAKNTQLPGGDAPVPAQLTPPNPVLNSDISPATESHHPPNARPSSPHNGVANGKQTPTKPVVNTTSPSQDDRQTKTAAPDRKTPADAAAGTGSTSDKATSHDDSIWSVPNIAAPMPADHLLRCLLRGQGNEDQQALSPSVSGSSESSSGYAAGPLRATASWSWAPGTPGPTSGSTWSTPRPWTPMRWPATATEKKREANSQFWSAAKQLQPGYVVVVVLALGGVCFKPDEAWHVCVPGARDTYHYHPGNARGDDGHTQGAGTTEPFPPPDRQAYARRAFTEGTLRTGFAWQ

SEQ ID NO: 50536 - protein, 778 aa, Zea mays
  Coding DNA Sequence Number=SeqID_8757
  Gene Ontology: Mol. function=protein dimerization activity; Cellular component=nucleus; Biological process=regulation of transcription, DNA-dependent
  Homolog annotation: Hit_ID=Q6L3Y1; Match level="QueryCoverage=85%, HitCoverage=87%, E-value=1e-151, Identity=42%"; Hit description =Putative hAT family dimerisation domain containing protein, identical
  Pfam annotation: Domain name=hATC; Domain location=661-754; Score =33.8; E_value=5.9e-07; Accession=PF05699.5; Description=hAT family dimerisation domain
  Subcellular localization annotation: CTP_CleavageSite=84; ConfidenceScore=5.07e-01
MQPDPRGQSCCRGPKVPPTALRSAASRPQAHKRCKPASDGNDWTPARGIQRLARLHRRADFCVSNGAWRLDRAIAVARKGSRTRAVEQKGVQGGGSSPVREIGKNKKRRFNPKWFDQYANWLEYSEKEDKAYCLYCYLFRDSTKDNHYGHDAFVTEGFNSWNKTERFVTHIGDRNSFHNKAVKSCEDLLKLDQSIPAALHKKSQIEKNEHLIRLNAAIDYTIKQNDVIAKAFKNAPLNNQMMSPKIQRAITECFAREILGCMMEEIGTDVFSLLVDECRDISDKEQMGVVLRYLDKCGLVKEKFVGVVHVKETTAACLKYCIDFLFADLGLSLKQVRGQGYDGASNMSGEFNGLQAKIKEENGSAYYIHCFAHKLNLVVVAIAKKIFDVGDFFDMISVLLNVVGSSCKRKDILREHHQAEVQKAIGSGDITTGTGLNQEICLQRPGDTRWNSHYKTLVGLSKMFPSVVKVLEYVEEDGTDAYKKRQANGLLKYFQSFDSAFFLHMMMMVFGLTNGLSKTLQRKDKDILIAISDVQSTKRELEKLRSQEGWESLLSKVHCFCHKHDISMMNMEDDYVNPKKPRQRTGINNEHHYRVDCFFAVLDLLREEFNNRFNEENSELLMCMSALSPSDLFSHFDKEKLIHLAKFYPDDFVHNDMATLEYQLGLYIDNVQHDERFANLQSISDLAKLMVDTRKHLSYPLVYRLLKLALTLPVATATVERCFSAMKIVKSALRNKIGDEFLSFSLICYIEKEQLDTISNQIIVDRFHKMQGRRGSQN

SEQ ID NO: 50537 - protein, 114 aa, Zea mays
  Coding DNA Sequence Number=SeqID_8758
MTNPDQESAEFHQRTRVFSDMIFVASIGLSSHGHQRTPNWHKRPNFNGGEELSRPGVVASAVDSRRWRGKGDVGRRGFGRVFLNRQGEIVRVLQPIMRTALKSDLRGCCSELHG

SEQ ID NO: 50538 - protein, 80 aa, Zea mays
  Coding DNA Sequence Number=SeqID_8759
MAPEAGLSYCQPHSVEWHSSRSRADDAVFLSGRNLRTGDEVVHDMESRVRMKVEPVLKMCARKLRLNSRKRNRLKEEKTS

SEQ ID NO: 50539 - protein, 138 aa, Zea mays
  Coding DNA Sequence Number=SeqID_8760
MALLASPYHCLLLRLPHQQEPPPRGKNKVLDEQSAVLITVCSYVFRRSCIQALTATCMHVVAAGEEQEGASMGGRCGWRTHPAMTGRRQRHAGRGAHDGVRGVLIEVGPSGRISTSGRVIPNGAAEVSLTAADAGTSS

SEQ ID NO: 50540 - protein, 260 aa, Zea mays
  Coding DNA Sequence Number=SeqID_8761
  Subcellular localization annotation: CTP_CleavageSite=40; ConfidenceScore=5.30e-01
MCPLRCVLNRRGPSTPPPLSVLRPTTFNHRGFPDEGDRTAARTRRAGCAPSFASSTVAFVNPDLKTERGFAALYTNKGPTAASAAAKPLLLACTAIEWRRRDGVRPGQGGKLKLFISGISWETINDGQEAERALLCLRRGTILVTIAGACTRGAGTSFAASGTSFSIYIWHLFQYRNFNNWLSVMNFISRLLFKELGALKFRLWDVKQELPFCQPFVCTISTSRQLEAKRDLVAGVVYGTDFFTKRKIQDSRGILIGQIE

SEQ ID NO: 50541 - protein, 108 aa, Zea mays
  Coding DNA Sequence Number=SeqID_8762
MGSTENALSLGMVHHMPVISLKLGIGEVRHGIEVVEWCDLVCLVSMEGQKTSTDDYYSPAESHSFPLKGPKDMSKKLFQIKDLPILRSTRILLLLIDTDEKEFRKAIL

SEQ ID NO: 50542 - protein, 51 aa, Zea mays
  Coding DNA Sequence Number=SeqID_8763
MGWWLSCYRTSETNSQLSQEQESQPLISTPESYFTQNKEKMRLLLSQMARM

SEQ ID NO: 50543 - protein, 151 aa, Zea mays
  Coding DNA Sequence Number=SeqID_8764
MDDFPIETQFFQKKSDPPAKPKFLEHMDQSSGLESYGYMLPRSCGIGLYYSTRMPESEDIIFSQLRFSIQEFQSLTRETKKAALRPESLGTLYTHPRMDRPHGNRLEDVHPFLRKMERKVLSDDCPFYLYFFATLSLWSIRFLILSIHKGP

SEQ ID NO: 50544 - protein, 52 aa, Zea mays
  Coding DNA Sequence Number=SeqID_8765
MTWVEEGIYVLGSKERTPAKKNCLLWECPIRMKRPGYLKADSDLPKKEVSHY

SEQ ID NO: 50545 - protein, 44 aa, Zea mays
  Coding DNA Sequence Number=SeqID_8766
MAVAFEPGEFAFVLKQGNLMKVIELTYYLYSVSGLADLPIPRRF

SEQ ID NO: 50546 - protein, 81 aa, Zea mays
  Coding DNA Sequence Number=SeqID_8767
MSQKAWITQILPEDVEMLPLQLTDGEELESSARAGGGGSTSSLLALNINSTLSRFVGFELLEKSVRVPNPDQVLYIRIPPA

SEQ ID NO: 50547 - protein, 89 aa, Zea mays
  Coding DNA Sequence Number=SeqID_8768
MRDFAVLFDIFYTPDGVYMINGVSASVLGTEGHRFESCHLDVYLERTRSREELLKLTNKIYEGKQSVLSELRRLAGPFHGQINPVPGYG

SEQ ID NO: 50548 - protein, 55 aa, Zea mays
  Coding DNA Sequence Number=SeqID_8769
MDVAAPWLSSVGGREHWCAPWAVDLGMDEEPVTEDPGEQQVEVAEQELIEGKLCP

SEQ ID NO: 50549 - protein, 266 aa, Zea mays
  Coding DNA Sequence Number=SeqID_8770
  Subcellular localization annotation: CTP_CleavageSite=51; ConfidenceScore=5.83e-01
MLASTTFAATTRSSAPSSRRKGPTSTASRCSRRGSARGGSPTRSRPPGLVPASGVVADGTAWWRTDIGTTVGYNSVASRVDLSLCPGDSARWEIGSAAGRLHCAVRDGGDVLVFRLNDRRGGWELATSVSVCEILQRPWQPETTFELSDSEDDNKEAVGQAELDHAGAVIAVANRYSRSRVRVPRDDVRLLPFQGADVEVVLLSGWRVVAFETVTRRRREAVLPVPDQSTAKDWGAVEYITHTNTLALVGPVVFMEPPDDQVEVSS

SEQ ID NO: 50550 - protein, 114 aa, Zea mays
  Coding DNA Sequence Number=SeqID_8771
  Homolog annotation: Hit_ID=Q6QP51; Match level="QueryCoverage=47%, HitCoverage=27%, E-value=5e-10, Identity=68%"; Hit description =Putative growth-regulating factor 1
MAAPRTTRPVALTPRRGRRHLWQARRASLRLRHNDRVKKGTEKGDVVERILLVGGSGPRALLLIRGSKAGPLERFRQPPQSTRTSSPLLIRGSKASPSKGFDNRPRAPGLHAHY

SEQ ID NO: 50551 - protein, 88 aa, Zea mays
  Coding DNA Sequence Number=SeqID_8772
MFLTIPPTLTLLGEGDTLLIYIIGTINMFITTIVVQEEEEDYAYKAWITGTMVGQQRRWKVIWIHVDGPRAAKDESWDLTEGPENLGD

SEQ ID NO: 50552 - protein, 183 aa, Zea mays
  Coding DNA Sequence Number=SeqID_8773
  Gene Ontology: Mol. function=RNA-directed DNA polymerase activity; Biological process=RNA-dependent DNA replication
  Homolog annotation: Hit_ID=Q6WAY9; Match level="QueryCoverage=43%, HitCoverage=33%, E-value=2e-21, Identity=57%"; Hit description=Pol
VFIFTGHLALRYLFAKKDAKPRLIREILLFQEFDIEIKDRKGSENQFADHLSRLELDSKDGNILQIVDAFPDEKLFAVDATPWTTYKTPFRDVAISIWFLGKVCHLPVELEHKAMWAIKHVNMDYEATGKKRLLDITELEEIRRNAYENTANYKEKTEQWHGRIYFAATFYRWSTSFIIQFPD

SEQ ID NO: 50553 - protein, 128 aa, Zea mays
  Coding DNA Sequence Number=SeqID_8774
  Homolog annotation: Hit_ID=Q10NM2; Match level="QueryCoverage=23%, HitCoverage=8%, E-value=2e-09, Identity=96%"; Hit description=RNA recognition motif family protein, expressed
MGTGTNSGRQDMSYSRGSRSVDSSDAENPGNNLYVTGLSARVTDRDLEKHFSTEGEQTVSFKVPILLQKTQVTFCFAILPPAQVQICLQVIQFISKGQRTELFVQFITTEKLLAQPFPRIREINKLFS

SEQ ID NO: 50554 - protein, 92 aa, Zea mays
  Coding DNA Sequence Number=SeqID_8775
MPSLASASHPRLADADEAPLHPRPRGGAGAVSGSWMVPRVLAPGSLLPPDLLLLTVFGGAPSPTGCDNWYQSRQSSAGCDEGDQLAAGKDND

SEQ ID NO: 50555 - protein, 791 aa, Zea mays
  Coding DNA Sequence Number=SeqID_8776
MATSQKEEERWEKMWRILDRLDHQLENWEVGQHRLQGQAELVTARKTEEHGSHNCVPVILGGTNFSVFGEKSAEKMVWGRVFGSDSHGLAQQLAHGVGDQWHNNCEQDVEPNVPWMFVGMPQQASTYPVSSEMGLTVAWDEEMQVETHTHEGLLQQLAQGGEALEELAEKKGDVVDETSKSDPSSMAVAMVMKVGSMEGLLPASVISVLEESPEKEQNAENVDATSAGGILSQDLVSESTHETNGAGEIISAPKVDDEDWEILQVREISEEEVEDYFVVSQEGAVDEVMQVELADGGTGEEEMLCGKEVAGNLVQVIVMSAVRWICDGQGLPDEILSKIQWDKEFSSNLSMRRGLLRDMVVERSYLNVFHSGEGVLIITPSQGYHPEEMLDLSLVDTDILCIVKLLKVNNSLLLEAHGSGFVLIFDGRQNNGSVHYVIFELTQGWLPASSPGNSDMAFQSQLDIQRKSMNKLMSLQFRMVYDKGKENIVTDDYAQDLWSMVTGHISCQDVFSGQRVVPYHWFKSLFGWTDLKIGVDQLVRQCPVFQQTQQGQQLPIGSLHQASMGGYFFNSLYRYAVLVLAVPMIKGSEDLWVAVWIQQQAADSSVFKEQAKAHEGEEIFNHRFGGKRAMQQSCWLCSESQACCWSYLLGGIFMPCRLVFLLSLLGDKQVLAKGKVTRTTYLFSWKLTRVLAPGSLLPPDLLLLTVFGGAPSPTGCDKLRPLSGLHVRAGCRGRKRPRTPSSSCLAAPDRQQKRCESLGSINPAPAESRAVTGEVGKQGCLCQCPVEVQIG

SEQ ID NO: 50556 - protein, 467 aa, Zea mays
  Coding DNA Sequence Number=SeqID_8777
  Gene Ontology: Mol. function=phosphopyruvate hydratase activity; Cellular component=phosphopyruvate hydratase complex; Biological process=glycolysis
  Homolog annotation: Hit_ID=Q9ZW34; Match level="QueryCoverage=98%, HitCoverage=99%, E-value=1e-144, Identity=55%"; Hit description =Putative enolase 2-phospho-D-glycerate hydroylase
  Pfam annotation: Domain name=Enolase_C; Domain location=186-465; Score=345.2; E_value=1.1e-100; Accession=PF00113.12; Description =Enolase, C-terminal TIM barrel domain
  Pfam annotation: Domain name=Enolase_N; Domain location=46-178; Score= 115.2; E_value=1.9e-31; Accession=PF03952.6; Description=Enolase, N -terminal domain
  Pfam module annotation: Pfam domain module=Enolase_C::Enolase_N; Domain location=186-465::46-178
MSVQEYLEKHLLSRKIEEAVNAAVRAKAPDPVLFIAGHMRRAAPAVITRVRARQILDGHGAPAVEVELHTNKAIHRASAAGSGALEGAAADAAGAAERRKILAKVVADSVRMINDKVSEALVGMDPQEQSQIDQAIMDLNKARHKAELGVGANAMLAVSIAACKAGAAEKEVPLYKHIANLVGKSATTLPVPAITVINGGKHAGNGLPIQEIMILPIGAKNFEEAMQMGSETYHHLKDVILEKYGSDSCNIGDHGGISEGLDLVIAAIERAGYNGRIKLAIDVAATDFCTGKKYDLEFKSTKKSGQNFKTADDMIEIYSQLCSGDDLLMSDPERIKRAVNEYTCNALVLKARAVWTGTYGAAPRLRCGGRFERHTRANQVGTVTEAIEVVKQAKDAHWGVMVSHRSGDTEDSFIADLAVGASAGQIKAGAPCRGECLTNYNQLLRIEGELGSEGVYAGENWRTVNTS

SEQ ID NO: 50557 - protein, 67 aa, Zea mays
  Coding DNA Sequence Number=SeqID_8778
MSGEHDKKELITGEKLGSLGKKYEGKTPSKEANVFGDKHKEYKEEFVGSIKSHKNGERELGLHLSPK

SEQ ID NO: 50558 - protein, 180 aa, Zea mays
  Coding DNA Sequence Number=SeqID_8779
  Gene Ontology: Mol. function=voltage-gated ion-selective channel activity; Cellular component=mitochondrial outer membrane; Biological process=anion transport
  Homolog annotation: Hit_ID=Q4PKP6; Match level="QueryCoverage=61%, HitCoverage=40%, E-value=7e-38, Identity=69%"; Hit description =Mitochrondrial voltage-dependent anion-selective channel
  Pfam annotation: Domain name=Porin_3; Domain location=5-173; Score= -17.6; E_value=7.1e-07; Accession=PF01459.12; Description=Eukaryotic porin
MPHKHNFIQPKLAFTQLGIELFLIENLKNHSKMFIMLIISLKVYQDAVNKHYNKLIQITSVINVTFEIRSKLLGRVLGNKKGDSANASYYHIVNPSTNIAVVGAEMTHSFFTNVTTITVGTQHALDPLTTIKARANNAGKASALIQHEWRPKSLFTISGEMDTKSIHKSPKVGLALALKP

SEQ ID NO: 50559 - protein, 799 aa, Zea mays
  Coding DNA Sequence Number=SeqID_8780
  Gene Ontology: Mol. function=protein kinase activity; Cellular component=integral to membrane; Biological process=protein amino acid phosphorylation
  Homolog annotation: Hit_ID=Q0WR59; Match level="QueryCoverage=84%, HitCoverage=69%, E-value=1e-121, Identity=39%"; Hit description =Receptor protein kinase-like
  Pfam annotation: Domain name=LRRNT_2; Domain location=170-213; Score =41.2; E_value=3.6e-09; Accession=PF08263.3; Description=Leucine rich repeat N-terminal domain
  Pfam annotation: Domain name=LRR_1; Domain location=218-241; Score =4.5; E_value=41; Accession=PF00560.23; Description=Leucine Rich Repeat
  Pfam annotation: Domain name=LRR_1; Domain location=250-273; Score =3.9; E_value=54; Accession=PF00560.23; Description=Leucine Rich Repeat
  Pfam annotation: Domain name=LRR_1; Domain location=276-297; Score =17.3; E_value=0.055; Accession=PF00560.23; Description=Leucine Rich Repeat
  Pfam annotation: Domain name=LRR_1; Domain location=299-322; Score =8.2; E_value=8.3; Accession=PF00560.23; Description=Leucine Rich Repeat
  Pfam annotation: Domain name=LRR_1; Domain location=324-345; Score =11.4; E_value=2.1; Accession=PF00560.23; Description=Leucine Rich Repeat
  Pfam annotation: Domain name=LRR_1; Domain location=346-365; Score =14.9; E_value=0.29; Accession=PF00560.23; Description=Leucine Rich Repeat
  Pfam annotation: Domain name=LRR_1; Domain location=367-388; Score =6.4; E_value=18; Accession=PF00560.23; Description=Leucine Rich Repeat
  Pfam annotation: Domain name=LRR_1; Domain location=391-412; Score =14.3; E_value=0.43; Accession=PF00560.23; Description=Leucine Rich Repeat
  Pfam annotation: Domain name=LRR_1; Domain location=414-436; Score =12.5; E_value=1.3; Accession=PF00560.23; Description=Leucine Rich Repeat
  Pfam annotation: Domain name=LRR_1; Domain location=438-460; Score =11.9; E_value=1.7; Accession=PF00560.23; Description=Leucine Rich Repeat
  Pfam annotation: Domain name=LRR_1; Domain location=462-485; Score =13.6; E_value=0.74; Accession=PF00560.23; Description=Leucine Rich Repeat
  Pfam annotation: Domain name=LRR_1; Domain location=495-517; Score =14.3; E_value=0.45; Accession=PF00560.23; Description=Leucine Rich Repeat
  Pfam annotation: Domain name=LRR_1; Domain location=519-541; Score =14.0; E_value=0.56; Accession=PF00560.23; Description=Leucine Rich Repeat
  Pfam annotation: Domain name=LRR_1; Domain location=543-562; Score =16.8; E_value=0.08; Accession=PF00560.23; Description=Leucine Rich Repeat
  Pfam annotation: Domain name=LRR_1; Domain location=565-587; Score =8.2; E_value=8.2; Accession=PF00560.23; Description=Leucine Rich Repeat
  Pfam module annotation: Pfam domain module=LRRNT_2::LRR_1::LRR_1::LRR_ 1::LRR_1::LRR_1::LRR_1::LRR_1::LRR_1::LRR_1::LRR_1::LRR_1::LRR_1: LRR_ 1::LRR_1::LRR_1; Domain
  Pfam module annotation: Domain location=324-345::346-365::367 -388::391-412::414-436::438-460::462-485::495-517::519-541::543 -562::565-587
MSTRRDDVLPTTSTGKRTSYIVDDGGLDDEFDVNPPRKLGPNGVKVALFSKLEPIPTEPEDVEGSPDEEEVEEGLGFRAYSPPAHMHNVDLSVDDALEFPDLPHRKRDRTSSSLHSGEIEVGKEFSSDSFLGALKQHNIMNGVNYNVVKSKSEKFEAKCSVQDASASGFDPSELRSLLEFKKGIKTDPFDKVLSVWDPDSRPDPTSWTGVTRDPNSGSIVSLNLDRLGLVGDLKFHTLTPLKNLQNLSLSARFVNLSHNQLNGGFFKEEAIGLFKNLQVLDLGDNLIAGSLPSFGSLPGLRVLRLGTNQLFGPVPVELLEGSVRLEELDLSRNGFTGSVRVINSTTLKVLNLSSNQLSGDLPSSLRSCEIVDLSGNTISGDISVMENWEASLVVLNLSSNKLSGSLSNLSHFEDLNTLNLRNNSLTGALPPLLVTSPRLSVVELSFNQLTGPIPGSFFTSTTLKSLNLSGNHLSGVIPLQGSRVNELLVMSSYPQMESLDLSYNSLTGGLPSEIGNIAALKLLNLANNDLSGQLPSELSKLSNLEYLDLSGNNFKGKIPDRLSTSLNGFNVSYNDLSGPIPENLRGFPLSSFSPGNRLLIFPHGMPSANSAQVQPPDHAGHHNSKSNVRVSIIVASVVAAVMIVFVLLAYHRAQVKEFRGRSGFSETTTVGDAKLGRFSRPSVFKFHSNVQTPQTSLSFSNDHLLTSKSRSLSGRQEFVAEIVEHDAPERATTSSAYVNTNLLDNEPTTSGRKSSPGSPLPSSPHFIESCEQPAILDVYSPDRLVWRIVLSGYFFKIHY

SEQ ID NO: 50560 - protein, 107 aa, Zea mays
  Coding DNA Sequence Number=SeqID_8781
  Homolog annotation: Hit_ID=Q7YJW0; Match level="QueryCoverage=56%, HitCoverage=16%, E-value=5e-08, Identity=57%"; Hit description =Apocytochrome f precursor
MDIEVPQAILPDTVFEAVVTIPYNMQLKQLLAYELLGVFDGLCKALDMGIRHVLLEVDSLAAVKMLESNQEEPHFNSTVRVIHRFYTFESPPAEIAQVFSKDYQGMS

SEQ ID NO: 50561 - protein, 434 aa, Zea mays
  Coding DNA Sequence Number=SeqID_8782
  Homolog annotation: Hit_ID=Q8H291; Match level="QueryCoverage=75%, HitCoverage=78%, E-value=9e-93, Identity=55%"; Hit description =Putative ATP/GTP binding protein
MRKGAKRKAASHEQEEKQVKTSSSSQENLNNNNRKPAPKAKRAKTFKPQPEPEYFEDKRNLEDLWKAAFPVGTEVGILNFDLNVEYLWDQLDSVYQFNWNFSNLEDAFEEGGKLYGKKVYLFGCTEPQLVPYKGENKVICIPVIVAVESPFPPSDKIGINSVQREAEEIVPMKQMKMDWVPYIPLEKRDSQVDRLKSQIFILSCTQRRRLKKEKNPLFIAMLFGLSLLTDFYQPLKEDELEQSTEVQIIFPAEPKPAILDSTACNHFYWDNQGSYSSRYYVFCEFDWELDELDEFTDKLIEADELDKDQKDAFKDFVKEKVREAKKANRQAREARRKALEEMSEETKAAFQNMRFYKFYPVHTPDTPDVSNVKKKENNNMTSDLNSFFLIGDSTLQAPFINRGYNVASSTRQMMPDILNFNNLPKNLGGADSWT

SEQ ID NO: 50562 - protein, 139 aa, Zea mays
  Coding DNA Sequence Number=SeqID_8783
MRFNRNVSFDNIKERISAKIVRRCGRRISKLFYKFPVSTDPIKFTEMKLVDDEDVETMIALYCGNQRDQNAPIQLFVELAGVEATEDLIALGKEHEAQELCMVAPISSTNFEEIGSGVGYERGRVSTLVTPKIGTESIV

SEQ ID NO: 50563 - protein, 525 aa, Zea mays
  Coding DNA Sequence Number=SeqID_8784
  Gene Ontology: Mol. function=metal ion binding; Cellular component =intracellular; Biological process=protein kinase C activation
  Homolog annotation: Hit_ID=Q2QWV0; Match level="QueryCoverage=93%, HitCoverage=94%, E-value=1e-160, Identity=45%"; Hit description =Pentatricopeptide, putative, expressed
  Pfam annotation: Domain name=PPR; Domain location=118-152; Score =51.4; E_value=2.9e-12; Accession=PF01535.11; Description=PPR repeat
  Pfam annotation: Domain name=PPR; Domain location=153-187; Score=2.9; E_value=3.4; Accession=PF01535.11; Description=PPR repeat
  Pfam annotation: Domain name=PPR; Domain location=219-253; Score =43.3; E_value=8.1e-10; Accession=PF01535.11; Description=PPR repeat
  Pfam annotation: Domain name=PPR; Domain location=254-288; Score =18.2; E_value=0.031; Accession=PF01535.11; Description=PPR repeat
  Pfam annotation: Domain name=PPR; Domain location=357-391; Score=9.4; E_value=0.58; Accession=PF01535.11; Description=PPR repeat
  Pfam module annotation: Pfam domain module=PPR::PPR::PPR::PPR::PPR; Domain location=118-152::153-187::219-253::254-288::357-391
MASYESTPKCVAAEIRSKLDELKRKLEKESFPQESLLYYRRMLLANISSSNYTFSAVIKSSADLMAFSIGETIHCHVYICGYGLDAYVQAALVSFYAKSGRVMIARKVFDKMPDKTVVAWNSMISGYEQNGFGKEAIELFYLMQDLGVKPDSSTFVSLLSACAQVGAIGLGCWVHEYIARNCFDLTVVLGTALMNMYSRCGNVSKAREVFDSMEEKNIVAWTAMISGYGMHGHGSQAIELFNEMSFDGPRPNNVTFVAILSACAHAGLVDEGRQIFTTMKQEYGLVPSVEHQVCMVDMLGRAGHLNEAYQFVKNISPKEPAPAVWTAMLGACKMHKNFDLGVEVAEHLLSIEPENPGHYVMLSNIYALAGRMDRVEKVRNIMIRNRLKKEVGYSTIDVDHKVYLFSMGDKSHPKTNQIYLYLDELMSRCREAGYIPASESVMHEVEEEEREYALRYHSEKLAIAFGLLKTGPGVAIRIVKNLRMCEDCHTAIKYISIIANREINVRDRLRFHHFKDGSCSCQDYW

SEQ ID NO: 50564 - protein, 53 aa, Zea mays
  Coding DNA Sequence Number=SeqID_8785
MNVNEAIDSRNELNGKYKVDIRDAMGKASSDRHLALFAFVVYGLIVFPKALGY

SEQ ID NO: 50565 - protein, 891 aa, Zea mays
  Coding DNA Sequence Number=SeqID_8786
  Gene Ontology: Mol. function=small conjugating protein ligase activity; Biological process=protein modification process
  Homolog annotation: Hit_ID=Q8VY10; Match level="QueryCoverage=99%, HitCoverage=99%, E-value=0.0, Identity=48%"; Hit description =Putative E2, ubiquitin-conjugating enzyme
  Pfam annotation: Domain name=UQ_con; Domain location=677-794; Score =33.2; E_value=1.3e-07; Accession=PF00179.16; Description=Ubiquitin -conjugating enzyme
MDFLTDSDWESFSESGSSEHEEVDFLYGGQACTILSSLEESIGKIDEFLSFERGFLHGDIVRSITDPCGQMGRVTKINMVVNLENVHGKIVKNINSKQLSKLHSISVGDIVVNANWIGRVVKLVDCVSIIFDDGSKCEVTAVDHEKLVPVSPNLIDDPQYRYYPGQRVRVVPSNVSRSTRWLCGTWRGNQDEGTISGVDAGFVYVDWISCAHVDHESSASPPCLQKAKDLTLLSCFSHANWQLGDWCMLFSADFRGTTEEVLHASTQHITRDSWKQDKGFKSGNPDSRLEEIFTIIKTRTMVNVVWQDGTCGLGLDSQTLLPVGITNTHEFWPHQFVLEKGTIGNSQRWGVVCGMDANERTVKVQWRTIAVNQINGFDGKQVEETASAYELVEHPDYSYCFGDIVFKKVVQNQYGDQADKCIKIPENGFGTEAVSKGRNLNLDHYKDPSTYCLSCIGIVTGFNEGDVEVKWASGITTKVAPYEIYRIDKYEDSATTPVLFEENTEAYNQEMFVDEKQSDSHKGKELLNFNSAIESGEKFSLVPTSFFCPQAAIGYFTSIASSILGSLGPNSLISQDPSGCISRNAKEYDILLEKEVAETCHHCAEQDMSELQIFEMTNIRQEVEEIEENKVSMMPKPVETSDQFRQFDMVSDCSDHHFLGESKVLAVSQVKRSWLKKVQQEWSILEKNLPETIYVRVCEERINLLRAALVGGPGTPYHDGLFFFDISLPSDYPYEPPLVHYRSGGLRLNPNLYESGKALVLNEKPYFNEAGYDKQLGRAEGETNSVSYNENAFLVTCQSMLYILRHPPKHFEALVKEHFSRRAKTILSACNAYMEGAPVGFALECGKNGHNVNLKESSTGFKIMLAKLFPKLVDAFSDQGTNYSEFRGVEK

SEQ ID NO: 50566 - protein, 101 aa, Zea mays
  Coding DNA Sequence Number=SeqID_8787
MLSIDPDAAHASEFPEYADIVPTHILASNSQLEELFIGQQFKNKADYVFGIKQYIMKVSIDYKVVKSPTLYVGNVEESGMGVAGGFRLHLYRGLNSEKYKN

SEQ ID NO: 50567 - protein, 262 aa, Zea mays
  Coding DNA Sequence Number=SeqID_8788
MTKSPIVPGLDFFGASSSCSLILTHCIFRGMQDLLFSTCSTITEGDKACVFDLLRRRCRKEGKICYLQPAPLQPREARLVSSICFAVDAGRQDLLSSTCSTTTEGGKACVFDLLRRRCKKARSAIFNLLHYNRGRKAGSAIFNLLHYNRGRQGLCLRSASSSMQEGKICYLQPVPLQPIEARLVFSICFTIDAGMKARSAIFNLLHYNRGRQGLCLRSTSLSIQEGKIYYLQPAPLQLREARLVFSICFTIDAGRQDLLSST

SEQ ID NO: 50568 - protein, 36 aa, Zea mays
  Coding DNA Sequence Number=SeqID_8789
MKLENPLLNIKMVYMPRYREFVWMSYSRPDIATVIL

SEQ ID NO: 50569 - protein, 72 aa, Zea mays
  Coding DNA Sequence Number=SeqID_8790
MEFAKTLNMGMVRWDIKHGVDHQDGLIPCDAANINELYNTKVDVDEHSEFMDDITDEECDLLVRDLCVEGAV

SEQ ID NO: 50570 - protein, 152 aa, Zea mays
  Coding DNA Sequence Number=SeqID_8791
MDNEYFLEKFKSINKYIKVLMEDDQVTFNIFKSIQFPDTIDDYSAVSDLEDLIVEKELNYVEDPLEQILTSDPPNDEEEDEYLTLLEANQRGFNLQSCFESLELEKRDYAQPKVKIDEPPKLELKICPKLKLAMLKLSTLPHVWPAKGGLFG

SEQ ID NO: 50571 - protein, 322 aa, Zea mays
  Coding DNA Sequence Number=SeqID_8792
  Gene Ontology: Mol. function=nucleic acid binding; Cellular component= nucleus; Biological process=mRNA processing
  Homolog annotation: Hit_ID=Q9FGL9; Match level="QueryCoverage=72%, HitCoverage=87%, E-value=5e-55, Identity=60%"; Hit description =Polypyrimidine tract-binding protein homolog 2
  Pfam annotation: Domain name=RRM_1; Domain location=102-164; Score =3.2; E_value=0.073; Accession=PF00076.12; Description=RNA recognition motif. (a.k.a. RRM, RBD, or
  Pfam annotation: Domain name=RRM_1; Domain location=20-88; Score =19.0; E_value=0.0025; Accession=PF00076.12; Description=RNA recognition motif. (a.k.a. RRM, RBD, or
  Pfam module annotation: Pfam domain module=RRM_1::RRM_1; Domain location=102-164::20-88
MASVSSQPQFRYTQPPSKVLHLRNLPWECTEEELIELGKPFGKIVNTKCNVGANRNQAFIEFADLNQAIAMISYYASSSEPAQFNLGLDGKKLEPESNVLLASIENMQYAVTLDVLHMVFSAFGPVQKIAMFDKNGGLQALIQYPDVQTAVLAKDTLEGHCIYDGGFCKLHLSYSRHTDLSIKVNNDRSRDYTIPNLAMVNPQPSTLGQQPVQAMGGPAAHQYNGTPYAPGLQQPTMPPQPSGPIYENYARKRGLRLSQFPTVNYEAKVKSSKIMIKEDLEEDPKEDPEEYLMEDPEKDPEGNLDLEDNLDEAKEESKPNSD

SEQ ID NO: 50572 - protein, 92 aa, Zea mays
  Coding DNA Sequence Number=SeqID_8793
MDELKQMMQKRYVPSHNYREVSMRLQCLVQDGLNVSIANTLNLQTCIDLEEMTSDSQRQIWFWSKLWPFEEPLLEKWNLGEEDDEDGKKQWR

SEQ ID NO: 50573 - protein, 607 aa, Zea mays
  Coding DNA Sequence Number=SeqID_8794
  Homolog annotation: Hit_ID=Q2R820; Match level="QueryCoverage=97%, HitCoverage=97%, E-value=0.0, Identity=64%"; Hit description =Expressed protein
MHLEEPWFTGMDTEETEMGQPNSEIQGFRLEKGEASNMVFSTEAPLVIKESSTSGSCSCSLKKIKSTVAAKGSEFCQKDKSGHDKKLSRQYRIELGQLFQGAVSSHDWELAESLILSADPQTLNDALCVTLDAIWFLSTQQELYGITDLIKKIIANGAYDFTRAALRTSFLASCVSACQSRTMSLADTVTVMAQRLHERLQECHGDEVLKAEAGAKVQKFTEWALKCIGSHSRCQGSNDRVNHCSAIEIQLQLTAFKTFLDLAGNQLTGKDFTEAFDAACFPLTLFSSSFDAGWASGISATVIQGLLDMLVEGGADNVNQCFLEASRFGSTELVRILLQIAQRNSLDVDVDLALGFASHYCKIGTMECLVEEGNAMAFLGPLMRAAERGCMQVVRWFVKRGCRDMELCLALTAATSSSQVGVAAYLLPHVPKHVLTALSIEILKAAGERSGGSLDGVAFLLHSDFLGDAAATYAVADSIAKSDDEAVAPELRAFVQEHWSEAAFLDGLKQGQEHYMKLMRILKRGESPICLRDLPAPLRVGIAYMPLYRECVEVGGRLLSQRLRGQLVEAVRMLGGGSLEEVSQGRELLATLEHHLPPFLVRAPSVG

SEQ ID NO: 50574 - protein, 108 aa, Zea mays
  Coding DNA Sequence Number=SeqID_8795
MSAESNRAIVNEAKSNIQDLNPEAINSASIPQSVRDEMKNVFLGMMNQWFNEFKQANLATPPPPPPVVPPLAPPNTPNPILVTVTLVSVDKIQKCGAEEFNGLVDDDP

SEQ ID NO: 50575 - protein, 35 aa, Zea mays
  Coding DNA Sequence Number=SeqID_8796
MGYEESMSSIAEKHGKLDRVDGITSLVSEPSLVGS

SEQ ID NO: 50576 - protein, 51 aa, Zea mays
  Coding DNA Sequence Number=SeqID_8797
MGGVFEDMEVVELWLGLDSSFEDIMGHVGPKWVVWAQWARRPYMDEIHELW

SEQ ID NO: 50577 - protein, 139 aa, Zea mays
  Coding DNA Sequence Number=SeqID_8798
MARSGPAVAPHGGEKLPTPIPADPFETTCILPTTDHGAAAAAIPPQLTTIALDTASRASTRRLLQRGPGGNQWLIHQSQGLREEGEVHDQGAMRKGNGGAVSAQQRSAGGGGASRSGFGFIVWRRDKLDRLNSGLRRDF

SEQ ID NO: 50578 - protein, 71 aa, Zea mays
  Coding DNA Sequence Number=SeqID_8799
MAVQGRWCDWFIPQPVLGLQILETPHPLALMRNTKPSLPLQRERKEPVAGDPGVQQIEVAEQELIEGKLCP

SEQ ID NO: 50579 - protein, 262 aa, Zea mays
  Coding DNA Sequence Number=SeqID_8800
  Gene Ontology: Mol. function=binding; Biological process=protein folding
  Homolog annotation: Hit_ID=Q69TG8; Match level="QueryCoverage=66%, HitCoverage=37%, E-value=6e-64, Identity=76%"; Hit description =Putative cyclophilin-40
  Pfam annotation: Domain name=TPR_1; Domain location=74-107; Score =40.0; E_value=8e-09; Accession=PF00515.18; Description =Tetratricopeptide repeat
  Pfam annotation: Domain name=TPR_2; Domain location=74-107; Score =38.2; E_value=2.9e-08; Accession=PF07719.7; Description =Tetratricopeptide repeat
  Pfam module annotation: Pfam domain module=TPR_1::TPR_2; Domain location=74-107::74-107
KQDYKAALRKYRKALRYLDLCWEKEEIDEDKSTALRKTKSIILTNSSACKLKLGDSSGALLDADFALREREGNAKAFFRQGQAHIALNDIDAAVESFKQALELEPNDGLFSLVPLKFIDLTDDLMGFSLTPLAGIKRELAAAKKKLPQIADRRDQERKAFARIFQSSGKSDKSNETLRPCVPHFISQLYIFKQFLQQLFSPAAYLNELKAAVFRPESYTVFLSCPHSGSVDCHLSGCWAGSSAVAVRCKSVEIKIKVLIKIL

SEQ ID NO: 50580 - protein, 579 aa, Zea mays
  Coding DNA Sequence Number=SeqID_8801
  Gene Ontology: Mol. function=transferase activity, transferring hexosyl groups; Cellular component=mitochondrion; Biological process= metabolic process
  Homolog annotation: Hit_ID=Q6K8I3; Match level="QueryCoverage=82%, HitCoverage=98%, E-value=1e-180, Identity=53%"; Hit description =Fertility restorer homologue A-like
  Pfam annotation: Domain name=PPR; Domain location=183-216; Score =25.0; E_value=0.00026; Accession=PF01535.11; Description=PPR repeat
  Pfam annotation: Domain name=PPR; Domain location=221-255; Score =47.0; E_value=6.1e-11; Accession=PF01535.11; Description=PPR repeat
  Pfam annotation: Domain name=PPR; Domain location=257-291; Score =42.4; E_value=1.5e-09; Accession=PF01535.11; Description=PPR repeat
  Pfam annotation: Domain name=PPR; Domain location=292-326; Score =41.0; E_value=4.2e-09; Accession=PF01535.11; Description=PPR repeat
  Pfam annotation: Domain name=PPR; Domain location=327-361; Score =47.1; E_value=6e-11; Accession=PF01535.11; Description=PPR repeat
  Pfam annotation: Domain name=PPR; Domain location=362-396; Score =35.9; E_value=1.4e-07; Accession=PF01535.11; Description=PPR repeat
  Pfam annotation: Domain name=PPR; Domain location=397-431; Score =28.0; E_value=3.2e-05; Accession=PF01535.11; Description=PPR repeat
  Pfam annotation: Domain name=PPR; Domain location=432-466; Score=4.8; E_value=2; Accession=PF01535.11; Description=PPR repeat
  Pfam annotation: Domain name=PPR; Domain location=75-109; Score=0.9; E_value=5.8; Accession=PF01535.11; Description=PPR repeat
  Pfam module annotation: Pfam domain module=PPR::PPR::PPR::PPR::PPR::PP R::PPR::PPR::PPR; Domain location=183-216::221-255::257-291::292 -326::327-361::362-396::397-431::432-466::75-109
  Subcellular localization annotation: CTP_CleavageSite=53; ConfidenceScore=5.28e-01
MKLPAALPWISPLQYRRPGRGASPSPPPPPPPTRRPRYLHHPELARLIESSPSAQRALDLFNAASSQHAFSHTPATFSALLVRLARARLPRAAAAVLRRTASEPCRFQEPQFLPLVRLLPPDHALVLLRFLPALLRTSRVSHKALAVCLDRLVSSRGCHGVLNELLADLRDPRNKYLPRPNTCVYNILVKHYVKNGELETAFKVLDEMREYTCADVKPNLVTYSTLIGGLCRGGKMKEAFELFEEMIEKDRIVPDQLLYNVIIDGFCRQGQVDKARAIFGFMRKNECEPNTFNYATLINGHCKKADIEAARSVFEEMRNSGVEPDAVSYTALIGCLCRHGSVDEGIGLVLEMKEKGCRADVVTYNLVIEGLCKDGRTVEAMGLLESVPLEGVKLNVASYRILMNCLCSRGEMDRAVGLLGLMLGRGFLPHYAASNNLLIGLCDAGRIADATMALYGLADAGFMPEPRCWERLVESVEVLRKGTGDRGSVSFCPHLHYRAELMFSNNEEKAAGPYWYWRQQPTGPDTNFSSRTSCYIQKVSNHEGTMAALFTILVIGDVVQDEVPQLALANRLPLGPVSA

SEQ ID NO: 50581 - protein, 421 aa, Zea mays
  Coding DNA Sequence Number=SeqID_8802
  Gene Ontology: Mol. function=metal ion binding; Cellular component =integral to membrane; Biological process=ubiquitin cycle
  Homolog annotation: Hit_ID=Q69QB2; Match level="QueryCoverage=83%, HitCoverage=85%, E-value=1e-107, Identity=58%"; Hit description =Putative RING-H2 zinc finger protein
  Pfam annotation: Domain name=PHD; Domain location=143-188; Score=3.7; E_value=0.024; Accession=PF00628.19; Description=PHD-finger
  Pfam annotation: Domain name=zf-C3HC4; Domain location=144-185; Score= 37.4; E_value=4.9e-08; Accession=PF00097.15; Description=Zinc finger, C3HC4 type (RING finger)
  Pfam module annotation: Pfam domain module=PHD::zf-C3HC4; Domain location=143-188::144-185
MTTPRHNASPPPLPVLTLLWLLLLDAPAAAQQSPSRDKDNGGGGGGGGMPAQTPSFSAPMVVLLVALIAAFFFIGFFSVYMRRCGRGASAGPVIPAAALLALSRQEERNQQRGLDPAVVASFPTMRYADARELRVGGKDAALECAVCLSEFEDDEELRLLPSCSHAFHPDCIGEWLAGHVTCPVCRCNLDPEEPAGEATGEGRQQDHVAIDASHDGAGEEGEEDRRRDEAMELERIGSQRRAVRSRSGRPAPLVPRSHSTGHSLATTRLDGDVERFTLRLPELVRREMVAAAGEESLRRTGLRERGGARSARLGRSDRWPSFITRTLSSRVPFWSASRRAPDLEASSMTTGGAAARTRREKMGGASDGSVTPAKGSVRFDCLGVAPAVTGARVGAASCDNEMEEEDDEEDEEKAIARHRQA

SEQ ID NO: 50582 - protein, 109 aa, Zea mays
  Coding DNA Sequence Number=SeqID_8803
MAVEDGKPVDMDYNRGRGRLTSYSRPRRGKPVTAERTIVEWSTTEQMAAQQKVVTSQVAQKMSMRKRLNETVTTSRQGTAVRTRFAIWIDEDVVMQNKYSPRQGGRRSN

SEQ ID NO: 50583 - protein, 270 aa, Zea mays
  Coding DNA Sequence Number=SeqID_8804
  Homolog annotation: Hit_ID=Q01VS6; Match level="QueryCoverage=32%, HitCoverage=38%, E-value=2e-07, Identity=43%"; Hit description=2 -dehydro-3-deoxyphosphogluconate aldolase/4-hydroxy-2-oxoglutarate aldolase
  Pfam annotation: Domain name=Aldolase; Domain location=150-269; Score= -91.2; E_value=0.01; Accession=PF01081.9; Description=KDPG and KHG aldolase
MEDFARAVEGGAQAVVARAPGRGATAAPADGDGAHCSRCAPPPAAPLDAAIVPVLLLRGGDDHHLVLLAAYSHSRRGGHGWRRRRTQPWHGSWATARVVREDDGGQLGQHRDGELFLPPDNARCRLPASPPHHHPSPPATASLGAAHRRAAATPESARRHTALARHRVPPRARAAHAAVHGGITVLHAVEALGTVAVPGCRPQLQVGTVLNAADARKAICAGAQFLMSPGTVLDILHDLKESNVLYIPGVLTSTEVLSACSAGAKVVKVS

SEQ ID NO: 50584 - protein, 95 aa, Zea mays
  Coding DNA Sequence Number=SeqID_8805
  Subcellular localization annotation: CTP_CleavageSite=56; ConfidenceScore=5.13e-01
MSHGTVDLWGSDQQLGSPPMTSVVIRADRRQDSRPARKFLVSPKLVFRRRDEHLPVASPTQCPKTLLKLYDPPNGAKPPCVAVNARVLPRCPRSP

SEQ ID NO: 50585 - protein, 32 aa, Zea mays
  Coding DNA Sequence Number=SeqID_8806
MDGALATGCWWLESYRALGKINRWARLKEPPV

SEQ ID NO: 50586 - protein, 378 aa, Zea mays
  Coding DNA Sequence Number=SeqID_8807
MDLATTPARRAMEPGVARRVWHVVLAVCHMLRRGLSPKRIMMDVHLLLGRGKLAGRTLRGHLAHPSSHHRHGHGHGHLTTYGGGASRASSSSSSSTLASFYGHPREVEFSCTTTPSYPQQHYGLFPFKGLRGRGGARCGGDPAGVRPLRVTDSPFPAVPEDGCCNDRVDADADDFIRKFYEQLRLQPTAATPDAYLRRRDHGHSAKKANKRLSFFLSLLSLHSPSLCYDAAPLARRRAFPRRCLPAPARSPRRRPAAPPRARPLPAPARSPRRRPAAPPRARPLPALPPRRAAASPRAIVSSRAGPSPRSCLPATRTPPRTPSVTAARPKAASPPHRRPRPTICPPTRCRPPARRRPPAVRPLAVVRAYSRASAVLAS

SEQ ID NO: 50587 - protein, 52 aa, Zea mays
  Coding DNA Sequence Number=SeqID_8808
MCLHSWRDQCNLAGRKRSLGGAASCSLVMHDLSQGRDGMVWEERERGDADCR

SEQ ID NO: 50588 - protein, 50 aa, Zea mays
  Coding DNA Sequence Number=SeqID_8809
MSSVGSPRTQPPSIVLNRSPESSNFILPPISSKTPQEHPHHDQLLPGDRN

SEQ ID NO: 50589 - protein, 86 aa, Zea mays
  Coding DNA Sequence Number=SeqID_8810
MVQPKENGEIKRSHIEDYHCCRMWATCGEEEKGKIRGKWGGGGEARYDMVAEARVLAAIALVERNWRGSQLPQSSTGQAPAASPKA

SEQ ID NO: 50590 - protein, 250 aa, Zea mays
  Coding DNA Sequence Number=SeqID_8811
  Gene Ontology: Mol. function=protein serine/threonine kinase activity; Cellular component=mating projection; Biological process =protein amino acid phosphorylation
  Homolog annotation: Hit_ID=Q1T4M8; Match level="QueryCoverage=90%, HitCoverage=39%, E-value=1e-106, Identity=72%"; Hit description =Protein kinase-like
  Pfam annotation: Domain name=Pkinase; Domain location=39-249; Score= -29.5; E_value=8.3e-07; Accession=PF00069.15; Description=Protein kinase domain
MDDGDSVVRSVEKAGAGPGDDGSTTPLPETVQIGNSPSYRIDRKLGKGGFGQVAIKFEHRTSKGCNYGAPYEWQVYNTLSGIHGVPRVHYKGKLGEYYIMIMDMLGPSLWDVWNNNSHSMPVEMVACIAIEAISILEKMHSKGYVHGDVKPENFLLGPPGTLQEKKLFLVDLGLATRWKDTGTGEHVEYDQRPDVFRGTVRYASVHAHLGRTGSRRDDLESLAYTLVFLLRGRLPWQGYQVNFVTTSKFS

SEQ ID NO: 50591 - protein, 95 aa, Zea mays
  Coding DNA Sequence Number=SeqID_8812
MALIASGWKSTSNWGRYETFTRRDNILPTTSTGEGVSYVADDGGLDDESDVDPPREPDPDGAEVTLFFKPEHVLTEPEDVEGGSNDEEEDSRFRA

SEQ ID NO: 50592 - protein, 58 aa, Zea mays
  Coding DNA Sequence Number=SeqID_8813
  Gene Ontology: Mol. function=structural constituent of ribosome; Cellular component=intracellular; Biological process=translation
  Homolog annotation: Hit_ID=Q1T0D3; Match level="QueryCoverage=89%, HitCoverage=86%, E-value=5e-25, Identity=98%"; Hit description =Ribosomal L29e protein
  Pfam annotation: Domain name=Ribosomal_L29e; Domain location=4-42; Score=71.0; E_value=3.8e-18; Accession=PF01779.7; Description =Ribosomal L29e protein family
MAKSKNHTAHNQSYKAHKNGIKKPKRHRHTSTKGMDPKFLRNQRYARKHNKKSDKGNS

SEQ ID NO: 50593 - protein, 517 aa, Zea mays
  Coding DNA Sequence Number=SeqID_8814
  Homolog annotation: Hit_ID=Q9ASU7; Match level="QueryCoverage=28%, HitCoverage=45%, E-value=2e-32, Identity=52%"; Hit description=Peter Pan-like protein
  Pfam annotation: Domain name=AAR2; Domain location=207-500; Score= -119.0; E_value=9.2e-05; Accession=PF05282.2; Description=AAR2 protein
  Pfam annotation: Domain name=Brix; Domain location=292-439; Score =23.0; E_value=2.8e-06; Accession=PF04427.8; Description=Brix domain
  Pfam annotation: Domain name=DUF616; Domain location=123-343; Score= -149.7; E_value=0.0011; Accession=PF04765.4; Description=Protein of unknown function (DUF616)
  Pfam module annotation: Pfam domain module=AAR2::Brix::DUF616; Domain location=207-500::292-439::123-343
  Subcellular localization annotation: CTP_CleavageSite=40; ConfidenceScore=5.50e-01
MPYSLFPQFKNQPSPPAPIHLHRSTSGPSRLHPFPESEVRAKLQTSSTFEFQSGGIMFWADTVGSKHIYLSLKKWSERYGSYFKPSRYLEERAMKGMPLVMLTVENEIPVATKGVVMIKAQKNITDQKLKDLKAKKISQCLDYAYICMKIVCFYSENGGFKISDEDKSYMQSCKVAVFTCAFGGGDDLYQPIGMSEASLKKVCYVQDFMLLQNGRIDYGEFVAMIQNMMTHDKSDRETVLVRRMLQDRPITTRMYSSFSLLQQRLAILFQKLWQQQPNVDHITGNKIWKSSVFSKGKLPGPLRQLQMDLRKLMLPYTALKLKEKKRNNLKDFLNVAGPMGVTHFLVLSKIETSPVLRVAKTPQGPTLNCALVARRIFSRILLCNSKYIFGQIVLSGFAAADEQLRLTTMVFKNIFPDIDINTPFQTRSQLFTKKDRSVGEAVTSALLDDSWFSSDSFLHCFCKDFFSLVQDASVVDGDLLSWTRKLKELLENSLGWEFQQKSAVDGIYFKENDEVSL

SEQ ID NO: 50594 - protein, 494 aa, Zea mays
  Coding DNA Sequence Number=SeqID_8815
  Gene Ontology: Mol. function=calcium ion binding; Cellular component =nucleus; Biological process=regulation of transcription, DNA -dependent
  Homolog annotation: Hit_ID=Q1T0C7; Match level="QueryCoverage=95%, HitCoverage=85%, E-value=3e-88, Identity=53%"; Hit description=IQ calmodulin-binding region; CG-1
  Pfam annotation: Domain name=IQ; Domain location=341-361; Score=16.1; E_value=0.12; Accession=PF00612.17; Description=IQ calmodulin-binding motif
  Pfam annotation: Domain name=IQ; Domain location=364-384; Score=26.3; E_value=0.00011; Accession=PF00612.17; Description=IQ calmodulin -binding motif
  Pfam annotation: Domain name=IQ; Domain location=444-464; Score=21.6; E_value=0.0029; Accession=PF00612.17; Description=IQ calmodulin -binding motif
  Pfam module annotation: Pfam domain module=IQ::IQ::IQ; Domain location=341-361::364-384::444-464
MNEVNYNVVKSKSKKFEAKTLENIVLVHYRETKEGSPATPVNSNSCLTTDQSTPLLVMEDFDSGAANAYYKDLSDSINANHEMTLHEINTLEWDELLVTNDGNDSAVSSGDMSTCFDQWNQKMVNGLSNDGGPISAYNSSPDISLLDNLVDPVAQSNNAYLNTPGVVPLEDKSRWEEFRLQMRLAYLLFSTSKSLSILSGAKPNLVTDPTTQNPSGCTAADLASLNGYDGLAAYLSEEALVAQFNDMALAGNASGSLQTSRTEATNLVNLKEDELYLRETLAAYRTAADAAARINTAFRAHSFKVRAKAVESYNAEEEARSIIAAMKIQHAFRNYEAKRKMAAAARIQYRFRTWKMRKDFLNMRRQAIKIQAAFRGFQARRQYCKIIWSVGVLEKAILRWRLRRKGFRGLQITTDEAVEEQRQETYVEEAYYISSRKQAEERVEKAVVRVQSMFRSKKAQQEYRRMKLAHDLATLEYESLIGPLSDMMLKDHRK

SEQ ID NO: 50595 - protein, 832 aa, Zea mays
  Coding DNA Sequence Number=SeqID_8816
  Gene Ontology: Mol. function=DNA binding; Cellular component=nucleus
  Homolog annotation: Hit_ID=UPI00000529F6; Match level="QueryCoverage =61%, HitCoverage=47%, E-value=1e-120, Identity=44%"; Hit description= transcription factor
  Pfam annotation: Domain name=JmjC; Domain location=466-570; Score =35.1; E_value=2.4e-07; Accession=PF02373.13; Description=JmjC domain
  Pfam annotation: Domain name=JmjN; Domain location=291-335; Score =96.4; E_value=8.6e-26; Accession=PF02375.7; Description=jmjN domain
  Pfam module annotation: Pfam domain module=JmjC::JmjN; Domain location=466-570::291-335
MRCALCAVPRQMRATVRGRLSTPLTWRHVALPLGLFASRADWAGYCEERKGLVWAGYSRPSGPSIYVTDTSRFPSSRGRFCSVPPLLYSSTLPSRGGVDGMELGEPGARGCRGPVRLLGSLGLLIKASSSDAAMMGTECIMATLGGDPEPSIPPGFGPFVALALQGIQNNAKSADAHSSSAQAAHCMEKDVEVLEHGSAHGWSDTPASTSGTHSCRRSLRNRPPIDYSQFDLISDEESDVESAEKGVGLVRRRRQLPKGVLRGCAQCADCQKVVARWNPSGARRPVLEEAPVFYPSEEEFKDTLKYIESIRSTAEPYGICRIVPPPSWKPPCLLKEKNIWECSKFCTRVQKVDKLQNRKSSKKGRRGGMMKKRRKLLELEDNNNINHNQTGVQQNQERFGFEPGPEFTLQTFKKYADDFREQYFKKEVSADSPPSVEDIEGEYWRIVEKPTEEIEVVYGADLETGTFGSGFPKSSPEVKSDVEHKYLESGWNLNNLPRLQGSVLSFEGGDISGKDAVNLEAAMRKHLPDLFEEQPDLLHNLHEGEFVLTFPRAYHAGFNCGFNCAEAVNVAPIDWLPIGQDAVELYRKQARKITVSHDKLLLGAAREAIRAHWDILFLKKNTADNLRWKSMCGLDSTICKSLKPLIQRAQPLIHHCQTPSRPAAQTSELPAAVARAQELPAAIARAQEPPELDVVGRPPPPSRYVAGPLLPPPSAATPKAAAAASYCLSRTAAAVVRAGRRVSSLEFCLFLLPLPKVPTRIQGCTSRPPATASPQALVVCLVNGEWAILCWFPVKCYIFNAVMEMELDVAVVKRDDLGNAHGLNLDEFDDGY

SEQ ID NO: 50596 - protein, 376 aa, Zea mays
  Coding DNA Sequence Number=SeqID_8817
  Gene Ontology: Mol. function=ATPase activity, coupled to transmembrane movement of ions, phosphorylative mechanism; Cellular component=membrane; Biological process=regulation of cell growth
  Homolog annotation: Hit_ID=Q8L4E7; Match level="QueryCoverage=89%, HitCoverage=91%, E-value=4e-97, Identity=58%"; Hit description=SAP -like protein BP-73
  Pfam annotation: Domain name=Rho_N; Domain location=304-342; Score =32.1; E_value=1.9e-06; Accession=PF07498.2; Description=Rho termination factor, N-terminal domain
  Pfam annotation: Domain name=SAP; Domain location=305-341; Score =14.3; E_value=0.029; Accession=PF02037.17; Description=SAP domain
  Pfam module annotation: Pfam domain module=Rho_N::SAP; Domain location=304-342::305-341
MLGPIRVSLVCSASPNHHRPRISDISQLQKEGSSRGKGRSYQDKDDSENIDEYDSDIMFSRNGPPISLASTSRPQDTSAPGEREMEIVELFKRVQALLRARVKGREKKPEPAKVHGERGSVDSLIKLLRKHSVDQRRKSSDEKEQNFGVMRRSNDSGNRRGSTIFGTKSDIQEEQKKQPPAPFKRPASNFRRRSPVPGVKFQPVINVDVDTDADRKSMRNNVADAVQMAKTALDERTATDEPDYMSPYEPDSVIEAENISLDDLDDISDDDEESDAGEPDNEYPELSLEIADVTDIDELHESSDLSSLKVAELRELAKSRGIKGYSKTKKNELIEVLSSSMAWWMKTGNYWPALRSRRRAEASCGFVIHAGMGGAA

SEQ ID NO: 50597 - protein, 115 aa, Zea mays
  Coding DNA Sequence Number=SeqID_8818
  Gene Ontology: Mol. function=protein phosphatase type 2C activity; Cellular component=nucleus
  Homolog annotation: Hit_ID=Q2HW33; Match level="QueryCoverage=93%, HitCoverage=42%, E-value=3e-18, Identity=37%"; Hit description =Protein phosphatase 2C-like
KQSYVPACAAVYDKLQCSRRLDAVQSGCTALSIVKQGDLMVVANMYYLADEPRVHFVWQPRQGSSVLAMSRTFNDYYIKDCGVISALEVTQRRTDNNDQFVILATVGVAFVSACL

SEQ ID NO: 50598 - protein, 168 aa, Zea mays
  Coding DNA Sequence Number=SeqID_8819
  Homolog annotation: Hit_ID=Q2HW33; Match level="QueryCoverage=34%, HitCoverage=17%, E-value=1e-10, Identity=53%"; Hit description =Protein phosphatase 2C-like
MEAVVVGRDVDGGWRGIQRRGQKRDDFGASGVGLDGGGGGGGVCAWPESSEESSGASFTQANREAGSGVAEESPCASSAPANVEVGDGVCVRAQTTDIKWRSYVPACAAVYDKLQCSRRLDAVQSGCTALSIVKQGDLMVVANVGDSRIVLGTASDDGAITSFSSSST

SEQ ID NO: 50599 - protein, 111 aa, Zea mays
  Coding DNA Sequence Number=SeqID_8820
  Subcellular localization annotation: CTP_CleavageSite=37; ConfidenceScore=5.29e-01
MARRSFSDPPKAFSPPFSPLCQWIHGPFPANEFIVVPSSPLPNSGDPGATLARASPNPSDLTDAERRDTARSRLFPRSDFPPSDLDRMARTAGYRFAPARLTPWPACQCRS

SEQ ID NO: 50600 - protein, 230 aa, Zea mays
  Coding DNA Sequence Number=SeqID_8821
MVQTEKYFLFPVEMQKIKCYDQIYYSAQIIDGQRGPSPAAAASGREKLDVLTLYDGERRPARCVMHRDLKPEKFLNASKQASPQQLPSRRPGLPSGSQRIPGGGSSSCPSSSPGDARRPPQAPGGRPFIPKRQAAVVLPRHQSIVTSQALPIILPRHQAVVPPQALDGGGLQGYGCINITKTIRLDWLLPHLPRHFRLEVSSSIPLECIFFFPMQLLRGSDVQIPDPRAL

SEQ ID NO: 50601 - protein, 519 aa, Zea mays
  Coding DNA Sequence Number=SeqID_8822
  Gene Ontology: Mol. function=sugar porter activity; Cellular component=integral to membrane; Biological process=carbohydrate transport
  Homolog annotation: Hit_ID=Q945E5; Match level="QueryCoverage=95%, HitCoverage=85%, E-value=0.0, Identity=81%"; Hit description =Putative sugar transporter
  Pfam annotation: Domain name=MFS_1; Domain location=40-456; Score =86.0; E_value=1.1e-22; Accession=PF07690.6; Description=Major Facilitator Superfamily
  Pfam annotation: Domain name=Sugar_tr; Domain location=36-497; Score =398.4; E_value=1.1e-116; Accession=PF00083.14; Description=Sugar (and other) transporter
  Pfam module annotation: Pfam domain module=MFS_1::Sugar_tr; Domain location=40-456::36-497
MAEQHKGPTNRVASDGLPDGVAPPRKKSNVRFAFACAILASMTSILLGYDIGVMSGAALFIKEDLKISDVEVEVLLGILNLYSLIGSFAAGRTSDWIGRRLTIILAAVIFFVGAFMMGFSVNYPMLMAGRFVAGIGVGYALMIAPVYTAEVSPASSRGFLTSFPEVFINFGILLGYVSNYAFSHLSLKVGWRLMLGVGAAPSVVLALMVLGMPESPRWLVMKGRLADAKVVLGKTSDTPEEAALRLADIKEAAGIPADLDGDVVAVPKRTGGEERVWKELILSPTPAVRRILLSALGIHFFQQSSGIDSVVLYSPRVFQSAGIADKNKLLGTTCAVGVTKTLFILVATFTLDRFGRRPLLLASTGGMVVSLVGLGFGLTVIGHHQEGTTIPWAIGVCIASILGVVAFFSIGLGPITWVYSSEIFPLHLRALGCALGVGLNRVTSGVISMTFLSLSKGITIGGSFFLYAGIASLAWVFFFTYLPETRGRTLEQMGGLFGIPNMAGDSDQLTSSRPRRRRP

SEQ ID NO: 50602 - protein, 89 aa, Zea mays
  Coding DNA Sequence Number=SeqID_8823
MAAATTQRPPYSAVAALAEQPLACLAAASAQSWPAVVALAERERPACCGDEDDGYDYAYGIGCPHCNHCSGEDEAVEEDFQEFQEYDEF

SEQ ID NO: 50603 - protein, 82 aa, Zea mays
  Coding DNA Sequence Number=SeqID_8824
  Subcellular localization annotation: CTP_CleavageSite=67; ConfidenceScore=5.32e-01
MARFPAVLLAPYSLRTALLGAPCPSSLPSDFPARAQQLLCSFPAHSRIPQAPSRGAPVLTGREPLSMAAEYAPLFKVIGVVC

SEQ ID NO: 50604 - protein, 121 aa, Zea mays
  Coding DNA Sequence Number=SeqID_8825
MTSHESSKGGNAHSHMDGLAQEGFPRILWEVVQGEAMSQLMGLVESTKITLDKREDLVVNLSTELVEKDLQVEQMATQIQELEDQVEARENTIEILQDQLQTTQQQLEEANQHLDPHHQEI

SEQ ID NO: 50605 - protein, 175 aa, Zea mays
  Coding DNA Sequence Number=SeqID_8826
MALHKLYDDGGPQLSYGSRATKDQGLLREGWPRGTEDGTGALLGPLASLTRVDACNPPTASAPDLGAGRTRRPRDFHLSHARLRPPRLSPFALAHALDPSGLGHAAHSLVGLGTPLSRNADSPQHGPKEYREEADPPRRMATEADGVNRFIGRGASNRELTEGRCYTKEIIQGTQ

SEQ ID NO: 50606 - protein, 129 aa, Zea mays
  Coding DNA Sequence Number=SeqID_8827
  Gene Ontology: Mol. function=peptidase activity; Cellular component =chloroplast thylakoid membrane; Biological process=lipid transport
  Homolog annotation: Hit_ID=Q9FWP7; Match level="QueryCoverage=60%, HitCoverage=59%, E-value=6e-30, Identity=77%"; Hit description =Putative lipid transfer protein
  Pfam annotation: Domain name=Tryp_alpha_amyl; Domain location=48-128; Score=76.2; E_value=1.1e-19; Accession=PF00234.12; Description =Protease inhibitorseed storageLTP f
MAARAALLLAIGLVLAGCSRCQRDLLPAAAGPKAADANARRPPPRVVPRDALKLGVCADVLGLVKAKVGSPPYEPCCSLLDRLVDLEVVACLCTAIKANILGINLNLPIDLSLILNNCGKNCPNDFHCA

SEQ ID NO: 50607 - protein, 55 aa, Zea mays
  Coding DNA Sequence Number=SeqID_8828
MPRLAATVVSRRADKALRRGAFGGRLSLSTLQPSNAASSDEGSTVQGGATVLPLI

SEQ ID NO: 50608 - protein, 388 aa, Zea mays
  Coding DNA Sequence Number=SeqID_8829
  Gene Ontology: Mol. function=catalytic activity; Biological process =trehalose biosynthetic process
  Homolog annotation: Hit_ID=Q9FWQ2; Match level="QueryCoverage=99%, HitCoverage=100%, E-value=1e-157, Identity=75%"; Hit description =Putative trehalose-6-phosphate phosphatase
  Pfam annotation: Domain name=Trehalose_PPase; Domain location=120 -371; Score=276.0; E_value=7.2e-80; Accession=PF02358.7; Description =Trehalose-phosphatase
  Subcellular localization annotation: CTP_CleavageSite=57; ConfidenceScore=5.18e-01
MDLKTGLNSPVIADHLPTLALPAAVMTFTTPTSFPSPGLCLNTTKKIPLPGKIEEVRAAGWLDLMKASSPTRKRQIKDVICDAQSDLDLQYCNWTVNYPSALISFEAISDLAGSKRLALFLDYDGTLSPIVDNPENALMSDEMRAAVRHAASLFPTAIISGRSRDKVFDFVKLNELYYAGSHGMDIMGPVRKTTDSNGVECIRSTDVHGKEVNLFQPASEFLPMITEVYEKLGESVKDIDGARMEDNKFCVSVHYRNVAEDIPTLASQDYKKVFHRVTAVLEGYPCLRLTHGRKVFEVRPVIDWNKGKAVEFLLESLGLSESEDVLPIYVGDDRTDEDAFKVLKASNRGFGILVSSIPKESDAFYSLRDPAEVMEFLRMLAAWKEQST

SEQ ID NO: 50609 - protein, 104 aa, Zea mays
  Coding DNA Sequence Number=SeqID_8830
MAVNQSRAQVYYLPKPTGLLSCGDSGECACKGTVPVPKAQRAHARIDGRSIAVTSYGRTRQRGTPYSSMAEAMASAPNTAPRNTGKKQTRPGAWLPKRTELIDS

SEQ ID NO: 50610 - protein, 74 aa, Zea mays
  Coding DNA Sequence Number=SeqID_8831
MDITGGATRVLATREGSGVGFCEEWLQHGSYAAHIGSRCGSVAGDRGMAERLATGSAGALTIAVPVIGLLRRTR

SEQ ID NO: 50611 - protein, 617 aa, Zea mays
  Coding DNA Sequence Number=SeqID_8832
  Homolog annotation: Hit_ID=Q2QM21; Match level="QueryCoverage=54%, HitCoverage=49%, E-value=8e-56, Identity=37%"; Hit description =Expressed protein
MVVARKPQQQPAGVARRRGGGVRVGPARLEGLPAAWAGAAAAAVKVKWPAPGGALSQMLTGRWARGVTAVEAVGAGGTVRWEPRDGNRFRLDDVVGPAGRPERGVFFSVLYGFQEQGRGNKELVRLEEIGTAMISLEECCWEMQLQQHDHQLVAVPVRVRKDGWASDAMLYVDVELVDANTRPDVDRAVSFREKPRTYMAPPPTMRGSRKSLESATCHDVLDLKQLLDLAEKEGRVAVYGNIRSSDTSSVSSTSSSSSTISVSSASTSGGASPEPASTSKRRFLPWTRRSRDFDKRTAESLSQELPTKCTVSLLLARDGNEMLRSSSCAPALILSRRATNPAQDDGPGPAGGWETREFTSRDAETRLRTPVFFASIDQRDGSAGGEGACAALAAVLAAALHAGHPAMPTRPELDALIRDGSSEWRRLCDDEARAARFPNRHLDLDTVLASRAWPIAVRHDRAFVGFFQPESFASLSGAMSFDDIWREIAGGGGRGRGPGGRADVYIVSWNDHFFALKVESDCYYVVDTLGERLHEGCDKAYMLRFDGSSEMRAEGTEEVVVAGKECCREFIKRFLAAIPLREELEIEKKGGSGIDGGGAPHQRLQIEFHFTAFTRRQ

SEQ ID NO: 50612 - protein, 120 aa, Zea mays
  Coding DNA Sequence Number=SeqID_8833
MVDQRFAGFLPPSAQACACTTPRRRIGHSTVNARLEYVEAQEKNTHCNRNAPVGNVTAKMELTEARDSTPRRYHRSLTSTGSPVTNGGKMAAQDTQYRATLRNRDSHPDPQKEDGARWFG

SEQ ID NO: 50613 - protein, 143 aa, Zea mays
  Coding DNA Sequence Number=SeqID_8834
  Subcellular localization annotation: CTP_CleavageSite=67; ConfidenceScore=5.26e-01
MQGSCLIAITTKSTKDLPTLTTPLLPLPLSAIANYPSDSGVNKACACTTPRRRTGHSTVNARLEYVEAQEKNTHCNRNAPVGNVTAKMEVTEARDSTPRRYHQSLTSTGSPVTNGGKMAAQDTQYRATLRNRDSHPDPQKEDG

SEQ ID NO: 50614 - protein, 172 aa, Zea mays
  Coding DNA Sequence Number=SeqID_8835
MGKPVPSLLMLLLSRVTALVPTITGMGDHVSGRVRRAICGQVHSGHVMQLLKNDILPKKTRMEDAGRGFRPPAGIVDAGGLSRFGGGRRRDGVRRGDRRHGREGGCQRRCRTPAWMEAAVGIKGVGRLSRFDGGRRRDGVRRRGLKTYVGRTLAARMQDAGVDGSRRRGSKA

SEQ ID NO: 50615 - protein, 300 aa, Zea mays
  Coding DNA Sequence Number=SeqID_8836
  Gene Ontology: Mol. function=3'-5'-exoribonuclease activity; Cellular component=exosome (RNase complex); Biological process=RNA processing
  Homolog annotation: Hit_ID=Q9SP08; Match level="QueryCoverage=91%, HitCoverage=94%, E-value=5e-73, Identity=60%"; Hit description =Exonuclease RRP41
  Pfam annotation: Domain name=RNase_PH; Domain location=38-195; Score =97.3; E_value=4.6e-26; Accession=PF01138.11; Description=3' exoribonuclease family, domain 1
  Pfam annotation: Domain name=RNase_PH_C; Domain location=198-263; Score=42.4; E_value=1.6e-09; Accession=PF03725.5; Description=3' exoribonuclease family, domain 2
  Pfam module annotation: Pfam domain module=RNase_PH::RNase_PH_C; Domain location=38-195::198-263
MEYVNPLTGFRVDGRRPNEVMHPRPLSPTRGSREQPYLTRCWTSRRCGNSRARSALFEMGNTRVIAAVYGPREVQNKGQQVNSKEALVKFHSSKCIILLEAVLCAVFLREFCMQVRCEYRMAEFSTGDRRRKPKGDRRSTEISLVIRQTMEASILTHLMPHSQIDIYVQVLQADGGTRSACINAATLALADAGIPMRDIATSCSAGYLCSTPLLDLNYLEDSAGGSDVTVGILAKMDKVTLLQMDAKLPIDTFENVMGLAIEGCKAIATYIREDLPLTRWNFWVVDYRSGTGAIGEYKEA

SEQ ID NO: 50616 - protein, 216 aa, Zea mays
  Coding DNA Sequence Number=SeqID_8837
MKTQCQWSQKMVQPADNIQGDWDQWIVNDPPAQQPQQDLPPNEQQISNQHSSLSSDSSFGPIQGVPVQNGHILEDLDVVGPVLHNNAPNIPAMGDVPMNGLQEVDDPPNQGDHHVLEDILLPNAQLGEQINNGPNNVCRSLRSGLLFFLSNLLHEDSFSWSKSFLSSDIPPALLEPEFETLSFAIPKKCLDSKFLESVQSEESTGSVGDLFSNAMS

SEQ ID NO: 50617 - protein, 104 aa, Zea mays
  Coding DNA Sequence Number=SeqID_8838
MELMSAVSSPSRRPLPFPLLLYKLDSHAQELSLPKLAISLVLLALTIGHARAVPSSTTAVDATAQHPGWTIHRLAVLGPPVELAGPSACTTPSPRSYPARRNDA

SEQ ID NO: 50618 - protein, 609 aa, Zea mays
  Coding DNA Sequence Number=SeqID_8839
  Gene Ontology: Cellular component=cytoplasm; Biological process =vesicle docking
  Homolog annotation: Hit_ID=Q1SR77; Match level="QueryCoverage=93%, HitCoverage=97%, E-value=1e-120, Identity=67%"; Hit description=AMP -dependent synthetase and ligase
  Pfam annotation: Domain name=Sec10; Domain location=95-577; Score =392.3; E_value=7.3e-115; Accession=PF07393.2; Description=Exocyst complex component Sec10
MKERSKSSSVSNLPLILNIDDFKGDFSFDALFGNLVNELLPSFQEDSADSADGHGIGGTDVLPNGHTRTSSDATKFAQGLSAPLFPEVDALLLLFKNSCKELVDLRKQIDGKLSNLKKEVSTQDDKHRKTLTELEKGVDGLFNSFARLDSRISSVGQTAAKVGDHLQSADAQRETASQAIELIKYLMEFNRNPGSLMELSPLFSDDSRVAEAASIAQKLRSFAEEDISKAMPSVVGGATASRGLEVAVANLQEYCNGMYLRMLAVAYEKTQELARDLRAVGCGDLDVEGLTESLFSAHKDEYPEYEQASLRQLYQAKLEELRAESQKVSEPSGTIGRSKGASVASSPLEISVAAVTEFVSQYITDGLERARDSLTEAASLRERFVIGSSVSRRVTSQAEAAAAAGESSFKSFMVAVQRAGSSVAIVQQYFANSISRLLLPVDGSHAATCEEMATAMSSAEGAAFKGLHQCIETVMAEVDRLLSTEQKAADYHSPDDGMVHDHRPTNACTSGGLRLKRDITEYGEFVRSFNAPTVDEKFELLGILANVFIVAPESLSSLFEGLFSLETTTRVRNWHPGLAPYGPVESRHFVNNQTVIEPIVCPVLGSIRF

SEQ ID NO: 50619 - protein, 207 aa, Zea mays
  Coding DNA Sequence Number=SeqID_8840
  Gene Ontology: Mol. function=protein serine/threonine kinase activity; Cellular component=cytosol; Biological process=protein amino acid phosphorylation
  Homolog annotation: Hit_ID=Q9LE81; Match level="QueryCoverage=99%, HitCoverage=17%, E-value=3e-94, Identity=80%"; Hit description=IRE
MGHGATADWWSVGIILFELLVGLPPFNAETPPLIFDNIMNRNIPWPKVPEEMSYEAYDLIDKLLTENPVQRLGATGASEVKQHVFFKDINWSTLARQKAMFIPSTEAHDTSYFMSRYIWNAEDEQVHGSSDFDDLTDTCSSGSLSNVQDEDGDECGSLTDFSAPALAVKYSFSNFSYKNLSQLASINYDLVVKNAKESAEAPKPSGP

SEQ ID NO: 50620 - protein, 247 aa, Zea mays
  Coding DNA Sequence Number=SeqID_8841
MAKNDASLRNLENQVGQLATELRNQPQGALPSDTENLRNPGKEHCKAFSNEVQPSVEIPVSPKIESAKSDKKINQPVPVKKPPPPYLQRIQKQKQGIQFKKFLDVLKQLHINIPLVEALEKISNYVKFMKDILSKNEGLENLIRKLGIGEVQLADRSLAHPKGKIKDILSIRFPDTIDDYSAVSDLEDLIVEKELNYVEDPLEQILTSDPLNGEKEDEYLALLEANQRGFKPQSLFESLELEKRDYA

SEQ ID NO: 50621 - protein, 90 aa, Zea mays
  Coding DNA Sequence Number=SeqID_8842
MDISRHFTFTFSAKNAIGELFELVSIFLLQLHELLLNLQASKNDVLLSVSRSPIWKDWFDFCEVKSKWVKNVALKWPIFVHTGRDTYVCG

SEQ ID NO: 50622 - protein, 35 aa, Zea mays
  Coding DNA Sequence Number=SeqID_8843
MTRDLQRAVGSNLDLWVKVSDSATSVECDQGNERE

SEQ ID NO: 50623 - protein, 200 aa, Zea mays
  Coding DNA Sequence Number=SeqID_8844
  Gene Ontology: Mol. function=protein dimerization activity; Cellular component=nucleus; Biological process=regulation of transcription, DNA-dependent
  Homolog annotation: Hit_ID=Q9FGV1; Match level="QueryCoverage=72%, HitCoverage=21%, E-value=3e-67, Identity=73%"; Hit description=Auxin response factor 8
  Pfam annotation: Domain name=B3; Domain location=107-184; Score=26.9; E_value=6.3e-05; Accession=PF02362.12; Description=B3 DNA binding domain
MVAHALLSYQTCNERSGCFRLGQQAAHEGENKCLNSELWHACAGPLVCLPTVGSRVVYFPQGHSEQADVETDEVYAQMTLQPLTPEEQKDTFLPMELGIPSKQPTNYFCKTLTASDTSTHGGFSVPRRAAEKVFPPLDFSQQPPAQELIARDLHDIEWKFRHIFRDKLDHSLEFIIIIIYLKHIIHTFQNTHKLIAPDFT

SEQ ID NO: 50624 - protein, 1064 aa, Zea mays
  Coding DNA Sequence Number=SeqID_8845
  Gene Ontology: Mol. function=nucleic acid binding; Cellular component= intracellular
  Homolog annotation: Hit_ID=Q6H4V9; Match level="QueryCoverage=73%, HitCoverage=79%, E-value=0.0, Identity=52%"; Hit description =Putative RNA-binding protein 10
  Pfam annotation: Domain name=DUF1777; Domain location=151-354; Score=- 75.5; E_value=0.0043; Accession=PF08648.2; Description=Protein of unknown function (DUF1777)
  Pfam annotation: Domain name=G-patch; Domain location=988-1032; Score= 50.5; E_value=5.5e-12; Accession=PF01585.13; Description=G-patch domain
  Pfam annotation: Domain name=RRM_1; Domain location=448-528; Score =57.9; E_value=3.4e-14; Accession=PF00076.12; Description=RNA recognition motif. (a.k.a. RRM, RBD, or
  Pfam module annotation: Pfam domain module=DUF1777::G-patch::RRM_1; Domain location=151-354::988-1032::448-528
MDPGRYPVQQGHGWDNNSALEGFPAALDHNYRVGGSYDERRYLDERYSRDNVYPRSNYHRDFLERDNQPPPPAASAGIWSQSRRTTYEEEYPHNRDSRRHQKPYADSYSDMDTFRDHEITSFQDFDKFRDGYRGVDSFRDHEFDRPSRFGGRERDDNSYDDYDYRPRVSHQSRDNSRERDYEYGRHSYDSDYERSSRRDGNWRRRDRDRLSRERDQSPHRRHERSRSRSHGRDDRPRSRSPRSRSHGRSHREDSYDDGRNDKTEKRRDREEKYQREHYSVAEWGPLRHVRVIKERHSGISRGFAFIDFPSVGAASTMMERIGDDGLVVDGRKLFFEYSSKPTGGTGGPFGNDNAAKSGHSVHRGITVPSDWMCTICGCVNFARRTSCFQLPFKVVSMTSRLHFCYFATLGQEECNEPRTDDAPAADISLSHSTSLGKKGTDSGPTHVLVVRGLDENADEEMLRYEFSKHAPIKDLRLVRDKFTHVSRGFAFVHFHSVYLAFFMVADATKALEATNGTTLEKNGQILRVAYAKSILGPGSGTSGASQSSSLAAAAIEAAAFSQQYDAVGWTPKEYNPDDKQSTSWQEQVVGSVPVQQDGSGLHSGFVWDEASGYYFDAASGFYYDGNTGLYYDGNSGIWYSYDNQSQQYIPCGDQNDNKTPGKQSEPSKGTDGRKVVISAPAATVTSVEKAASLPDAVQAAATAALAAEKKEKEKAKEIKLASKSSILANKKKMNNVLTMWKQRSHEGQATRLTLDENHLSTSSEDRPLQSGQHAKTKVKFDVTGLKESSISSSGVNTTAQAALTGGLESPVKARPVSNSSGGTLMGVIRGSARGVVKSDTPYSGASAGISTSAVGGAEVSSTNSDMPTVMTPFRTDASALGSYTPSTVSASGKRRFSETPVTSTTSKEQSQTAYRDRAAERRNLYGSSSSTGDDLPDPELRNSNRDMAFKKFSSDPMPFPPGVGGGRGVVSDDVQSFEVITAEKAIDEKNVGNQMLRNMGWHEGLGLGKDGSGMKEPVQTQAMDGRAGLGSQTKKLDPSLEVQAGDSYKTVIHKKALARFREMS

SEQ ID NO: 50625 - protein, 526 aa, Zea mays
  Coding DNA Sequence Number=SeqID_8846
  Gene Ontology: Mol. function=binding; Cellular component=nucleus; Biological process=apoptosis
  Homolog annotation: Hit_ID=Q6AZH5; Match level="QueryCoverage=90%, HitCoverage=85%, E-value=2e-81, Identity=37%"; Hit description =Ctnnbl1-prov protein
  Pfam annotation: Domain name=DUF1716; Domain location=19-125; Score =190.1; E_value=5.2e-54; Accession=PF08216.2; Description=Eukaryotic domain of unknown function
MEVSNALKRKRYDDDNYMEAEVDLSLLEAVEKSQNTVELLDLRTLKKLVLSFERRLKENIEARLKYPDQPERFADSEVELHEELEKLKILAGAPELYPELVNLNAIPSILNLLSHDNTDIAIDVVHLLEDLTDEDVLEDNDEPARILVDSLIENNVLELLVQNLQRLSDKDPDEMSAIYNTLASIENMIEVKPTVAELVCERTKLLRWLLGKIKVREFDSNKQYASEILAILLQNSTANQKRLGQMNGVDVVLQAVAMYKSKDPKTSDEEEMLENLFDCLCCLLMPLENKERFVKAEGVELMIIIMKQKKSAYASAIRALDFSMTKYPPACERFVDVLGLKTAFAAFMGKASISLFIPISKKNKKERYQEELEERLVSLIASLFGGILRGSRRERLLSKFVENECEKIDRLMELYIRYSDRVTAETQRLEQLELDDLEMDEEEKYNRKLESGLYTLQLIAVILGHLWCSEHPQMRARIELLLKQQKLTKNDIKNILQEYHDNIGDLDGAEEKEQAQTRIQKIISSF

SEQ ID NO: 50626 - protein, 366 aa, Zea mays
  Coding DNA Sequence Number=SeqID_8847
  Gene Ontology: Mol. function=pepsin A activity; Biological process =proteolysis
  Homolog annotation: Hit_ID=Q5Z4D8; Match level="QueryCoverage=97%, HitCoverage=68%, E-value=1e-51, Identity=37%"; Hit description =Putative nucleoid DNA-binding protein cnd41
PVVHRLSPCSPLAGAARNQQPERRSVADVLHRDALRLRSLLHREEDNHRTPAPAAPPGGGVSIPSRGEPIEELPGAFEYHVVAGFGTPMQKLPVGFDTTTTGATLLQCTPCGSGADHAFDPSASSSVSQVPCGSPDCPFHGCSGRPSCTLSVSFNNTLLGNATFFTDTLTLTPSSSATVDKFRFACLEGIAPGPAEDGSAGILDLSRNSHSLPSRLVASSPPHAVAFSYCLPASTADVGFLSLGATKPELLGRKVSYTPLRGSPSNGNLYVVDLVGLGLGGPDLPIPPAAIAGDDTILELHTTFTYLKPQVYKVLRDSFRKSMSGVPCRAAARKPGHVLQLHRDDDCDGGTVIGSMAQMSTEVVYD

SEQ ID NO: 50627 - protein, 275 aa, Zea mays
  Coding DNA Sequence Number=SeqID_8848
MKRLSAGSSMAACRLSLPSFAFTSNADSAEGVDLLVFKLSAWCDEPELVPAELDLLAKEPQLRASEFGRCPRTLVFPISVRVFCSDVVLGRSPSPPPPPPYSGDDHEQNHDKRRRNQHSTPTMSVRRPVHACLGPSVCADSAPGGTSVTVALLVPLGAETTTSVSPPLARRRPCAPQAATALTTTLPSEDPGLASVNGVISSDLMDSGKPTVGDSLEPSLLDPPHDTSFEISVFEETGGYPRIGQSPESHCADILGRASMPIMQDPGVPVANAAQ

SEQ ID NO: 50628 - protein, 747 aa, Zea mays
  Coding DNA Sequence Number=SeqID_8849
  Gene Ontology: Mol. function=protein serine/threonine kinase activity; Cellular component=cell surface; Biological process =protein amino acid phosphorylation
  Homolog annotation: Hit_ID=Q8H4I0; Match level="QueryCoverage=87%, HitCoverage=96%, E-value=0.0, Identity=74%"; Hit description =Putative receptor-type protein kinase LRK1
  Pfam annotation: Domain name=Lectin_legB; Domain location=32-275; Score=400.2; E_value=3.1e-117; Accession=PF00139.10; Description =Legume lectin domain
  Pfam annotation: Domain name=Pkinase; Domain location=360-631; Score =159.0; E_value=1.3e-44; Accession=PF00069.15; Description=Protein kinase domain
  Pfam annotation: Domain name=Pkinase_Tyr; Domain location=360-631; Score=108.3; E_value=2.2e-29; Accession=PF07714.7; Description =Protein tyrosine kinase
  Pfam module annotation: Pfam domain module=Lectin_legB::Pkinase::Pkina se_Tyr; Domain location=32-275::360-631::360-631
MANLLQTPFLVPFLLSMALINLVCFTATVSSEDDQFVYSCFSGKNLTLDGAAAVTADGVLELTNRTVHVKGHAFYPAPWRFRRSPGETVQSFSVTFVFGMVPIYSDKCTDGMAFLISPTKDFSGAQESQYLGLLNKTSDGKASNHIFAVELDSSENSEFHDIDDNHVGININSLTSFRSLSAGFYDDDDKNGLFQNLSLVSRKEMQVWVDYNGDTTQINVTLAPLKVNVAKPSKPLLTATYNLSTVLAEDPSYVGFSASTGPINSLYCVLGWSLGINAPAPPIDVAKLPKLPRAGPKPRSKLLEIILPIVTATFIILIGTSIFLFVRRRMKYAEVQEDWEAEFGPHRFPYKDLFHATDGFKNKNLLGLGGFGKVYKGVLPVSKLEVAVKRVSHESRQGMKEFIAEIVSIGRLRHRNLVQLLGYCRRKGELLLVYDYMSNGSLDKYLHCEGDKPTLNWDQRFQIIKGVASGLFYLHERWEKVVIHRDIKASNVLLDSEMNGRLGDFGLARLYDHGTNPQTTHVVGTMGYIAPELARTGKATPLTDVYAFGIFILEVTCGQRPISSHAEDSSQVLIDWVVNHWHKGSVTYTVDSRLQCSYNADEVRLALNLGLMCAHPICNARPSMRQVVQYLNGEMPLPEMMPTDLSYSVLAFMQNEGFDQYTSTVGSSGITASSLSSGRFHPKCEKRVKISEFILCNIYEAHVICGVIFFELCAITGGADDLEENDALAQMFHDEEKYYDNKNVIKN

SEQ ID NO: 50629 - protein, 94 aa, Zea mays
  Coding DNA Sequence Number=SeqID_8850
MVVDTYDTHSCEDVVELDMLQAQSSTGGTCVQDVGDAHARVGHLSTAHKIWSTLEKFYEGNDHLKTRLFETYRREHENFVQLARKTIDTMISQF

SEQ ID NO: 50630 - protein, 142 aa, Zea mays
  Coding DNA Sequence Number=SeqID_8851
MPMGQWRARVWGTLATRSRINGPGFNEPHEPLSEHLGHRIKGGWPGSGVWGFNSSSRPGVVLFTPAVARPSETRQTRVSKGTRVVWVAREECSTPRFGHEEGLYRPDAVKTRGGDERGNRRRFLVHRAQAKLTVGEAMIEAR

SEQ ID NO: 50631 - protein, 247 aa, Zea mays
  Coding DNA Sequence Number=SeqID_8852
  Gene Ontology: Cellular component=protein complex
  Homolog annotation: Hit_ID=Q5Z876; Match level="QueryCoverage=85%, HitCoverage=14%, E-value=1e-77, Identity=66%"; Hit description =Proteasome activator subunit 4-like
MSNGTYDLQGNSYCFCKNLVADSFCFFMFRVQIFHFMIASLKSGRSSVLLDTIIRLVYPILSLQETSNKDLSLLAKSAFELLKWRILHRPFLETAITSILPLVSDPKLAYQICTVIVSQDLYLQVREHAAGVLASLMKGIDEDLSKDFRERSYAQAQHIFVARRRNLKFSVGTIHGAVLALTASVLSVPYDMPSWLPSNVSLLARFIREPPPIRSTVTKAVAEFKRTHADTWSIQKDAFTEDELEAS

SEQ ID NO: 50632 - protein, 78 aa, Zea mays
  Coding DNA Sequence Number=SeqID_8853
MNARPTAPPLSATGRALRLRRPRACRLHGAGPVRRGGDRIGGHDLGESDAGVLEPNVAGVTRKPTASLKIMASGTAQR

SEQ ID NO: 50633 - protein, 60 aa, Zea mays
  Coding DNA Sequence Number=SeqID_8854
MSPAEKQYHVKILDELLDSMNHSSAQSCSGPPSLNREPPFHLKPPLVLLLVKEQGACPLL

SEQ ID NO: 50634 - protein, 811 aa, Zea mays
  Coding DNA Sequence Number=SeqID_8855
  Gene Ontology: Cellular component=protein complex; Biological process= multicellular organismal development
  Homolog annotation: Hit_ID=Q5Z876; Match level="QueryCoverage=99%, HitCoverage=45%, E-value=0.0, Identity=78%"; Hit description =Proteasome activator subunit 4-like
VYLLKPKSLAFEYFEKLINFLEQFYHPSNGGRWTYSLERFLRYLVVYFEKRLQHEQFVMAVEDHDQSYLGKEERSVFVKAILKLLDRGQYSKDNSLAETVSVATSILSYIEPTLVLQFVAKNFQRALETTTATHQLKNAVTSVAFSGRALLLCSLCSSQNDDSSVVDSFSDLVVASLSNALLGMDANDPPKTIATMQLIGSIFSNLAAVSDDVPILLQSTTLSNWLDEFFSRLFSVLHNLESSSPINEGYQSSFMSGTFLVDSPYYFCMLEILLGKLSKPLFNQSLKRIAKFVNANILPGATSEVGLLCCACVHSYPEEASVYLVKPILETIMSSFEGTPTTGYVGRVVADKASTKAALSPALETAIDYYLRVLAISISYAGPTLLNYKEELNHIITSAFQSPSWKVNGAGDHLLRSLLGNLVSYYPIDQYKPFTCQPIGNIIEPWGCSKAHQDREDEMLNFPPKWHDPSHDELSFANELLQLHFQSALEDLLTICQTKVHSDTEIRPSYKDGRSLEVESAFFIAGSAGSTVGSSEMREKAAEFVHIACRYLLKERTDDSILLSLVVRVIDALVNYVSCVGSLEYQEWSSHVQAWKLESASIIEPPCNFIVPFHAQGKKRPRWALVDKANLHSTWRCSQSSYHRYRMNADVSPSVPMINLMNDLLDLSLHNYETVRSYAGRSLTKLLKRWPSLISNCVLTLTGNLRDPKAPEHVVLGSCSILISQTVLRHLTTDSVSLSSFIMGILESSHHESLKCQKAITELFVTYNIRFSGISRSFFKTPENQADKPGFLSLISQINALGFETNGLHWR

SEQ ID NO: 50635 - protein, 42 aa, Zea mays
  Coding DNA Sequence Number=SeqID_8856
MGKELDVKSAFLNGKLEEEVYMDPPLVFDKNLELKYECTFYG

SEQ ID NO: 50636 - protein, 332 aa, Zea mays
  Coding DNA Sequence Number=SeqID_8857
  Gene Ontology: Mol. function=DNA binding
  Homolog annotation: Hit_ID=Q1RTB4; Match level="QueryCoverage=82%, HitCoverage=62%, E-value=3e-14, Identity=26%"; Hit description=IMP dehydrogenase/GMP reductase
  Pfam annotation: Domain name=DUF1723; Domain location=34-84; Score =5.9; E_value=0.1; Accession=PF08330.1; Description=Protein of unknown function (DUF1723)
MESGFLDKVKDNAAVRTWSETTQQEKGDSLADGHVDKRLFQALAQFWNPAYSCFTFGKVDLVPTIEEYMALLHCSKFQEDRVYSRAVNVPTFSKKLMSVTGMSEQWVVARIKQKGDSKCVPWRGLKDAILTHPDVRKRLDVFTLSIYGLVVFPKALGYVDETVTDLFDRLDKKVTPIPATLAETFRSLSACQKTGEEEDIEWKAPWLLPDEILYRCGSFDWVPLLGVWGATGYAPLLVLRQYRSRKFIPATQGIADCEYSYKDDGYRKKVQEMASAWKQTRRMKRLSVGPMTTPEYHQWWARRINDNTPKINQEEGQSIEEHLRVIPSELEM

SEQ ID NO: 50637 - protein, 129 aa, Zea mays
  Coding DNA Sequence Number=SeqID_8858
  Homolog annotation: Hit_ID=P93040; Match level="QueryCoverage=44%, HitCoverage=19%, E-value=1e-07, Identity=50%"; Hit description =Membrane associated protein
MGHIAANCEGKAKRKEGEFDEKADGKTVARKPYQFDEQKDQVAIEQILRVVFLDPKRPCLALRLRSNELKLERQLENTEAEISSFRRIPRDLAAFEAKRTTENGDTGVHDKVNGVGKPHLSILVKEADK

SEQ ID NO: 50638 - protein, 662 aa, Zea mays
  Coding DNA Sequence Number=SeqID_8859
  Gene Ontology: Mol. function=GTP binding; Cellular component =intracellular; Biological process=RNA-dependent DNA replication
  Homolog annotation: Hit_ID=Q5QN81; Match level="QueryCoverage=71%, HitCoverage=87%, E-value=1e-138, Identity=51%"; Hit description =Pentatricopeptide (PPR) repeat-containing protein-like
  Pfam annotation: Domain name=PPR; Domain location=273-306; Score =17.9; E_value=0.037; Accession=PF01535.11; Description=PPR repeat
  Pfam annotation: Domain name=PPR; Domain location=307-341; Score =19.4; E_value=0.013; Accession=PF01535.11; Description=PPR repeat
  Pfam annotation: Domain name=PPR; Domain location=342-376; Score =33.9; E_value=5.6e-07; Accession=PF01535.11; Description=PPR repeat
  Pfam annotation: Domain name=PPR; Domain location=377-411; Score =23.4; E_value=0.00081; Accession=PF01535.11; Description=PPR repeat
  Pfam annotation: Domain name=PPR; Domain location=412-446; Score =52.9; E_value=1e-12; Accession=PF01535.11; Description=PPR repeat
  Pfam annotation: Domain name=PPR; Domain location=447-481; Score =31.6; E_value=2.8e-06; Accession=PF01535.11; Description=PPR repeat
  Pfam annotation: Domain name=PPR; Domain location=482-516; Score =32.4; E_value=1.6e-06; Accession=PF01535.11; Description=PPR repeat
  Pfam annotation: Domain name=PPR; Domain location=517-551; Score=1.5; E_value=5; Accession=PF01535.11; Description=PPR repeat
  Pfam annotation: Domain name=PPR; Domain location=553-587; Score =25.6; E_value=0.00017; Accession=PF01535.11; Description=PPR repeat
  Pfam annotation: Domain name=PPR; Domain location=588-622; Score =32.0; E_value=2.1e-06; Accession=PF01535.11; Description=PPR repeat
  Pfam module annotation: Pfam domain module=PPR::PPR::PPR::PPR::PPR::PP R::PPR::PPR::PPR::PPR; Domain location=273-306::307-341::342-376::377- 411::412-446::447-481::482-516::517-551::553-587::588-622
MEPHFLNISDYDQMAQSGAAFARMFKEDDPVLDMVDEKILKRKRNQAAPGAWCTGRKSWWSDTCSQWGDVNVLKPGPQAKKFAETITNLLDDWNSQSNQCRLSSNWATVGGEPSNMKMSLLRFLNFLSKTHRKPIAAALFTRSLTTYSKQSIERRIFNRNSLPGHETSFGYSSTLHRIIYRSIHEDLTPKHLSVEHYEKNPAETKLEQDAARICTLLSTHSGSHADKLLEDASIKVSPSLVVEVLKRLSNAGVIALSFFTWAEKQKGFKYNTESYNALIEALGKIKQFKLIWSLVNEMKRRKLLNKDTFALISRRHARARKVEEAIEAFERMEEFGFKLETSDFNRLLDTLCKSRHVEKANKVFDKMKKRRFVPDIKSYTILLEGWGKEHNLLRLDEVYLEMKYDGFEPDVVTYGILISAYCKAKKYDAAIELFHEMEAKNCKPTPHVYCTLINGLGSEKRLSEALEFFERFKSCGFTPEAPTYNSLVGAYCWSMRIDDAFQVIDEMRKHSAGPNSRTYDIILHHLIKARRTNEAYFRFQKMLNEPGCEPTVSTYEIIVRMFCNEDRVDLAKQVWDQMKAKGVLPGMHMYSDLITSLCHKNKLGEACKYFQEMLDAGIRPPAKMFSNLKQALLGEGKKDEALNLARKINKLRGTPLVVRDQK

SEQ ID NO: 50639 - protein, 79 aa, Zea mays
  Coding DNA Sequence Number=SeqID_8860
VSEFDMRDSDFEASFSEHGFMRLKAILKVDKPVTRGFKLIMQGFEYIRDLVYDGVLEWRWYWRVSKARLRDIVIVFEYI

SEQ ID NO: 50640 - protein, 52 aa, Zea mays
  Coding DNA Sequence Number=SeqID_8861
MYTKEMLKKFEMNTFKPQATPMRSSTKFYKDGEVEDVGGASTNRDKCKQKVV

SEQ ID NO: 50641 - protein, 48 aa, Zea mays
  Coding DNA Sequence Number=SeqID_8862
MSPVGIDYAQIHGIHVPKPPLNKSNCISSSPKFKTKALSLINGHSIFG

SEQ ID NO: 50642 - protein, 89 aa, Zea mays
  Coding DNA Sequence Number=SeqID_8863
MRVQDEQVTFNVLEAIGSPYEVKDCSAVSKADPLFESLELSAYEYMQPNTSREEPLKLELTVLKRHEKGIEWTIANIRVQERSGIDLDL

SEQ ID NO: 50643 - protein, 164 aa, Zea mays
  Coding DNA Sequence Number=SeqID_8864
  Gene Ontology: Mol. function=DNA binding
  Homolog annotation: Hit_ID=Q9LGH0; Match level="QueryCoverage=84%, HitCoverage=37%, E-value=2e-20, Identity=42%"; Hit description=NAM -like protein-like
MPHGHSYGGPPYGTYGTIVPPSSDNDVMSNRSAHSDVDLSEADAPQRPMGKKKSKDALRRGGIDACKEALDILWAKKFDADAEKERKREERYAKSYALDKERLDLEKEKIVLEREKASNEANTSYLKRIAEEERIMTIDMNSLNEMQQQFYMNLQAEIMARRNN

SEQ ID NO: 50644 - protein, 316 aa, Zea mays
  Coding DNA Sequence Number=SeqID_8865
  Homolog annotation: Hit_ID=Q9FH87; Match level="QueryCoverage=37%, HitCoverage=18%, E-value=1e-11, Identity=36%"; Hit description =Similarity to salt-inducible protein
  Pfam annotation: Domain name=PPR; Domain location=227-260; Score=6.9; E_value=1.1; Accession=PF01535.11; Description=PPR repeat
  Pfam annotation: Domain name=PPR; Domain location=261-295; Score =13.4; E_value=0.19; Accession=PF01535.11; Description=PPR repeat
  Pfam module annotation: Pfam domain module=PPR::PPR; Domain location =227-260::261-295
MAVKPTPAAAAALHGDQQVAAALLAAAGALCDYGDVVPVPGVLPPCPHRHLHRTHCPLSPLLPHPSCTPHLPAPLSPPHLTSGSARTSAVVLLPRGALPLLPPRRRSLTGSPQLATPACGAYDVLWGFAAGRFLSTSSASDEDGGSLEQEDAATSNPEGVGRVCAAIADVIAAGADANLEAALSALSPPLCEAVVLAVLHRFKHAHRPSYRFFRWATASGGFTHTTITYCKMLLILGKTRQFESMVALLQEMGKAGTLSMDAFKVAIKSFAAAGEIKKAVGVFELMRKNGFDDGVESFNCLLVALANEGLGREARQ

SEQ ID NO: 50645 - protein, 33 aa, Zea mays
  Coding DNA Sequence Number=SeqID_8866
MVEPSLTCATVGGVAAYGIRGGAVTVLLCLCME

SEQ ID NO: 50646 - protein, 273 aa, Zea mays
  Coding DNA Sequence Number=SeqID_8867
  Gene Ontology: Mol. function=hydrolase activity, hydrolyzing O -glycosyl compounds; Cellular component=cell wall; Biological process= carbohydrate metabolic process
  Homolog annotation: Hit_ID=Q8W4U8; Match level="QueryCoverage=89%, HitCoverage=89%, E-value=1e-120, Identity=80%"; Hit description =Xyloglucan endotransglycosylase
  Pfam annotation: Domain name=Glyco_hydro_16; Domain location=30-213; Score=340.2; E_value=3.4e-99; Accession=PF00722.11; Description =Glycosyl hydrolases family 16
  Pfam annotation: Domain name=XET_C; Domain location=225-270; Score =74.9; E_value=2.6e-19; Accession=PF06955.3; Description=Xyloglucan endo-transglycosylase (XET
  Pfam module annotation: Pfam domain module=Glyco_hydro_16::XET_C; Domain location=30-213::225-270
MSSAFSSRARVLLALLLGLYAACAAAAARVDDGLELTWGDGRGSVSPDGQVLTLSLDHTSGSGFRSKDTFLFARADVQIKLVPNNSAGTVTTFYFVSEGPWDVHDEVDLEFLGNVSGQPYTLHTNVYAGGSGSREQQFHLWFDPTADFHTYSIEWTQQHILVLVDGTPVREFKNHADWGVPYPSSQGMRLYGSLWNAEDWATQGGRVKTDWSQAPFVAQYRNFTAAAGGGYGLQMDAAAQQAMKWARDNYMVYDYCADAKRFPLGVPPECSMP

SEQ ID NO: 50647 - protein, 653 aa, Zea mays
  Coding DNA Sequence Number=SeqID_8868
  Gene Ontology: Mol. function=ATPase activity, coupled to transmembrane movement of ions, phosphorylative mechanism; Cellular component=membrane; Biological process=metabolic process
  Homolog annotation: Hit_ID=Q94IM5; Match level="QueryCoverage=96%, HitCoverage=98%, E-value=1e-125, Identity=71%"; Hit description=P -type ATPase
  Pfam annotation: Domain name=Cation_ATPase_C; Domain location=475 -618; Score=23.1; E_value=3.4e-06; Accession=PF00689.11; Description =Cation transporting ATPase, C-terminus
  Pfam annotation: Domain name=Hydrolase; Domain location=4-424; Score =32.7; E_value=1.3e-06; Accession=PF00702.16; Description=haloacid dehalogenase-like hydrolase
  Pfam module annotation: Pfam domain module=Cation_ATPase _C::Hydrolase; Domain location=475-618::4-424
MGSATTICSDKTGTLTLNQMTVVEAYFGGKKMDSPDNAQMLSADVTSLIVEGIAQNTSGSIFEPEGGQEPEVTGSPTEKAILSWGLKLGMKFSETRSKSSILHVFPFNSEKKRGGVAVYLAGSEVHIHWKGAAEIILDSCTSWVDTGGSKHSMTPEKVAEFKKFIEDMAAASLRCVAFAYRTHEMDDVPDEDRREEWQLPEDNLIMLGIVGIKDGSTTSDLEDNSEAASLVLDCEVLMYCIEKGTDEVPSSRDLHIVEPPIVHMIVMPVTHDIGSVRSPRRCSICSFRPVHRSEKAAGIKVLSCFCVALYDYTRCIQKGQVRMVTGDNLQTARAIALECGILDDPNVSEPVIIEGKTFRALSDLEREDAAEKISVMGRSSPNDKLLLVKALRARGHVVAVTGDGTNDAPALHEADIGLSMGIQGTEVAKESSDIIILDDNFASVVRVVRWGRSVYANIQKFIQFQLTVNVAALIINVVAAVSSGNVPLNAVQATFQVSVLLSLNFKGISLLQLKNDDPAHADKVKNTFIFNTFVLCQVFNEFNSRKPDELNIFKGISGNHLFIGIIVITVILQALIVEFLGKFASTVRLSWQLWLVSIGLAFFSWPLAFVGKLIPIPKRPLGEFFACCCNCKGSKQGPDDATSNGKEDNKLEP

SEQ ID NO: 50648 - protein, 118 aa, Zea mays
  Coding DNA Sequence Number=SeqID_8869
  Homolog annotation: Hit_ID=Q1WGB3; Match level="QueryCoverage=60%, HitCoverage=35%, E-value=3e-14, Identity=52%"; Hit description =Putative nitrate-induced NOI protein
  Pfam annotation: Domain name=NOI; Domain location=18-94; Score=79.4; E_value=1.1e-20; Accession=PF05627.2; Description=Nitrate-induced NOI protein
MSAIDRSINKHGQNRIGKQDDTGGRALPKFGEWDVNNPASADGFTVIFSKARDEKKAPPTQGHIRNNRSVSADSKDSRAEKMTSYNARTNASVTANSQIAAVTATNLTNKNAATFSEL

SEQ ID NO: 50649 - protein, 673 aa, Zea mays
  Coding DNA Sequence Number=SeqID_8870
  Gene Ontology: Mol. function=hydrolase activity, acting on glycosyl bonds; Cellular component=membrane; Biological process=metabolic process
  Homolog annotation: Hit_ID=Q69T31; Match level="QueryCoverage=83%, HitCoverage=98%, E-value=0.0, Identity=80%"; Hit description =Putative alkaline/neutral invertase
  Pfam annotation: Domain name=GDE_C; Domain location=148-534; Score= -216.4; E_value=0.0035; Accession=PF06202.4; Description=Amylo-alpha -1,6-glucosidase
  Pfam annotation: Domain name=Invertase_neut; Domain location=94-561; Score=1143.1; E_value=0; Accession=PF04853.3; Description=Plant neutral invertase
  Pfam module annotation: Pfam domain module=GDE_C::Invertase_neut; Domain location=148-534::94-561
MEAAPMRKASSQASLADPDDFDLTRLLNHKPRINVDRQRSFDDRSLGEISLAGAGTASRGGWGYGGGGMESYESMYSPGGGLRSYCGTPASSTRLSFEPHPLIGEAWDALRRSMVSFRGQPLGTIAAVDHSSGEVLNYDQVFVRDFVPSALAFLMNGEPEIVRNFLLKTLLLQGWEKRIDRFKLGEGAMPASFKVLKDPKRGVDKLVADFGESAIGRVAPVDSGFWWIIILRAYTKSTGDMTLAETPMCQKGIRLIMNQCLAEGFDTFPTLLCADGCCMIDRRMGVYGYPIEIQALFFMALRCALLMLKPDAEGKEIMERIVTRLTALSYHMRSYFWLDFQQLNDIYRFKTEEYSHTAVNKFNVNPESIPDWLFDFMPTRGGYFVGNVSPARMDFRWFALGNCVAILASLATPDQAAAIMDLIEERWEDLVGEMPVKICYPAIEGHEWQIVTGCDPKNTRWSYHNGGSWPVLLWLLTAACIKTGRLKIARRAIDLAEARLARDGWPEYYDGKLGRYIGKQARKLQTWSIAGYLVAKMMVEDPSHLGMISLEEEKPTKPVLRRSASWTGHFATPLTGLTEGQRRLRRSDCCATRQSEADKQPGPASGTIGNSAPPDPGLGLGLNPGRRRTPLRPTQGSDSGSAPEDDELRFARPQGSDSALASADGLRLARPRG

SEQ ID NO: 50650 - protein, 90 aa, Zea mays
  Coding DNA Sequence Number=SeqID_8871
  Subcellular localization annotation: CTP_CleavageSite=62; ConfidenceScore=5.13e-01
MAAYNVLAQQVMNSWFLEQAQQQPFVFPQVQPLMPQRGLHALTPPSQGSEVMGHNTPPPVIPASGGASRGEGATTEDVSLTNSGGEGATA

SEQ ID NO: 50651 - protein, 75 aa, Zea mays
  Coding DNA Sequence Number=SeqID_8872
MPFPVPFPVPRCSVYACAKPSECRFQCRAAASLKLKGIFKALYRERRAQLFDGSQLSEANRWVLGTWGLMLDTVQ

SEQ ID NO: 50652 - protein, 40 aa, Zea mays
  Coding DNA Sequence Number=SeqID_8873
MALCYGTVTDIQCLKKLKASVDPDNKLEWPLRLKIAIWES

SEQ ID NO: 50653 - protein, 59 aa, Zea mays
  Coding DNA Sequence Number=SeqID_8874
MSATGQEGEVLGCSVVDTSFLPVSCSGDTIAVATEGTASNMVVDANVEAGAGVLEGDFA

SEQ ID NO: 50654 - protein, 197 aa, Zea mays
  Coding DNA Sequence Number=SeqID_8875
  Homolog annotation: Hit_ID=Q3DVE9; Match level="QueryCoverage=65%, HitCoverage=35%, E-value=4e-07, Identity=33%"; Hit description =Putative Ig
  Subcellular localization annotation: CTP_CleavageSite=19; ConfidenceScore=5.20e-01
MENSAACATPTAVPPARVRLTAAKSSLGCHRNLRLARPQGSDSTSTLEDDLRLARPQGSDSTSPRTTVSASPDPRVRTLPQPRKTVSASPDPRARTLPRPRKTVSASPDPRARTRPRLGRRSPPRSTLGLGLYLDLGRRSPPHPTPGLGLNFDLGRRSPPRPTPGLGLSLDLGGATATPDLGLGPTTPQGGPSLPYP

SEQ ID NO: 50655 - protein, 82 aa, Zea mays
  Coding DNA Sequence Number=SeqID_8876
MAPALMARARARLPSRGSLSGPPGGAGSAQLHGRGPNGARKPGECGHGSDQGLRVAIVMEHAGRHHYLFSGASQMGSRSCYP

SEQ ID NO: 50656 - protein, 220 aa, Zea mays
  Coding DNA Sequence Number=SeqID_8877
  Gene Ontology: Mol. function=methyltransferase activity; Cellular component=cellulose and pectin-containing cell wall
  Homolog annotation: Hit_ID=Q2R1K9; Match level="QueryCoverage=96%, HitCoverage=31%, E-value=6e-80, Identity=71%"; Hit description =Methyltransferase, putative, expressed
  Pfam annotation: Domain name=DUF248; Domain location=97-220; Score= -282.0; E_value=9e-09; Accession=PF03141.7; Description=Putative methyltransferase
MANKAVSGARSPLNLVVAMALCCFFYVLGAWQRSGYGKGDRIAAAVSRQTACGDVAAGLSFETHHGGAGAINASSSLPFGADAAPPAFAPCAAALADHTPCHHQDRAMKFPRKNMVYRERHCPSDGERLRCLVPAPPGYVTPFPWPRSRDYVPFANAPYKSLTVEKAVQNWVQYEGAVFRFPGGGTQFPQGADKYIDQLGSVIPLRRVAASAPSSTPECG

SEQ ID NO: 50657 - protein, 161 aa, Zea mays
  Coding DNA Sequence Number=SeqID_8878
MAKRTEARPAAARPRASVSVPAFGGWEAAGGAAAADYSLDFTKIRAARMQRRKALSWSSFVGNSPAVVVATEAPDSGVGGGEEEEEEEKRQWSSVAASDDDDRERRRYRHRHSHRHRRLRSDDDDRQPIQPAPKVSRMRGRGLVRAFAEADTPETPPFVFF

SEQ ID NO: 50658 - protein, 263 aa, Zea mays
  Coding DNA Sequence Number=SeqID_8879
  Gene Ontology: Mol. function=peptidyl-prolyl cis-trans isomerase activity; Cellular component=periplasmic space; Biological process =protein folding
  Homolog annotation: Hit_ID=Q2R1J4; Match level="QueryCoverage=72%, HitCoverage=89%, E-value=4e-91, Identity=88%"; Hit description =Peptidyl-prolyl cis-trans isomerase, cyclophilin-type family protein, expressed
  Pfam annotation: Domain name=Pro_isomerase; Domain location=36-196; Score=47.5; E_value=4.7e-11; Accession=PF00160.11; Description =Cyclophilin type peptidyl-prolyl cis-tr
MAVLLRRAAALLVVAAVCADGASTFYSSDPNLGSARVVFQTNFGDIEFGFFPHVAPKTVEHIFKLVRLGCYITNHFFRVDKGFVAQVADVMSGRTAPMNEEQKKEAEKTIVGEFSSVKHVRGILSMGRHSDPDSAGSSFSILLGNSPHLDGQYAVFGRVTKGDDTLTKLERLPTRREGIFVMRAVKQKNLFSGGDFLNQHQKLSDGEENALLNGGIRAATCYMHYKRLHIPFHDAGWFPEAGYGRRCGNVYAACSYAITVILE

SEQ ID NO: 50659 - protein, 631 aa, Zea mays
  Coding DNA Sequence Number=SeqID_8880
  Gene Ontology: Mol. function=methyltransferase activity; Cellular component=cellulose and pectin-containing cell wall; Biological process=metabolic process
  Homolog annotation: Hit_ID=Q2R1K9; Match level="QueryCoverage=99%, HitCoverage=91%, E-value=0.0, Identity=72%"; Hit description =Methyltransferase, putative, expressed
  Pfam annotation: Domain name=DUF248; Domain location=70-602; Score =1078.6; E_value=0; Accession=PF03141.7; Description=Putative methyltransferase
  Pfam annotation: Domain name=Methyltransf_11; Domain location=230 -312; Score=5.3; E_value=0.016; Accession=PF08241.2; Description =Methyltransferase domain
  Pfam module annotation: Pfam domain module=DUF248::Methyltransf_11; Domain location=70-602::230-312
MGAGQRSGYGKGDRIAAAVSRQTACGDVAAGLSFETHHGGAGAINASSSLPFGADAAPPAFAPCAAALADHTPCHHQDRAMKFPRKNMVYRERHCPSDGERLRCLVPAPPGYVTPFPWPRSRDYVPFANAPYKSLTVEKAVQNWVQYEGAVFRFPGGGTQFPQGADKYIDQLGSVIPFAGGRVRTVLDTGCGVCAPHRRPNHGFGSPLIGHLNVRPFRACMQVASLGAYLDSRGVIAMSFAPRDSHEAQVQFALERGVPAFIGVLGSVKLPFPPRSFDMAHCSRCLIPWGGNGGMYMMEIDRVLRPGGYWVLSGPPINWKTNHKAWERTEADLSAEQQRIEKYAAMLCWEKVTEIREIAIWRKQLDPSAACPDRPPVRTCDDANSDDVWYKNMETCITPPAAAVAGELQPFPARLTAVPPRISAGAVPGFTAESYEEENRRWERHVAAYKKVNYRLNSERYRNIMDMNAGVGGFAAAIFSPKSWVMNVVPTAAEICTLGVVYERGLIGIYHDWCEAFSTYPRTYDLIHANGIFTLYKDRCRMEDILLEMDRILRPEGTVILRDDVEVLLKVQRTVKGMRWKTLLANHEDGPNVPEKVLFAVKRYWTAAGEGTAAEEKTPGSSSVAGMDSEE

SEQ ID NO: 50660 - protein, 108 aa, Zea mays
  Coding DNA Sequence Number=SeqID_8881
MPHRLLRPRFPRFPHQLAGHGLELSIYRGGVPGVTDGLRARESGGGFRGGSGTREERRRRRGGGCTERWIKERISLLPPRLRVQRGERSQSNSSLQRHGQSCSRSAHR

SEQ ID NO: 50661 - protein, 107 aa, Zea mays
  Coding DNA Sequence Number=SeqID_8882
  Gene Ontology: Mol. function=transcription factor activity; Cellular component=nucleus; Biological process=regulation of transcription, DNA-dependent
  Homolog annotation: Hit_ID=Q6H4L1; Match level="QueryCoverage=63%, HitCoverage=28%, E-value=3e-20, Identity=65%"; Hit description =Branched silkless 1-like
  Pfam annotation: Domain name=AP2; Domain location=40-104; Score =102.3; E_value=1.4e-27; Accession=PF00847.10; Description=AP2 domain
MPRRCPAINSEQRSAGEQQRCVLRSWARPLVAEPQADANTTQYLGVRRRPWGLYATEIRDPATKEQHWLGTFDTAEEAAVAYDRAARSLRGARTRTNFAYPNLPPGS

SEQ ID NO: 50662 - protein, 119 aa, Zea mays
  Coding DNA Sequence Number=SeqID_8883
  Pfam annotation: Domain name=zf-CCHC; Domain location=83-100; Score =29.9; E_value=8.8e-06; Accession=PF00098.13; Description=Zinc knuckle
MHIHDQYGSSLKKKDLALKTNQEKKGKAKTQAIEESSVGDAMIVLMVKKTTKISKKLNREGIKFNSIKNKFFNSSKRKSVSEMDCYNCGELGHLAHQCTKPKKNKFKGKENEDSDDEKK

SEQ ID NO: 50663 - protein, 170 aa, Zea mays
  Coding DNA Sequence Number=SeqID_8884
  Subcellular localization annotation: CTP_CleavageSite=69; ConfidenceScore=5.49e-01
MVTPHIAVSVPASVCVALGGSSLGTVGSSSKMGAPSILLWMKRISKKKELGTVAGSSLALFVTSLQPPLASPGKEVDLKQKIALGLKVIMVLKDDVIDRDSMVHAVTQRSDVQTYSGSGCVELRNTLLLVVVLAISLHIRSPSRPFTRAITEGLSCKVIPTVPPDTSVLL

SEQ ID NO: 50664 - protein, 64 aa, Zea mays
  Coding DNA Sequence Number=SeqID_8885
MTRSTLERADRQWLSEFALFDPCRLRATGRIVQVTYLITALQLTFHHLLLCTTEDISYYDEMLD

SEQ ID NO: 50665 - protein, 141 aa, Zea mays
  Coding DNA Sequence Number=SeqID_8886
  Gene Ontology: Mol. function=catalytic activity; Biological process =metabolic process
  Homolog annotation: Hit_ID=Q9C8A3; Match level="QueryCoverage=73%, HitCoverage=4%, E-value=5e-21, Identity=48%"; Hit description=Acetyl- CoA synthetase, putative; 45051-31547
MDGKVTMLGLVPSIVRTWKNTDYTAGLDWSSIRSSGEASSVDDYLWLMGRAGYKPVIEYCGGTEIGGGFVTGSMLQPQALSAFSTPAMGCNLFILDSSGNPLEPDIMSYCVHVLLANSNTSYLDSMDIVKTFLISFDCMTT

SEQ ID NO: 50666 - protein, 316 aa, Zea mays
  Coding DNA Sequence Number=SeqID_8887
  Homolog annotation: Hit_ID=O82268; Match level="QueryCoverage=39%, HitCoverage=57%, E-value=2e-57, Identity=79%"; Hit description =Expressed protein
  Pfam annotation: Domain name=DUF640; Domain location=78-210; Score =296.7; E_value=4.4e-86; Accession=PF04852.3; Description=Protein of unknown function (DUF640)
  Subcellular localization annotation: CTP_CleavageSite=62; ConfidenceScore=5.42e-01
MEPGPDGPAGGQGTSAPAEAGPSPSSSSAAAAASSSSRKQAEQQAPPQQQAGAQQRQQQAARAQHQEAPAPQAAQAQPQPLAQQPPPPPPPAGLSRYESQKRRDWNTFLQYLRNHKPPLTLARCSGAHVIEFLRYLDQFGKTKVHTEGCAHFGQPNPPAPCACPLRQAWGSLDALIGRLRAAYEESGGRPESNPFAAKAVRIYLRDVREAQAKARGIPYEKRKRKRGSAAAAPPVAPPPVVTAETAGTTSGTVCDEEEEPSPSAGDEPQKQTTTPTSASAPPTSTSSASASSSSAAAATTSTTTTRKEEEGSAPSS

SEQ ID NO: 50667 - protein, 238 aa, Zea mays
  Coding DNA Sequence Number=SeqID_8888
  Gene Ontology: Mol. function=transferase activity; Cellular component= thylakoid; Biological process=photosynthesis
  Homolog annotation: Hit_ID=Q5ZDJ3; Match level="QueryCoverage=87%, HitCoverage=23%, E-value=3e-30, Identity=42%"; Hit description =Acetyltransferase 1-like
MAFSGAAEQVIGTIGSSKGVWVTLWEIHDWAWVLLTKHYDRRGQYDIALNKIDEAISHTLTVIDLYSVKHVAALADEARSMDLAGRYLNSECVVQMLQADQFLKRLLSNVCIGDHFDMTMLGTRKGNIWRVAFVQKESTRASWHYICKLFRIYLIFVMYQCMKCMWYALFLLCYLSPMFTLYPTTRYISLKFVPLSRIVGDAVGTICRCYMKLHDYPTIFSIEGNDEISKLPHAQRKK

SEQ ID NO: 50668 - protein, 988 aa, Zea mays
  Coding DNA Sequence Number=SeqID_8889
  Homolog annotation: Hit_ID=Q1SD81; Match level="QueryCoverage=79%, HitCoverage=62%, E-value=5e-41, Identity=25%"; Hit description=H+ -transporting two-sector ATPase, alpha/beta subunit, central region; TonB box, N-terminal
MALEAKQAALCFKEVLRSSPRLFVFLLSSSPVNICTALLLGILLSYGEVNLPEASKDHRDTTEVSTSMVGNSSSDVHFEANQRPSVLEFRENASNFKERETKQKVSFRERASEHVDLDDYIPLLKRAGEEDERGDRGNISRTLTPFPSMVNIRQESVIGEDLTFTKKRQSEGSFFMQDRADCQTSLFDEACLCGLNDKDIPFGLFSSSENVNKNDEMEEKFNQQRVFADSTATKERDSSEAMPTEELAGTSKQAASVPIDQWENNGRLNVDTSNVFEDNLLDSSLGSPWARVSSHDGSSGFDSDQAESSPDASMTDIAPVLDEIDPLLRADSNHPDPVPNDDSDTDSHVSEDHQIDDDSNDEGDDIDAKDNVEGEKENDGKEAAFLWTADDEKNLMDLGYSEIERNRRLEILMARRRSWKNMAFEIDNNLIDVHSSGSGTSLDDLSRFRAQVPPIAVPRRNPFDLPYDSEEAAIPGSAPSILHARKNPFDLPLEQSNDSVVVHAHDILNSGEPATSRRDMIFRRHESFNFGRMDVIQEKRFSRLKPYFVPETVEWNASNFERQFNDKSESKMSSVTKSDIASSVADQEDHKDQDEKDLADVGSECSDGINSIDVELDHSDIDDREIALQQFVFERAQEREAHLVSTKGKGREEDYAPESAGSSTMPFHAVPDLLSWEDGDGDNSLGAKPSFQLNTEVKCSEWVSSSRPPVEGESDSGDLPEYLDTEVASSSNTAILGANNAAEKGGNVDRMSYSNDEMPLDNLIHRSMELPSEFFTETLPVISRDLHPIPEERVVENFNVQENHEAAIFTDSVVALTGLHVIEEHFDDGTDRTLSSEVVSSYPRANGVTQSPSSEHAEILNPFVLMAAEHNKVDISDMHGEATAGYLLDSDDEAGKIYPEPMEGSGIDESFLSELDVVGDFGVEPMRLDQQVTDQASHGDNTTDSVTADSVISPQTSDDVSLIMSEVGAEESREQSPLVDDLNGSELY

SEQ ID NO: 50669 - protein, 143 aa, Zea mays
  Coding DNA Sequence Number=SeqID_8890
MEEGFIGARRRSCNGYQRLRAPPPPTPGRGTCRLERRAVLGSGGWRFVRLRRCRAIAPRWSSPLQLLSRILDTYITSMLSQPLNILKPLNMPPPKLRRDASPGTGSSRRRDAGGSGRGVLLAEAAPENATTEGGGGDSSSRKA

SEQ ID NO: 50670 - protein, 175 aa, Zea mays
  Coding DNA Sequence Number=SeqID_8891
  Gene Ontology: Mol. function=carbohydrate binding
  Homolog annotation: Hit_ID=Q6ZLH2; Match level="QueryCoverage=51%, HitCoverage=17%, E-value=8e-41, Identity=87%"; Hit description =Lipase-like protein
  Pfam annotation: Domain name=DUF620; Domain location=1-96; Score= -24.2; E_value=2.9e-13; Accession=PF04788.3; Description=Protein of unknown function (DUF620)
MGLMVHIEDSHLTRIQPHAVGDAVYWETTTSSALEDYRAVEGVMIAHSGHSAATLFRFGEAAMSHTKTRMEEAWSTEEVAFNVPGLSADCFIRRDLWRRGRRARGYGARRASHSSDGSCLCFLAAGHQRALPLLHGAAGEEPGQLNRKSPTAGEELGRCCPRSAAVRPSSRQRRP

SEQ ID NO: 50671 - protein, 205 aa, Zea mays
  Coding DNA Sequence Number=SeqID_8892
MDQLLGFRSDGHILRTELLRLDKPFTIMPRAATGPNQQTRREYRTSSAASTTRRVSHQYSTTPATRAACPAPTAVPLVRVRLTAAKSSLGRHRKLRLARPQSSGSTSMPDDGLRLVDPQGSGSPRRRTTDSASPDPRARTQPRPRTRSPPRSTPGLRLSLDLGRRSPPRPTPGPGLSLDLGGASASPDPGLGLTTSQGGPSLPYP

SEQ ID NO: 50672 - protein, 381 aa, Zea mays
  Coding DNA Sequence Number=SeqID_8893
  Gene Ontology: Mol. function=protein dimerization activity; Cellular component=nucleus; Biological process=regulation of transcription, DNA-dependent
  Homolog annotation: Hit_ID=Q5VQQ8; Match level="QueryCoverage=71%, HitCoverage=78%, E-value=3e-93, Identity=65%"; Hit description =Putative bZIP protein DPBF3
  Pfam annotation: Domain name=bZIP_1; Domain location=331-381; Score =31.6; E_value=2.8e-06; Accession=PF00170.11; Description=bZIP transcription factor
  Pfam annotation: Domain name=bZIP_2; Domain location=331-381; Score =36.7; E_value=8.2e-08; Accession=PF07716.5; Description=Basic region leucine zipper
  Pfam module annotation: Pfam domain module=bZIP_1::bZIP_2; Domain location=331-381::331-381
MDEAKAVDEDLFPHPHSTEAAPDRRQAPRPVVDACGELIGDVVTVSGAGKGCASHVFLMALLTIMDLQVVIFLPRDTIASQAGGGGRGMGSSGGAGAAQRGQMQSLARQGSLYNLTLDEVQSHLGEPLHSMNLEELLKSVFPDDLDPDGGTTSQYEQSSGLLRQGSITMPPELSRRTVDEVWKDIQDAPNRNVGESGRRKRERQPTLGEMTLEDFLVKAGVVAEGYLKDLNGIGSVEQVGSTGAAGLTAGAQWLDHYQQRITAIEPHQHRQHSLPGAYIPGQLSLQSLNVGPSAILESYSDGHISSPMMGALSDSPMPGRKRGSPGDVADKLVERRQKRMIKNRESAARSRARKQAYTNELENKVSRLEEENKKLTTLKVL

SEQ ID NO: 50673 - protein, 118 aa, Zea mays
  Coding DNA Sequence Number=SeqID_8894
  Homolog annotation: Hit_ID=P42856; Match level="QueryCoverage=69%, HitCoverage=50%, E-value=5e-11, Identity=70%"; Hit description=14 kDa zinc-binding protein
MGLSACAASQKLLHAEEGHVELLGNLLYAAKVVAEQEGLADGFRIVMDDGPRGCEYSSLILTGPILLVPCSIGLPPAPTRSSSRGTADELATGFAIRVAQIVIGRRCPNDFVYGAQIV

SEQ ID NO: 50674 - protein, 176 aa, Zea mays
  Coding DNA Sequence Number=SeqID_8895
  Homolog annotation: Hit_ID=Q9XHE1; Match level="QueryCoverage=27%, HitCoverage=6%, E-value=2e-16, Identity=95%"; Hit description=CENPCA protein
MDAADPLCAISSTARLLPRTLGPAPAIGPSPSNPRDALLEAIALARSLDLTAVASQRLAEVAEEFFTQAYGWKFSVRIDSMSWLYRSQEWYKKERKKSMWSLTFLFAIVGAVSGIVNGIIRNSWEGQLVLLVLFVSLLLAFPSPVVFPSYKDATSKDSECLVAPDAAADEYKLIHQ

SEQ ID NO: 50675 - protein, 210 aa, Zea mays
  Coding DNA Sequence Number=SeqID_8896
MALVSRGGASSNPSSSMFVVSTLLTITQEQVEVHGDEELAHEAGSRDHHSGRRKGKKDYTFDKHKSKGGFDKEVLKKKYLQKAKIKECVFLTSLGDLDHNSDDAVSSSDEETDRRAEDKLNGLYFLTDTADGLCIIDLGDDDTDLAERDARIALLEKASSMSASALAHLVPCIEPQLGMVVNQFKRGTGGSRFGFVAKDGRVTCFGKVGE

SEQ ID NO: 50676 - protein, 160 aa, Zea mays
  Coding DNA Sequence Number=SeqID_8897
MENERSNAPQTLDEDSMHSDTLVPSMLFTYIAHSHGDTEDVQEWADTTAGDTHLGKRKTKLGSSKQKGKKLNSLMDPKRRKILRVTIEQLTIVNMMVEKMMMVVMGMGDVMVEHMVLGVVVMDGVMTDAVVWWIGDSLKRVSSSMPHKIDIKEHLSPNER

SEQ ID NO: 50677 - protein, 541 aa, Zea mays
  Coding DNA Sequence Number=SeqID_8898
  Gene Ontology: Mol. function=nucleic acid binding; Cellular component= chromatin; Biological process=DNA integration
  Homolog annotation: Hit_ID=Q8H6I0; Match level="QueryCoverage=99%, HitCoverage=33%, E-value=0.0, Identity=90%"; Hit description =Putative gag-pol polyprotein
  Pfam annotation: Domain name=rve; Domain location=296-443; Score =142.9; E_value=8.6e-40; Accession=PF00665.16; Description=Integrase core domain
SGDAKIAEHNLENEMFKFARSMLYNGRRPGIKDGIGFQRGDNVKLNAPPKNLSNFVKGKALMPQDNEGYILYPAGYPESKIRRIHSRKSHSGPNHAFMYKGETSSSRQPTRAKLPKKKTPNASNDHNISFKTFDASYVLTNKSGKVYASGGSSWILDSGCTNHMTGEKKMFSSYEKNKDPQRAITFGDGNQGLVKGVTVFRRSDDSIAFMGVLEGQLYLVDFDRAELDTCLVAKTNLGWLWHRRLAHVGMKNLHKLLKGEHILGLTNVHFEKDRICSACQAGKQVGTQHPHKNIMTTNRPLELLHMDLFGPIAYISIGGSKYCLERSHTQETLKGFLRRAQNEFGLRIKKIRSDNGTEFKNSQIEGFLEEEGIKNEFSSPYTPQQNGVVERKNRTLLDMARTMLDEYKTSDRFWAEAVNTACYAINRLYLHRILKKTSYELLTGKKPNISYFRVFGSKCFILVKRGRKSKFAPKTVEGFLLGYDSNTRAYRVFNKSSGQVEVSCDVVFDETNGSQVEQVDLDEIGIEEAPCIALRNMSIGD

SEQ ID NO: 50678 - protein, 71 aa, Zea mays
  Coding DNA Sequence Number=SeqID_8899
  Subcellular localization annotation: CTP_CleavageSite=45; ConfidenceScore=5.08e-01
MSLTESTCSSPSKELSKRRTRSKPPRLPLRISTQPQHLKASPGTLQDMVDGVTWPTTLPPGWTIEWDAAPA

SEQ ID NO: 50679 - protein, 236 aa, Zea mays
  Coding DNA Sequence Number=SeqID_8900
  Homolog annotation: Hit_ID=Q6YUB8; Match level="QueryCoverage=79%, HitCoverage=45%, E-value=1e-54, Identity=63%"; Hit description=Major intrinsic protein-like
SVAGSEGRALASGPGPPEAMLTCIACSKQLPGDAPPLREPSDDDDRANAGGGGESAATPGTRQAIRVLTAQIKDMALKASGAYRHCKPCAGSSSPAASRRQQPYYHGAYAESGSDRFHCAYQRAGSSAASTPGLRTGGAMSSGDITPSVSARTDFLADDEEGDDEEGTATGSSEEDEEKEWVAQVEPGVLITFLSLPRGGNGLKRIRFSMVLPGPDLEGGNWSGRTGPPILEGPFK

SEQ ID NO: 50680 - protein, 142 aa, Zea mays
  Coding DNA Sequence Number=SeqID_8901
MGKTLVSADRANQRGWGRTEGCPELLTSVTVSFLVLFTWAPPVIARARSPGEEDGGATAPAVTASTTVAICVVVAKAPPTPCGEVVTPTITVAATASVATRAVAVGSTLAPCGDVATLTIVDGHIDAWWWSGPVASTLLLCP

SEQ ID NO: 50681 - protein, 237 aa, Zea mays
  Coding DNA Sequence Number=SeqID_8902
  Gene Ontology: Mol. function=nucleoside-triphosphatase activity; Cellular component=membrane; Biological process=cell division
  Homolog annotation: Hit_ID=Q1SK92; Match level="QueryCoverage=58%, HitCoverage=19%, E-value=4e-40, Identity=53%"; Hit description=AAA ATPase, central region; DEAD/DEAH box helicase, N-terminal
MYLLFEKLLNKLEGPVLILGSRIVDMNSDEESNDRLTVLFPYNIEIKPLENENHLVSWNSQLEEDMKMIQFQDNRNHIMEVLVENDLECDDLVSYHLMNNKDPEYRIGKLVLSTKSLSHALEIFQGNKISDKDIMKLEATDDALKKIVFYVCPRGTNLSITLEAARVGEAASRPPPGSARPPAARLGEADGRQEPRAVGPHHDLRRTGQGAPRGGGESERAQQQAGQADSNWAGDAR

SEQ ID NO: 50682 - protein, 174 aa, Zea mays
  Coding DNA Sequence Number=SeqID_8903
MDGCDGAREALQLGGRRCLLRGGEVAGDKGVGHGRALEVWRKARARSGRHGELSMGATLARGHQRAQNVAGWLNGSADQLQRANYADTRAVKGEIRAWEGFSPRVQTQGRLGDGGDAGNPRVDGGRLRLHGEVSGERELGEPEGLGANRGESRVSNGEAELTEATGAARARQRP

SEQ ID NO: 50683 - protein, 84 aa, Zea mays
  Coding DNA Sequence Number=SeqID_8904
MEWDNNYGEVSMNSVPDGIVQLILSMLHNAHDMAAYAYITGASETVYPTCLCSSHEMPLTRSSWPRAIDDVISEMAGSITCLRS

SEQ ID NO: 50684 - protein, 346 aa, Zea mays
  Coding DNA Sequence Number=SeqID_8905
  Gene Ontology: Mol. function=structural molecule activity; Cellular component=viral capsid; Biological process=intracellular protein transport
  Homolog annotation: Hit_ID=Q8W403; Match level="QueryCoverage=86%, HitCoverage=98%, E-value=1e-172, Identity=94%"; Hit description =Sec13p
  Pfam annotation: Domain name=WD40; Domain location=1-39; Score=25.2; E_value=0.00023; Accession=PF00400.22; Description=WD domain, G-beta repeat
  Pfam annotation: Domain name=WD40; Domain location=140-195; Score =40.8; E_value=4.6e-09; Accession=PF00400.22; Description=WD domain, G-beta repeat
  Pfam annotation: Domain name=WD40; Domain location=203-245; Score =39.1; E_value=1.6e-08; Accession=PF00400.22; Description=WD domain, G-beta repeat
  Pfam annotation: Domain name=WD40; Domain location=252-290; Score =11.0; E_value=1.9; Accession=PF00400.22; Description=WD domain, G -beta repeat
  Pfam annotation: Domain name=WD40; Domain location=45-85; Score=45.0; E_value=2.5e-10; Accession=PF00400.22; Description=WD domain, G-beta repeat
  Pfam annotation: Domain name=WD40; Domain location=93-133; Score =32.6; E_value=1.4e-06; Accession=PF00400.22; Description=WD domain, G-beta repeat
  Pfam module annotation: Pfam domain module=WD40::WD40::WD40::WD40::WD4 0::WD40; Domain location=1-39::140-195::203-245::252-290::45-85::93 -133
MPPHKIETGHQDVVHDIAMDYYGKRLATASSDNTIKIIGVSGTSHQQLATLSGHQGPVWQVAWAHPKFGSMLASCSYDGRVIIWKEGSKPDEWALAHTFAEHKSSVNSIAWAPHELGLCLACGSSDGNISVFAARSDGGWDTTRIDQAHPVGVTSVSWAPAMAPGALISAGSSGQFEYVQKLASGGCDNTVKVWKLNNGSWRMDCFPALQMHKDWVRDVAWAPNLGLPKSTIASASQDGTVVIWTAAKEGEQWDGRVLYDFRTPVWRLSWSLTGNILAVSDGNNNVTLWKEAVDGEWQQLLARHSARDMVSGSGKKLQPPFPESEIRYYIACSAQTAFRKQTEAQI

SEQ ID NO: 50685 - protein, 247 aa, Zea mays
  Coding DNA Sequence Number=SeqID_8906
  Gene Ontology: Mol. function=hydrogen ion transporting ATP synthase activity, rotational mechanism; Cellular component=proton -transporting two-sector ATPase complex; Biological process=ATP synthesis coupled proton transport
  Homolog annotation: Hit_ID=Q8RZF8; Match level="QueryCoverage=75%, HitCoverage=46%, E-value=9e-61, Identity=55%"; Hit description =Lustrin A-like
  Pfam annotation: Domain name=DUF231; Domain location=83-240; Score =221.9; E_value=1.4e-63; Accession=PF03005.6; Description=Arabidopsis proteins of unknown function
MAGGGGEATVHRNGTISHFPWCAGGREGSGDYNVTVVYYLTHYLVDLVTEPHTGRRVLKLDAIDQARDWLAADVLVFDSWHWWPRTGATQPWDYIQVGDTVVKDMDRTQAFAKALHTWARWVDANLVQTDTKVFFQGISPSHYRGQDWGASPKKTCMGETRPLNATGPYPGGPIPQQAILRGVLAAMAKPVYLLDFTYLSQLRKDAHPTKYDGGIFGGDCTHWCVAGLPDTWNVLFYAALTAGQGHN

SEQ ID NO: 50686 - protein, 151 aa, Zea mays
  Coding DNA Sequence Number=SeqID_8907
MGESGVCAGWVGEGSAAAVKGTIGHLLDLSMGFGSGAGTLGSQGRREFDKRSIGAPPISRRDRASAAGRCPPWTLVGGSSPALVSPLLDSWHRVAQWKRWLVKRGPGRAAHRRWRRHGRSSATIGSCLGKAITRTRWILANGDLVGDGLRK

SEQ ID NO: 50687 - protein, 156 aa, Zea mays
  Coding DNA Sequence Number=SeqID_8908
  Homolog annotation: Hit_ID=Q9FQY2; Match level="QueryCoverage=44%, HitCoverage=37%, E-value=5e-14, Identity=94%"; Hit description =Protein phosphatase type-2C
MDIPSTQPPRPNCGSTACVALIRNKQLFVANAGDSRCVISRNGQVELCDDDEFIVLACDGIWDCMSSQQLVDFIREHIDTLVESEGVAGEDPEQQLVGEGGDEDDGLIMLMVMYVDVYSPLLYTPNPLDCPRCNHCSGEDEVVEEDFQEFQEYDEF

SEQ ID NO: 50688 - protein, 182 aa, Zea mays
  Coding DNA Sequence Number=SeqID_8909
MGRTVEVDVSYVEGLIFLGVEGMFVGGSACGFVVGVISVFVLVLVVVVWLRLVANGRPAAVVQEGFARQGNSALGRQLVRRLDFTIFGDVISLRRGKIWRGILREVLRTTGVNGTFGSGWVFSSETLVIYFSVIVFGYILRGVINEGYLAFLFGEGRLRSVVQEGGGLGSRLLGNHRGFALS

SEQ ID NO: 50689 - protein, 83 aa, Zea mays
  Coding DNA Sequence Number=SeqID_8910
MGESGVCAGWVGGGVCRRRQGHDWPPPGPQHGVRIGRRDAWKPGPPRIRQTVDRCSTNFSPRSCLRRGPLSAVDTRRWVVSRS

SEQ ID NO: 50690 - protein, 88 aa, Zea mays
  Coding DNA Sequence Number=SeqID_8911
MTYDTTSQVSCGGRSNDENHNAKSKLGGSMQTDCEAEDGGNGACACNQIGREAFCSFWPLKAVADCQTLSFSASFYTIRLGKNHSKST

SEQ ID NO: 50691 - protein, 230 aa, Zea mays
  Coding DNA Sequence Number=SeqID_8912
  Pfam annotation: Domain name=Zim; Domain location=91-125; Score=30.0; E_value=8.1e-06; Accession=PF06200.4; Description=ZIM motif
MESGAEGEDVGRAASGRSMDGRRDVDDGGVAGAAAQERRWRGGGGDDEESSGLSNGGGGGGGVELSLRLRTGADDGAATAAALPPPPLPPPAEARRNMTIFYNGRVCAADVTEIQARAIISMASEETLADHRGRRRRQQQQLTRVDGGDGRQQDGDSSSSSTTTSAVALARRCARGRGLVGPAVDIDQAADAGLSMKRSLQLFLQKRKARTAAAAAPPYAGGRQAQAVRR

SEQ ID NO: 50692 - protein, 70 aa, Zea mays
  Coding DNA Sequence Number=SeqID_8913
PELEFGLNLLSDLNSSFSNTTDDVANSMVLPNFAMTRNILTLKEFPGEWVSQPGVGGGGRWCPRTVVILE

SEQ ID NO: 50693 - protein, 95 aa, Zea mays
  Coding DNA Sequence Number=SeqID_8914
  Gene Ontology: Mol. function=nucleoside-triphosphatase activity; Cellular component=membrane
  Homolog annotation: Hit_ID=Q8GU82; Match level="QueryCoverage=88%, HitCoverage=6%, E-value=1e-21, Identity=61%"; Hit description=PDR -like ABC transporter
MCAESNDTTKILMGLSGVIRSTRMTLVLGAPGSGKSTFLRVLAGKLDPSLKFEGKVTYKVEAKSSAPEHLSAYVSQHDLHHAEMTATVVRRRKQP

SEQ ID NO: 50694 - protein, 696 aa, Zea mays
  Coding DNA Sequence Number=SeqID_8915
  Gene Ontology: Mol. function=nucleoside-triphosphatase activity; Cellular component=integral to membrane; Biological process=transport
  Homolog annotation: Hit_ID=Q8GU82; Match level="QueryCoverage=99%, HitCoverage=94%, E-value=0.0, Identity=47%"; Hit description=PDR -like ABC transporter
  Pfam annotation: Domain name=ABC2_membrane; Domain location=420-634; Score=221.1; E_value=2.5e-63; Accession=PF01061.14; Description=ABC -2 type transporter
  Pfam annotation: Domain name=ABC_tran; Domain location=133-323; Score= 88.6; E_value=1.9e-23; Accession=PF00005.17; Description=ABC transporter
  Pfam annotation: Domain name=PDR_assoc; Domain location=1-63; Score =86.4; E_value=8.9e-23; Accession=PF08370.2; Description=Plant PDR ABC transporter associated
  Pfam module annotation: Pfam domain module=ABC2_membrane::ABC _tran::PDR_assoc; Domain location=420-634::133-323::1-63
VFYFKNSKTLGEAILMLRGLLNEWQWYWTCIGILFGFTLVFNILSVLALHFLKSPHKREVNIKSQDRQNKEYNDQAVVNVNASIGQSLPFQPLTLVFKNINYSVELPKGMRKHGVTESRLQLLRDVSGSFRPGVLTALMGITGAGKTTLLDVLAGRKTGGYIEGVISICGYPNKYETVSRITGYCEQTDIHSPYLTVYESLKFSASLRLPSVVKSHQRDMYVEEVMDLVELTGLRNAIVGIPGATGLSAEQRKRLTIAVELVASPSIMFLDEPTTGLDARAAAIVMRTVRKMVNTGHTVVCTIHQPSIQIFESFDELLLMKSGGQLIYSGSLGPLSRDLIKYFEAVPGVPKIKDGQNPAAWVLDISSHAMQYMINVDYAEIYYNSNLYKENMAMINELSKPKTNHEDLHLPSKYWPGFKEQCIACIWKQHLSYRKNSELNVFRFINTFATSIVFGIVFWQTGSTIKVEQDVFNILGIGYGSALFLGFVNCTSLLPVVAAERAVSYREMNSGMYSSMAFIIAQVAAEIPYMVIQPLIFSAIVYPMVGFQLAVKKFFLFVLYMILIFMDYTLYGMMAVALTPTAEIATGLSLTIFVVWNFFSGFIVTVKAMPVWWRWMYWACPTAWTLYGLVSSQLGDHKELIRVLGQPDQPVITFLQEYLGLENGYLPLVTALHFVLSALFCFVFCVGIKYLRFQKR

SEQ ID NO: 50695 - protein, 45 aa, Zea mays
  Coding DNA Sequence Number=SeqID_8916
MAVPSAEARTIGFDTGPYGYSYQEKARSYMGMDGDNIYLKVAQLF

SEQ ID NO: 50696 - protein, 32 aa, Zea mays
  Coding DNA Sequence Number=SeqID_8917
MEDRWCHKNLLVASSRRVSSGWEDNGGWMWRC

SEQ ID NO: 50697 - protein, 77 aa, Zea mays
  Coding DNA Sequence Number=SeqID_8918
MAPEAGLGGCQPHPDGWHSSRSSTGGVVFLSGRCCKVVMGLSCTLGPWPKYCPKYMEDIIRMFMDVFLGNDNIQELE

SEQ ID NO: 50698 - protein, 91 aa, Zea mays
  Coding DNA Sequence Number=SeqID_8919
MAAEGNKSREAPPLTPAENEAFLRMLRDAGQRLGSAAPEVEVQFDGVSVGAQAHNCKLSTLACSRWELAMTVPMELDEESVHLAEVGGNTV

SEQ ID NO: 50699 - protein, 140 aa, Zea mays
  Coding DNA Sequence Number=SeqID_8920
  Subcellular localization annotation: CTP_CleavageSite=70; ConfidenceScore=5.41e-01
MDPAISKGKWKNVPPTDSYLISLKSRTRKRPVSWHKCSLLARLPIHFLFSVPAPLPSPRLCRSFKFSHCSSATRGHRLENKYDPHLLLWPRDRTDCCRRLPTARRRWRRIVFVGHLGSLGGACKTEIEPQRPIFDQFNRF

SEQ ID NO: 50700 - protein, 240 aa, Zea mays
  Coding DNA Sequence Number=SeqID_8921
MPNGGGGGSGKSKGEDMPVENWMARPRTPVGAVAPLGRVATEQMIGMGGGGANGKAPKEWPSRGEKAQPREGEWSCHGEKAQPREHDEVQRGQGRQPRCKGRRGGLAEEEGRSQQGSRRCSTVMRPRSGWLEPRLGGSSDWDPKLEGEGQRRRSVASGRRRGLMQPANDEERHQWMAQPGVPTDEGEQEDDSGNDQAPSNEEPPDAAATCAMGDDESESAGAAVTGEAIRLDDDMLLYVL

SEQ ID NO: 50701 - protein, 232 aa, Zea mays
  Coding DNA Sequence Number=SeqID_8922
  Gene Ontology: Biological process=regulation of progression through cell cycle
  Homolog annotation: Hit_ID=Q9FFF9; Match level="QueryCoverage=59%, HitCoverage=8%, E-value=6e-31, Identity=49%"; Hit description =Meiotic check point regulator-like protein
MVADSYRAPMTAAATTIDASACEDDNDPMAPPSTLTSRYSTTRACEERVCAAGVTASSGHQEKYLNATSADDQSCNPGQMMDGAQINVDVTAPGAILALALIFLKAESEEIAARLNIPNTYFDLQYVRPDFVMLRIIARNLILWSRIQPTKGWVDSQIPETVRCGISNMSEGTIDSDELDAEALFQAYVNIVTGACIALVTSTFWLRSHVSSRGKGVDATLEAPIEGGLGNG

SEQ ID NO: 50702 - protein, 46 aa, Zea mays
  Coding DNA Sequence Number=SeqID_8923
  Subcellular localization annotation: CTP_CleavageSite=24; ConfidenceScore=5.34e-01
MGPSAQSLSPALAPPSLSLVRGVRMSGSSSTARRNKRARTPKLADY

SEQ ID NO: 50703 - protein, 133 aa, Zea mays
  Coding DNA Sequence Number=SeqID_8924
MRGPVTCIPPDMLHQPRPHLPPSQADRSTDPPALPARSCSEPSVYHPSAMQPSHVHQMVTCRLVGVLCPVNPLVLTADTAPAASPVPSSVRAALADSHGRPTMEEYVAVLGNHTWDLVPHPPGTNVVCMEARQ

SEQ ID NO: 50704 - protein, 177 aa, Zea mays
  Coding DNA Sequence Number=SeqID_8925
MADLAGMAVATGGAGNRVSGQIHGHGGGGEAQGRGSADGGGCGSARSQDRNGLCAQPGLRAQPGSCTHAWAVPAGWIWRPRRDAPPLSHAWPEATSPRRSWGGRAPPRGGAPGVAASTSTFRRVMGLCYSRRIRLPSERSNRSFLEPCRDGRVHRREEGQGRGVAGGWEGSRPGWEE

SEQ ID NO: 50705 - protein, 530 aa, Zea mays
  Coding DNA Sequence Number=SeqID_8926
  Gene Ontology: Biological process=regulation of progression through cell cycle
  Homolog annotation: Hit_ID=Q9FFF9; Match level="QueryCoverage=93%, HitCoverage=49%, E-value=9e-51, Identity=46%"; Hit description =Meiotic check point regulator-like protein
MGRTVTCALPRRGKGTSSQEIYTVTKRRYLFSKNRCSITSYPAIDCCAHLSGLGHHACWCRMNAISDALLCVLQVDTLSLYNVTGEIVCIPLPYAVSSIWPLPFGLLLQKSTDGGHMVSSSSSLLNARDLNRPSKEYGLTYNIPFQANILETDNKANGAIISSHLILKHPFEEPQVFLATDIDGMPIISFLLHEQKILLAVRIQVDDATEEAFGDIKPHMSWNIPAFAAAPVVVTRPRVRVGVLPFTDILVLSSDNDLLLYSGKQCLCRYTLPNELGKGFFSNHELNSDISDTYSDLKITSIADAVEGRINVTCSNGLPSVDLIAILSIYSFPDAQMFVAQKSFLFFVASGSARNTEELTVLAMVAEKFGHRQLDLLPVGVSLVLRHALDKCRDSPPDDWPATAYVLVGREDLATAKMGTVRKENLLWNNDNLTSMSVPYMLHLQPVIIPTTAPDIPASEVLNSDDSDSVYKSVEDGMEHIFTSTTQLRFGHDLRLNEVRRLLCSARPVPIQTPTNPSVSDQDLHQILSY

SEQ ID NO: 50706 - protein, 169 aa, Zea mays
  Coding DNA Sequence Number=SeqID_8927
  Subcellular localization annotation: CTP_CleavageSite=71; ConfidenceScore=5.54e-01
MAPGSLKIPCPKPKSAAPKIFPPSLGFRPIAGNRLKRPKGRQLASFRLTPPIVHTALRLLPGADSFPLLLDAAAASSGIMASVGSRRLTVLREFRPHGLAVEEADGQGVPGAPPPQDYDYFLFDPALAISPTPDPSDEASSSGADGDHELFIRDNQCASSPFSLSVALD

SEQ ID NO: 50707 - protein, 144 aa, Zea mays
  Coding DNA Sequence Number=SeqID_8928
  Gene Ontology: Mol. function=RNA-directed DNA polymerase activity; Cellular component=intracellular; Biological process=RNA-dependent DNA replication
  Homolog annotation: Hit_ID=UPI00004C1734; Match level="QueryCoverage =90%, HitCoverage=37%, E-value=5e-40, Identity=61%"; Hit description =UPI00004C1734 related cluster
MEDMRRLTNQNKVCPKDLFPLPCIDQVVGSTSSHELLNFLDAYLGYHQIMMKESDQPTTSIITPFGSYNYMTMPFGLKNAGATYQRCMIKCFGDLVRGVVEAYIDDIVVNTRWSEGLVSDLKLMFDRLKSNDIKLNPKNASPVS

SEQ ID NO: 50708 - protein, 216 aa, Zea mays
  Coding DNA Sequence Number=SeqID_8929
  Gene Ontology: Biological process=regulation of progression through cell cycle
  Homolog annotation: Hit_ID=Q9FFF9; Match level="QueryCoverage=41%, HitCoverage=5%, E-value=3e-15, Identity=41%"; Hit description =Meiotic check point regulator-like protein
MAEDLDVYPDHPGSNPRQEFWEVCGKCIGLNQVCDAPSASCSNQPNSTNGSYFRVDQLAYISFYTTIELMWEHLKTGNFPFYNSLFLPNLKVALAYNEALVDSRITNGGIIHSTFLESLMKRVGDIFAELPNLKDNLHRYLSTGTWPDTQNDVVVLSWYLQWYNIPPAHVVASAVEKVRPRVPAGVSMLPLLRLLLPTTHLVGLMEIEKVQIVMEC

SEQ ID NO: 50709 - protein, 118 aa, Zea mays
  Coding DNA Sequence Number=SeqID_8930
MALGLVVDGRRILARVLGSCSWLGFWVHVHGNGVHVHGGYWLGFWVHVQGSTQLSHSDGPTSAGPGLVVGLWAAAYWAVALCAGGAYPVGDLFGVKKMWKDLFSDFSTHAETKLISAK

SEQ ID NO: 50710 - protein, 90 aa, Zea mays
  Coding DNA Sequence Number=SeqID_8931
MGRQPKAGRASMEAARSVYAEPRTEPKFLAPALSRILAPAPVQELVWEMAFGMASARSRYWSWRGALPNAPLGSWYLAMDFESGGLDQGA

SEQ ID NO: 50711 - protein, 261 aa, Zea mays
  Coding DNA Sequence Number=SeqID_8932
  Gene Ontology: Mol. function=catalytic activity; Cellular component =cellular_component; Biological process=metabolic process
  Homolog annotation: Hit_ID=Q2R712; Match level="QueryCoverage=87%, HitCoverage=30%, E-value=1e-62, Identity=51%"; Hit description =Cycloartenol synthase, putative, expressed
  Pfam annotation: Domain name=Prenyltrans; Domain location=150-193; Score=34.4; E_value=4.1e-07; Accession=PF00432.11; Description =Prenyltransferase and squalene oxidase re
MWRLKIGEGGGPWMQTASDFHGRQVWEYDPVAGTDEERSKVEQLRRAFTENRFRRRESQDLLMRMQFAGQKYVHADLPAATKIEEEDGDEVPVTEERLRESLRRALGCMAALQAEDGHWPGDYSGVMYLMPFWIFALHITGTVDAVLSKEHRREICRHIYNHQNEDGGWGLNVIDESAMFSTCLNYTSLRLLGEVQQEENDGLAKGRAWILSHGTATAAPQWAKILLSFLDSAVLETKIVFIVRRWGLNPCPDGRRAGDTG

SEQ ID NO: 50712 - protein, 55 aa, Zea mays
  Coding DNA Sequence Number=SeqID_8933
MVVVIVRGGIQTQRYSPMRRIGGHPPSTTTFDPMASDASFDLTTSESSSGNELSV

SEQ ID NO: 50713 - protein, 52 aa, Zea mays
  Coding DNA Sequence Number=SeqID_8934
MGLHPILVEPKPNKGSSISDRVGNIRLAIIKSGSWISDPMASVKYLFNIMKI

SEQ ID NO: 50714 - protein, 605 aa, Zea mays
  Coding DNA Sequence Number=SeqID_8935
  Gene Ontology: Mol. function=3-dehydroquinate dehydratase activity; Cellular component=cytoplasm; Biological process=aromatic amino acid family biosynthetic process, shikimate pathway
  Homolog annotation: Hit_ID=Q30D00; Match level="QueryCoverage=78%, HitCoverage=88%, E-value=1e-162, Identity=61%"; Hit description =Putative 3-dehydroquinate dehydratase/shikimate dehydrogenase
  Pfam annotation: Domain name=DHquinase_I; Domain location=1-210; Score=194.4; E_value=2.7e-55; Accession=PF01487.6; Description=Type I 3-dehydroquinase
  Pfam annotation: Domain name=Shikimate_DH; Domain location=323-453; Score=100.6; E_value=4.8e-27; Accession=PF01488.10; Description =Shikimate  quinate 5-dehydrogenase
  Pfam annotation: Domain name=Shikimate_dh_N; Domain location=225-305; Score=149.0; E_value=1.2e-41; Accession=PF08501.1; Description =Shikimate dehydrogenase substrate bind
  Pfam module annotation: Pfam domain module=DHquinase_I::Shikimate _DH::Shikimate_dh_N; Domain location=1-210::323-453::225-305
MAAELAAAAALGADVAELRLDCLAGFAPRRDLPVILAKPRPLPALVTYRPKWEGGEYEGDDESRFEALLLAMELGAEYVDVELKVADKFMKLISGRKPDNCKLIVSSHNYETTPSSEELANLVAQIQATGADIVKIATTATEIVDVAKMFQILVHCQEKQVPIIGLVMNDRGFISRVLCPKYGGFLTFGSLKKGKESAPAQPTAADLINLYNIRQIGPDTKVFGIIGKPVGHSKSPILHNEAFRSVGFNAVYVPFLVDDLAKFLDTYSSPDFAGFSCTIPHKEAAVRCCDEVDPVARDIGAVNTIVRRPDGKLVGYNTDYVGAISAIEDGIKASESEPTDPDKSPLAGRLFVVIGAGGAGKALAYGAKEKGARVVIANRTFARAQELANLIGGPALTLADLENYHPEEGMILANTTAIGMHPNVNETPLSKQALRSYAVVFDAVYTPKETRLLREAAECGATVVSGLEMFIRQAMGQFEHFTGMPANNTPFQQCLRVLTPLIKAARIVRSLICANSWTDREESQNQPVCIGLLSVHIKEQRESFAWDFVPVRNMQAMFDTLVFISIHIDLRGLRGTLFYSMKAMHPYYASRSHGEWHLTPPRGQA

SEQ ID NO: 50715 - protein, 180 aa, Zea mays
  Coding DNA Sequence Number=SeqID_8936
MERLISPHRSRSSCSISGICLVPWVGVQDTFGHIRTQKLVLALVIFAVLKYSVIRYISVKAVHLVADYGSCGVGTETNGEDTAEGEEAEGSPWNKAPRLDDAARTTLPVASAPRPTGKTLLKGRRRREARRTKLPASTTTLLGLPQWPRSPAPTPPRISLDLPPWMTTTCCSTSPHHWPT

SEQ ID NO: 50716 - protein, 172 aa, Zea mays
  Coding DNA Sequence Number=SeqID_8937
MGTQVVVGFSNAGVGVGCVESWCGAAATLHTRLVTLRGRWLGRGRGRSSWKGEGKRGRHREREGRKGGDGDRVDISALRSSGWRRNSPTPAPEMLSGSGTPCRHLVGNRVCCPIGAWPWPASVLASRLATTTLVYAERRHRPATEVDVLVLHGEGSSGGVGTPNRLSLCRSS

SEQ ID NO: 50717 - protein, 129 aa, Zea mays
  Coding DNA Sequence Number=SeqID_8938
MYLCYDHQFFKVDTTNIAEKRGVPCVGRANMGTWQQADNFRVFLTCYVYKPKRYTMKIDNLCGAALIQLTTSKGIVFLFRTSANKSLLENVTIFETRNDTYSTKQLKTPRYVASIEVHVSRKNGNSVQI

SEQ ID NO: 50718 - protein, 252 aa, Zea mays
  Coding DNA Sequence Number=SeqID_8939
  Gene Ontology: Mol. function=protein dimerization activity
  Homolog annotation: Hit_ID=Q2QNH1; Match level="QueryCoverage=99%, HitCoverage=30%, E-value=4e-97, Identity=71%"; Hit description=HAT family dimerisation domain containing protein, expressed
  Pfam annotation: Domain name=hATC; Domain location=140-230; Score =51.7; E_value=2.4e-12; Accession=PF05699.5; Description=hAT family dimerisation domain
MCIDATLMRIEDTVNYFQNYRNNGFASSLIIAKEIASELGVEPSFPVKRHAKRKKQYDETDCEEANLEAEKAFEVNYFLVIVDIAISSLKSRFEELQSFKDIFGFFMDSITLKSLDTIELRECCTKFANTFSFDDSSDVDLNDLILELSVLQLTLSDKPMSAMDIFEYVREVDSYPNTAIAYQLLFTVPVTVALAKRSFSKLKLLKNYLMSKMSQERLNGLAILCIEKILLDEIDTDAIINDFASRHVRRQF

SEQ ID NO: 50719 - protein, 609 aa, Zea mays
  Coding DNA Sequence Number=SeqID_8940
  Gene Ontology: Mol. function=RNA-directed DNA polymerase activity; Cellular component=mitochondrion; Biological process=RNA-dependent DNA replication
  Homolog annotation: Hit_ID=Q8S463; Match level="QueryCoverage=89%, HitCoverage=28%, E-value=0.0, Identity=87%"; Hit description =Putative prpol
  Pfam annotation: Domain name=RnaseH; Domain location=1-116; Score= -19.7; E_value=0.0039; Accession=PF00075.14; Description=RNase H
  Pfam annotation: Domain name=rve; Domain location=321-480; Score =111.4; E_value=2.5e-30; Accession=PF00665.16; Description=Integrase core domain
  Pfam module annotation: Pfam domain module=RnaseH::rve; Domain location=1-116::321-480
MKTGASAGLLFISPLGKHLRYVLRLHFPASNNVAEYEALVNGLRIAIELGVRRLDACGDSQLVIDQVMNNSHCRDPKMEAYCDEVQRLEDKFYRLELNHIARRYNETADELAKIASGRTMVPPDVFSRDLHQPSVKVDDTPEPEAPLAQFEAPSAQPEAPSARPEAPSVQPEVPSAPEGEALRVEEEQSGVTPNQNWQTPYLQYLHRGELPLDRAEARWLARRAKSFVLLGDGKELYHRSPSGILQRCIPIAEGQELLREIQSGACGHHAAPRALVGNASRQGFYWPTAVADATRIVRTCEGCQFYARQTHLPAQALQTIPITWPFAVWGLDLVGPLQKAPGGYTHLLVAIDKFSKWIEVRPLNSIRSEQAVAFFTNIIHRFGVPNSIITDNDTQFTDRKFLDFCEDHHIRVDWAAVAHPMTNGQVERANDMILQGLKPRIYNDLNKFGKRWMKELPSMVWSLRTTPSRATGFTPFFLVYGAEAIFPTDLEYGSPRTRAYADQSNQASREDSLDQLEEARDMALLHSARYQQSLRRYHARGVRSRDLQVGDLVLRLRQDARGRHKLTPPWEGLFVIAKVLKPGTYKLANSQGEVYSNAWNIQQLRRFYP

SEQ ID NO: 50720 - protein, 134 aa, Zea mays
  Coding DNA Sequence Number=SeqID_8941
MFWFAPEDEQAERNFSLELSLEFGRESNFDELERDDELDFVEALFTSGGTDHHSSLYLDACLVKDAIGDFRSFVPLLLEPPFLVLSSLLDEQVRDSDMPQCGFDDVEGAQVAWLDPVLLAEALPGHSDEAAVVL

SEQ ID NO: 50721 - protein, 84 aa, Zea mays
  Coding DNA Sequence Number=SeqID_8942
MYVYRVMKKVGESGCIMVAHQLGAYRKYMEDPQCIDQRSDKKFPKTLIVRCNFLCSKQPHVSVLCRFYVCEYLRACGKFNTSYK

SEQ ID NO: 50722 - protein, 975 aa, Zea mays
  Coding DNA Sequence Number=SeqID_8943
  Gene Ontology: Mol. function=ATPase activity, coupled to transmembrane movement of substances; Cellular component=integral to membrane; Biological process=transport
  Homolog annotation: Hit_ID=Q8GU66; Match level="QueryCoverage=99%, HitCoverage=67%, E-value=0.0, Identity=74%"; Hit description=MRP -like ABC transporter
  Pfam annotation: Domain name=ABC_membrane; Domain location=473-731; Score=24.7; E_value=0.00012; Accession=PF00664.13; Description=ABC transporter transmembrane region
  Pfam annotation: Domain name=ABC_tran; Domain location=191-362; Score= 131.3; E_value=2.8e-36; Accession=PF00005.17; Description=ABC transporter
  Pfam annotation: Domain name=ABC_tran; Domain location=773-938; Score= 129.5; E_value=9e-36; Accession=PF00005.17; Description=ABC transporter
  Pfam annotation: Domain name=SMC_N; Domain location=180-366; Score= -105.3; E_value=0.00064; Accession=PF02463.9; Description=RecFRecNSMC N terminal domain
  Pfam module annotation: Pfam domain module=ABC_membrane::ABC _tran::ABC_tran::SMC_N; Domain location=473-731::191-362::773 -938::180-366
MLSNMRPIKLQAWEDTFGGKVRDIRREELGWLAKIMLFMCANTVVFSSGPLAMTVLVFGTYLASGGQLDAGKVFTATAFFGMLEGPMRNFPQTIVMSMQAFVSLDRLNKFLTDTEIDTAAVERIESGGAEDTVAVKVQGGVFAWDVPADEEMKGNNNNSSRPRHEVAENDQGNRAELVTVLRGIDVEVRRGELTAVVGTVGSGKSSLLSCIMGEMHKLSGTVSICGSTAYVAQTAWIRNGTIQENILFGKPMHSERYSEIVNACCLEKDLEMMEFGDQTEIGERGINLSGGQKQRIQLARAVYQDCDIYLLDDIFSAVDAHTGSAIFKECLKGILKNKTVLLVTHQVDFLQNVDTIIVMKDGLVIQSGIYLELLASCSEFSDLVTAHHSSMETAGAQAFHVQNTESSQASTGSVDAPSLASKSNAENGESVGSATNKEAGSSKLIQEEEKESGRVSWRVYKLYMTEAWGWWGIVVILAVSLLSEGSSMASNYWLSYETSGGPVFDTSLFLGVYASIVATTIILEMIATLIVTFMGLQSAQAFFNKMFDSILRAPMSFFDTTPSGRILSRASSDQSKIDTNLVFYVGFATSMCISVVTNVAITCQVAWPSVIAVFPLLLLNIWYRNRYITTSRELTRLQGVTRAPIIDHFTESFLGAPTVRCFRKEDEFYQINLDRINSNLQFVGMSLSYGISLNSLVYYTISISCMIENDMVAIERVHQYSTLPSEAAWEVADGLPSQDWPSRGDIDVKDLKVRYRQNTPLILKGITVSIKGGEKVGVVGRTGSGKSTLVQALFRIVEPADGHIIIDGVNICTLGLRDLRSRFGVIPQEPVLFEGTALECCQLKDIVASKPEKLDALVADMGENWSVGQKQLLCFGRVILKRSRILFMDEATASVDSQTDAAIQKIIREEFTECTVISVAHRIPTVMDSDRVLVLDAGLVAEFDAPSKLMRRPSLFGAMVQEYASRSSSVKETVG

SEQ ID NO: 50723 - protein, 60 aa, Zea mays
  Coding DNA Sequence Number=SeqID_8944
AFEDGLDLQRQMRLGWTGAGERLSRAAAGSGEICGGGGMTVSLKFLQQWMWIRVLGRRSS

SEQ ID NO: 50724 - protein, 366 aa, Zea mays
  Coding DNA Sequence Number=SeqID_8945
  Gene Ontology: Mol. function=protein serine/threonine kinase activity; Cellular component=membrane; Biological process=protein amino acid phosphorylation
  Homolog annotation: Hit_ID=Q60EZ1; Match level="QueryCoverage=99%, HitCoverage=89%, E-value=1e-125, Identity=66%"; Hit description =Putative serine/threonine-specific protein kinase
  Pfam annotation: Domain name=Pkinase; Domain location=121-361; Score =68.1; E_value=2.8e-17; Accession=PF00069.15; Description=Protein kinase domain
  Pfam annotation: Domain name=Pkinase_Tyr; Domain location=121-345; Score=-14.3; E_value=1.4e-11; Accession=PF07714.7; Description =Protein tyrosine kinase
  Pfam module annotation: Pfam domain module=Pkinase::Pkinase_Tyr; Domain location=121-361::121-345
MTDGSDEYKRDESVILLVIVSLAALSLLSLIAAFAYYCYITRKVSRRLQSLHLPKRSSSPPPPPPPRALPPPQQQGKDSPFSSSASDGAAAAAAAMSVVVAGERGVQVFSYRQLHAAMGGFGRAHMVGQGSFGTVYRGVLPDGRKVAVKLMDRPGKQGEEEFEMEKVGTVYWYTSSWPMGVYMSISTQPETLPDNAKSTSSCGGISKLDWDTRMRIALEAAKGLEYLHERVNPPVIHRDFKSSNILLDKDFHARVSDFGLAKLGSDRAGGHVSTRVLGTQGYVAPEYALTGHLTTKSDVYSYGVVLLELLTGRVPVDMKRPPGEGVLVNWALPMLTDREKVVRILDPALEGQYSLKDAVQVAAIAA

SEQ ID NO: 50725 - protein, 179 aa, Zea mays
  Coding DNA Sequence Number=SeqID_8946
MHPSAEVPVPRPQTYHSYYLRNPSSNNLVSEMPGSDDVLPGSTPPTTSTVATTIDARAAATNPISQADFMAFHQLMMQQFAALTAAISGMFNMPSTTTTIFPFPSATTLVPSPISAFVPSASTIPVPIQQIAFPHSPSLIPSFPEDALPTHHHPAAGAITTTTTSTNYPSPRSTGKMIP

SEQ ID NO: 50726 - protein, 187 aa, Zea mays
  Coding DNA Sequence Number=SeqID_8947
  Gene Ontology: Mol. function=structural constituent of ribosome; Cellular component=ribonucleoprotein complex; Biological process =translation
  Homolog annotation: Hit_ID=O48557; Match level="QueryCoverage=98%, HitCoverage=99%, E-value=2e-83, Identity=84%"; Hit description=60S ribosomal protein L17
  Pfam annotation: Domain name=Ribosomal_L22; Domain location=17-169; Score=240.8; E_value=2.9e-69; Accession=PF00237.9; Description =Ribosomal protein L22pL17e
MVKYSTEPSNPTKSAKAMGRDLRVHFKNTRETAFALRKLSLTKAKSYLEDVIAHKQAIPFRRYCGGVGRTAQAKSRHSNGQGRWPVKSAKFILDLLKNAESNAEVYNSTLRCQSYLCIYNVKGLDVDTLYVSHIQVNQAQKQRRRTYRAHGRINPYMSSPCHIELILSEKEEPVKKEAESQIATRKA

SEQ ID NO: 50727 - protein, 293 aa, Zea mays
  Coding DNA Sequence Number=SeqID_8948
  Gene Ontology: Mol. function=transporter activity; Cellular component= integral to membrane; Biological process=transport
  Homolog annotation: Hit_ID=Q40746; Match level="QueryCoverage=80%, HitCoverage=80%, E-value=1e-77, Identity=64%"; Hit description=Major intrinsic protein
  Pfam annotation: Domain name=MIP; Domain location=51-265; Score =222.3; E_value=1.1e-63; Accession=PF00230.10; Description=Major intrinsic protein
MAGAEVANGVHDGALDLEEGRGGGVDGAGCESSEQDGAGRPPHVLRAVRAEGSFLDGLCDILAEALGTYFLIFAGCAAVAVNLRTGGTVTFPGICAVWGLAVMVMVYSVGHISGAHLNPAVSLAFATCGRFPWRQVPAYAAAQVTGATAASLTLRLLFGSAREHFFGTVPAGSDAQSLVVEFIISFNLMFVVSGVATDNRAIGELAGLAVGATVLLNVLFAGPISGASMNPARTLGPALVVGRYAGIWVYFAGPICGTVAGAWAYNLIRFTDKPLREITQTSSFLRSVRRSSS

SEQ ID NO: 50728 - protein, 70 aa, Zea mays
  Coding DNA Sequence Number=SeqID_8949
MATGRPVRLVLDASLLLDPSSTREAAAVALRPGVEELLRRLRYSNLTVCRSFKEMLSLIDCPRKTNQADS

SEQ ID NO: 50729 - protein, 164 aa, Zea mays
  Coding DNA Sequence Number=SeqID_8950
  Gene Ontology: Mol. function=succinate-CoA ligase (ADP-forming) activity; Biological process=metabolic process
  Homolog annotation: Hit_ID=Q6K9N6; Match level="QueryCoverage=46%, HitCoverage=26%, E-value=2e-27, Identity=62%"; Hit description =Succinyl-CoA ligase [GDP-forming] beta-chain, mitochondrial precursor
  Pfam annotation: Domain name=ATP-grasp_2; Domain location=29-143; Score=-108.0; E_value=0.00091; Accession=PF08442.1; Description=ATP -grasp domain
MVRGSLGKLASRALSVAGRWQHQQLRRLNIHEYQIVVKSQILAGGRGLGTFKSGLQSGVHIVKAEEAELIASKMLGPDSDNETNWSRGKDCEQDAKNITNVLHHVGSPSFIYQVLALLHLSYLQYFLAYRRFLEIDTSNSLLLAAGEENTIVDLNVQRMASDDA

SEQ ID NO: 50730 - protein, 79 aa, Zea mays
  Coding DNA Sequence Number=SeqID_8951
MTIPTGKILYPCPYPSGIGWISGICRERTHPHHPPTRPSPSKSQVAAFFARYAVISNRTVDLTLACTLHYHSAYGMHCV

SEQ ID NO: 50731 - protein, 63 aa, Zea mays
  Coding DNA Sequence Number=SeqID_8952
MEIIQDKPKAKHHLRVEKARGYIRSYLSERGRVCSTPNFDDCAGRRPSLPPYFDPIAGDDNRQ

SEQ ID NO: 50732 - protein, 108 aa, Zea mays
  Coding DNA Sequence Number=SeqID_8953
MWPNAAASAHTRTIRLSTEKTSLLSQSQTIRAVAESIVAGDSRDHLDVFPSNIIEPTMEILSAEDQLEFEEHQEQLIKETHTNGRIGKWAYAFIEYDLAYESLKSMKS

SEQ ID NO: 50733 - protein, 145 aa, Zea mays
  Coding DNA Sequence Number=SeqID_8954
MHVRPEALALVACAYLYIVYLYNSIKTLKCFAASLRHRIKDQTVANVHLAEEANVYIEDDIIVVVRPNIPVSSPCSVEVIEFSARIWSTPPTQQAPMYLTSRCSRKFLAGGFGFTETSCSSVLSTAPEDQPAVSDCLEWSHAVRH

SEQ ID NO: 50734 - protein, 548 aa, Zea mays
  Coding DNA Sequence Number=SeqID_8955
  Homolog annotation: Hit_ID=Q6H4Z9; Match level="QueryCoverage=79%, HitCoverage=73%, E-value=2e-78, Identity=60%"; Hit description =Leucine zipper protein-like
  Pfam annotation: Domain name=DUF630; Domain location=1-61; Score =78.7; E_value=1.8e-20; Accession=PF04783.3; Description=Protein of unknown function (DUF630)
  Pfam annotation: Domain name=DUF632; Domain location=238-513; Score =86.2; E_value=1e-22; Accession=PF04782.3; Description=Protein of unknown function (DUF632)
  Pfam module annotation: Pfam domain module=DUF630::DUF632; Domain location=1-61::238-513
MGCSSSKLDEEAAVKTCHDRKSFVRKAIAQRDLLASSHVAYVQSLRRVSMGLFYYFAEDEHLHRLQESSCVHRPGSPDKVLVVVNCLRPAGAPVHPVVEQWEPTDEAIEAATIDGFFGADGPFLRPPSIDPMFGPSVSPQPRRWDLFWDPFSSLTDHPSYSVEEVRDDQEDEQIPELEEESDGGGGDCHREGEGGAEEEEGEQAAVAAQVAAPSREQVGRKVDHVSNELRVLASAEIEQHGAPGFTVYVDRPPASMAEAVRDIQGHLMKILDTAKEASVLLEVVPYQRRVQPPVPRDDGEEQGAPEVPPEPFELFQSHKESLDRLYEWEKRLYEEVRAGERVRLAYEKKCALLRSQDASGAEPFAIDKTRAAVRDLRTKLDISLTSVDAVSRRIAAVRDDELLPQLLQLVRGLARMWRVIADAHRVMKRTADDSIALLTASAAAAAAARPDPAVDVEPAARAVDAAAEAAAAVASAAKRQRSGGGEEWFNEDEGKKKVCVGLAAALGAIAEAGALAVFGYDELLLEMEMGAREREREISGRDDECFNP

SEQ ID NO: 50735 - protein, 143 aa, Zea mays
  Coding DNA Sequence Number=SeqID_8956
MGAAPVLVLLLLVAAAALPRRASAATDAGDGESNPGLGGATRKSLTTRLEPLSLLEVKTLLKMTENSEEDALLGGGHDPTSLTQEDDEEIEERMNLEPGLKEWVFQIVYCFGWLNADVLQTVLLMMTSDKLSFVAVTITTFQI

SEQ ID NO: 50736 - protein, 445 aa, Zea mays
  Coding DNA Sequence Number=SeqID_8957
  Pfam annotation: Domain name=Extensin_2; Domain location=1-341; Score= -136.3; E_value=0.056; Accession=PF04554.4; Description=Extensin-like region
MDSLLASYASSDDDADEAPPAPPPAHSPAIATSSGGGAGGFFSSLPQPKSAPAPLFSSLPAPKSTPTPLFSSLSAPKSSPAPNPTFSSIPPPKSSGGNPKRVVQYRPQPIRQPTGDSSDDEEDDPKKRRASNNEARLPPVSAGSGPVSSFLPPPKHSLGLGAGSGAGARRSAIDTAAPEKLNLGTALPSSSVANTGAPERPDTGATDDDDSEDSGSDGDMPAPELEEEHENQQAFNAATGEQQQSYDAGAGSTSGYETYAWDPNHYAQHGAYGWDPSASANYEDGTQYAAYERGQSAGYVHAHGGEHASGYDHVAAVPYGVDYTAGGYGHEVAATLPPVHEPILPPEMGRSGGKRGRNDTPVQILEVNQAELMKNRPKQDKSKLTGLAFGPSYQAAPVRGERTQWRESCGGGEERGAAGAGLETKRCWRQGEKKGMLSAARRLDI

SEQ ID NO: 50737 - protein, 62 aa, Zea mays
  Coding DNA Sequence Number=SeqID_8958
  Homolog annotation: Hit_ID=Q339A6; Match level="QueryCoverage=74%, HitCoverage=4%, E-value=3e-13, Identity=74%"; Hit description=Anther ethylene-upregulated protein ER1, putative, expressed
MAQGHISLSVSADIEQILKEAQHRWLRPAEICEILKNYRNFRIALEPPNRPPSMTFIFYAEH

SEQ ID NO: 50738 - protein, 100 aa, Zea mays
  Coding DNA Sequence Number=SeqID_8959
MPQAAGSSACRRLDRARARARRWWETTRWRWWPGGSVLVECERKERQRDLSSGRPVGLIKAEFLKNRISTRTEEPNRTEEPNVQAYAEEATGHRKNREEQ

SEQ ID NO: 50739 - protein, 363 aa, Zea mays
  Coding DNA Sequence Number=SeqID_8960
  Homolog annotation: Hit_ID=Q9LVD1; Match level="QueryCoverage=66%, HitCoverage=64%, E-value=1e-58, Identity=47%"; Hit description =Arabidopsis thaliana genomic DNA, chromosome 5, P1 clone:MJB24
  Pfam annotation: Domain name=DUF266; Domain location=97-179; Score =113.1; E_value=7.9e-31; Accession=PF03267.4; Description=Arabidopsis protein of unknown function, DUF266
  Subcellular localization annotation: CTP_CleavageSite=28; ConfidenceScore=5.30e-01
MVVVDQSALSSRDSVQPRPVVRPTYLTPASRFAAWGEPRQATLSLTASPPVGYCLVGYTRSLAVISFCSNNASTDHNYVNLGYLLHVFNHGYCTLMLGYLDIGTKGYQMTSLLVVWGRISMVDAEKRLLANALEDVDNQFFVLLSDSFLDPGPHGTGRYSMEMLPEIEQRDFRKGAQWFAITRRHALLILADNLYYNKFKLYCKPAEGRNCIADEHYLPTFFNMVDPGGIANWSVTHVDWSEGKWHPRSYRAADVTYELLKNITSVNENFRITSDDKNAICLTSLHLPYFDSTTNIFINIPTLILNTERGLTQSYGYRASDVILIELTKSVTLTTKCATKIHASQFYSSQPPTQATKPILSDH

SEQ ID NO: 50740 - protein, 176 aa, Zea mays
  Coding DNA Sequence Number=SeqID_8961
  Gene Ontology: Mol. function=zinc ion binding; Cellular component =intracellular
  Pfam annotation: Domain name=zf-B_box; Domain location=11-57; Score =32.2; E_value=1.9e-06; Accession=PF00643.14; Description=B-box zinc finger
MGAAGDAAAAGTRTRCELCGSAAAVHCAADSAFLCPRCDAKVHGANFLASRHVRRRLPRGGAESGASSSSGSCLSTADSAQSRAAPPPPGRGRRAEDVLEGGWARRKRVAAGPACRRRVPLRVAMAAARWSEVRAGGGAEAAVLAVAAWWMTRAARARPPGGGRSGPGGGMGRVLS

SEQ ID NO: 50741 - protein, 81 aa, Zea mays
  Coding DNA Sequence Number=SeqID_8962
MVQMHIREEETVICIYGQNLDFVLVEVSLNNMVPETSTNYDLLNHILNELRVPLIAICSYDDEVALSKYMNLATWVHASMC

SEQ ID NO: 50742 - protein, 140 aa, Zea mays
  Coding DNA Sequence Number=SeqID_8963
MIIAVLRGSGWGRLEQIRSLRGLEFLVGERILPHTVDASAWSLVLGEHLSRVYLIVRAARHYIRIEVLARESRLGCSPVMAPPPVLGCRRVMAKAGRVDCDRQMRRSWLGIELVYPFAWVDLHRRISCGRIWGLQKFITK

SEQ ID NO: 50743 - protein, 44 aa, Zea mays
  Coding DNA Sequence Number=SeqID_8964
MDLFKYSSALTTMHIKSIFPTQVGSANNGKNIKGQFFIAFEKCF

SEQ ID NO: 50744 - protein, 148 aa, Zea mays
  Coding DNA Sequence Number=SeqID_8965
MAMEQLYGVYDSSYNELQGWIAAYELEPHIFRQRMIRLESDMEGQTNTSFPQWLGTMEPWQWAQSFDEDFRYGQMTTNLVEGINAVLLKTRHLPQHLFFFFLFFSIQLDRARVYNMSSPANQYGTIGAANQYGTIGAANQKPSTRKTD

SEQ ID NO: 50745 - protein, 151 aa, Zea mays
  Coding DNA Sequence Number=SeqID_8966
MEQNEDVNASDEEHGAQEPWMVAPISYVDSESTMGGIGIDLNITPDVDMVGGKEEGGGDHWDEEVDSDGDLDVDDVPDDIDDEDVNNDEGINASSVEEQMRRILIHNNPGPHMSLIDPGAAYVTEFPEYPEKVYPHGLAVTSNDEELFIGQ

SEQ ID NO: 50746 - protein, 345 aa, Zea mays
  Coding DNA Sequence Number=SeqID_8967
  Gene Ontology: Mol. function=dolichyl-diphosphooligosaccharide -protein glycotransferase activity; Cellular component=oligosaccharyl transferase complex; Biological process=protein amino acid N-linked glycosylation via asparagine
  Homolog annotation: Hit_ID=Q5N7W3; Match level="QueryCoverage=93%, HitCoverage=42%, E-value=9e-80, Identity=48%"; Hit description =Putative ribophorin II
  Pfam annotation: Domain name=Ribophorin_II; Domain location=3-344; Score=-177.0; E_value=0.00011; Accession=PF05817.4; Description =Ribophorin II (RPN2)
MARRLAGFLVLLLVVSICEAAFLFQPISDSHRSAALELFTPDHGSFKRCRQGTYENEVFGGISFDIIDLNSLEETYEALRTFQILGIEKKPDLTATACRSISETVGSSSSTAKDLFYALKANSIAECKIDKKASKGIISRLNAAVSGASSLLDFYYSVGGLVLIKDQSSEADVHLADAEGVFRSVKAFSQSDGRWRYSSSNPESSAFAAGIALETLAGIVSLASSEIDQSLISTLKNDIIKLFDSIEKYDDGALYFDDKLVDGHEYQGPLSTTSSVLRGLTAFAAVTAENLNLPGDTMLGLAKFFLGICVPGDAKDFFNQIDSLACLESNRQGFALGSFNVFSFI

SEQ ID NO: 50747 - protein, 216 aa, Zea mays
  Coding DNA Sequence Number=SeqID_8968
MVDLYCENGSDKNAPIHLFAELAGMEQNEDVNASDEEHGALELWMVASISYVDSESTMGGIGFDLNITPDVDMVGGEEEGGGEEEGGGDHWDEEVDSDGDPDVDDVLDDIDDEDVNNDEYINASSVGEQMRRILIHNSPGPHMSLIDPDAAYVTEFPEYPEIVHPHGLAVTSDDEELFIGQRFSCKEECVYAIKRYSMNISVDYKVAVSTPTIYVG

SEQ ID NO: 50748 - protein, 227 aa, Zea mays
  Coding DNA Sequence Number=SeqID_8969
MGGTGGAIPMGGTDGAIPMGGTALIMGTIRLLLGESPEDEESNFSGLKFTWLKAKFGQLSATATEVLYRKLCRVTNPDVVDMGGCLTLLQSWALYRMPFLASVSHQPYVYPLVKCSSGYREVAHYPDIPTYDRTVYPGRGGKYAYEFELFGSYPPQYGMPGPSDLYPQHHGTPSASSSSVPNEPQDFFSPFATPPPAPNDDVGCRPERDRRSPNRYTPRTTPSNHQI

SEQ ID NO: 50749 - protein, 197 aa, Zea mays
  Coding DNA Sequence Number=SeqID_8970
  Gene Ontology: Mol. function=nucleotide binding; Cellular component =intracellular; Biological process=protein transport
  Homolog annotation: Hit_ID=Q6ASS4; Match level="QueryCoverage=60%, HitCoverage=59%, E-value=5e-30, Identity=56%"; Hit description=SNF7 family protein
  Pfam annotation: Domain name=Snf7; Domain location=30-171; Score =48.8; E_value=1.8e-11; Accession=PF03357.11; Description=Snf7
ERGKAKKLKNRRQAETVVADTKTVATTVVAATPDINGDIGNIGKAAGGLGRYHPPESPQEERVRWCHRWEKQKELAMHAQSSVAVGMKGATKAMSAMNKQMAPEKQAKVIREFQKQSGQMDMTTEMMSDAIDDALDDDEAEDETEDLTNQVLDEIGVDVASQLSSAPKGRIAGKNTEGVGSSGVDELEKRLAALRNP

SEQ ID NO: 50750 - protein, 425 aa, Zea mays
  Coding DNA Sequence Number=SeqID_8971
MTVAESVVKLGLGKDKLGSSKSEERGASEMDHKEDIVDSNGNDDNGGNGKPRVGKKKPKRKRDKRKYFLCDGPHMLKKCPKKSELKEKPVGEALVLGSSARDVETKEAESEKKSVECFLCHGPHRLRKCPRKSVIEGNDGADNEPKKLGSSKGKAEAKRAKRSKKKRVKCFLCRGPHELRNCPKQAGVKRKTTSELGESSEGLPPKEEVSLSSELEERVTMKTVKLGPMRLKLSKASKLAESWTRLPPIGEVGGASNFKEKEVMHVGQLTRVNAKVHSKHCDSVLHSNLLTWQERMGPFEVLEQRGRETVGKVKPSVVNQEDSVRAKLECGQESDITSCHRDVQTSRTVRVKKRRKPKQKSRRKGKAKALRRDRGESSQCHSEVATRTLREWVGENVMGRSSKPVTITPNASNGGLLLRWGSFCL

SEQ ID NO: 50751 - protein, 416 aa, Zea mays
  Coding DNA Sequence Number=SeqID_8972
  Gene Ontology: Mol. function=protein serine/threonine kinase activity; Cellular component=plasmodesma; Biological process=protein amino acid phosphorylation
  Homolog annotation: Hit_ID=Q8LPJ1; Match level="QueryCoverage=99%, HitCoverage=99%, E-value=1e-148, Identity=60%"; Hit description =Protein kinase ADK1-like protein
  Pfam annotation: Domain name=Pkinase; Domain location=9-236; Score =44.1; E_value=3.4e-11; Accession=PF00069.15; Description=Protein kinase domain
  Pfam annotation: Domain name=Pkinase_Tyr; Domain location=9-231; Score=-130.5; E_value=0.00018; Accession=PF07714.7; Description =Protein tyrosine kinase
  Pfam module annotation: Pfam domain module=Pkinase::Pkinase_Tyr; Domain location=9-236::9-231
MDHVIGGKFKLGRKIGSGSFGELYLGVNVQTGEEVAVKLESAKTKHPQLYYESKLYMLLQGGTGIPHLKWFGVETDYNVMVIDLLGPSLEDLFNYCNRKLSLKTVLMLADQMINRLEYMHSRGFLHRDIKPDNFLMGLGRKANQVYVIDYGLAKKYRDLQTHKHIPYSLPWQGLKAGTKKQKYDKISEKKVSTPIEVLCKSYPSEFVSYFHHCRSLRFEDKPDYSYLKRLFRDLFIREGYQFDYVFDWTVLKYPKIGGSSRGRHSSGRAGLAAGPTIEKPERISVGREIRDRFSGAVEAFSKRNISSTSPHLDHSRHKTVDDGALSKHALPDSDKRRSSSRYGSTSRRAVVASRPSSSVEANDAPQNRLTSSGGRMSTTQRIQLAFESKTSSRATPVRGSRDDHPLRSFELLSIRK

SEQ ID NO: 50752 - protein, 230 aa, Zea mays
  Coding DNA Sequence Number=SeqID_8973
  Pfam annotation: Domain name=DUF1639; Domain location=155-204; Score =93.4; E_value=6.7e-25; Accession=PF07797.4; Description=Protein of unknown function (DUF1639)
MEKEARNHYRTRGSSRGSGGGGTAAERDLLLQWGNRKRLRCVKVQRRDVEAAATAAAEKAAISQRRAAAAAAAAQHHPTGHTHHRVLRKSEEFAIMKLPARQRQNDRIHTVASPDRECPGRGNNNNGVPQTYPDDKKGSSSGSEGSIWPKFEITLSNREKEEDFLVFKGSKLPQRPKKRAKVIQRTVNFVCPGTWLCDLTLERYEVREKKVSKKRPRGLKAMHDMDSDSE

SEQ ID NO: 50753 - protein, 146 aa, Zea mays
  Coding DNA Sequence Number=SeqID_8974
  Gene Ontology: Mol. function=catalytic activity; Biological process =aromatic compound metabolic process
  Homolog annotation: Hit_ID=Q9LVU7; Match level="QueryCoverage=61%, HitCoverage=20%, E-value=7e-36, Identity=75%"; Hit description =Genomic DNA, chromosome 5, P1 clone:MNB8
MATDALALIDHLGWKKAHVFGHSMGAMIACKLAAMAPHRLCSLALLNVTGGGFQCFPKVDAQMLSLAFRFLRAKTPEERALVDLETHYTKVNNALMDLIKATKSEIKPEEWSAQPENTSGMILMGFELMRNIVRVMKPVRVAAIES

SEQ ID NO: 50754 - protein, 162 aa, Zea mays
  Coding DNA Sequence Number=SeqID_8975
  Homolog annotation: Hit_ID=Q5TKP1; Match level="QueryCoverage=31%, HitCoverage=86%, E-value=2e-15, Identity=76%"; Hit description =Putative fiber protein
MAVMEKLKIFVVKEPVVAASCLIAGFAVVRPILDSWQTAEQVPPPLLNDNVYVSSHVLDEGDEEHRKPQNPATPFGRRTSPPSAALERGEKRRRRSTSPGSACLSSVKHIKHKSMDKDPLDMVETAVQVIEAHVDIIRSLVTDGVVETTLPESVYTLKTTLF

SEQ ID NO: 50755 - protein, 119 aa, Zea mays
  Coding DNA Sequence Number=SeqID_8976
MNSTACIEMIEKFQLDRAKFEEQAATSANAEREDLKEYRQRKMKLSEDMFKLQQQERDDRIMNMDLDKVAPYARNYYLYMQKAILSRLPPPEDIQRRCRSNKTYGNLELSHLANNISAK

SEQ ID NO: 50756 - protein, 201 aa, Zea mays
  Coding DNA Sequence Number=SeqID_8977
  Subcellular localization annotation: CTP_CleavageSite=48; ConfidenceScore=5.26e-01
MAINQRTVRWCTRLSGEPSAPALKTPATNSSLSGKSGGAAAKIHRTVQCASDCPVSQRCSRPMIGCAISGRRVACTNGRLVTPDCPVCTDSVRCANGTEGPTVDYARKEGDQAPDRYCSCPVVHRTVWCATRQKDHLFTPSRCSQGVLTTNHQATSLVHGRSWLRSGPTCQRVNLMSAGVAERLGRGPHLAVTRTVKPLDW

SEQ ID NO: 50757 - protein, 131 aa, Zea mays
  Coding DNA Sequence Number=SeqID_8978
MGASNRTMAYRLVPFAQLYLHVIMFTNVGVEGKILSNTWGVTGFTVLVTARWGPLPSRSAAPALIGLTRWQVVFYLRYMYHLPYGVSWAWLRVRGGSGNGVSRERAGGSRWQGDGGEEECGTVDPVMGGPD

SEQ ID NO: 50758 - protein, 674 aa, Zea mays
  Coding DNA Sequence Number=SeqID_8979
  Gene Ontology: Mol. function=RNA-directed DNA polymerase activity; Cellular component=intracellular; Biological process=RNA-dependent DNA replication
  Homolog annotation: Hit_ID=UPI00004C1731; Match level="QueryCoverage =99%, HitCoverage=51%, E-value=0.0, Identity=80%"; Hit description =UPI00004C1731 related cluster
  Pfam annotation: Domain name=RnaseH; Domain location=317-444; Score =10.6; E_value=6e-06; Accession=PF00075.14; Description=RNase H
  Pfam annotation: Domain name=rve; Domain location=477-624; Score =63.9; E_value=5.1e-16; Accession=PF00665.16; Description=Integrase core domain
  Pfam module annotation: Pfam domain module=RnaseH::rve; Domain location=317-444::477-624
MKESDQLATSFITPFGMYCYVTMPFGLRNVGATYQRCMNHVFGKHIGRTVEAYVDDIVVKTRKASDLLSDLECVFGVPRGMLLGFIVSERGIEANLEKIAAITSMGPIKDLKGVQRVMGCLAALSRFISRLGERGLPLYRLLRKAECFTWTPEAEEALGNLKALLTNAPILVPPAAGEALLIYVAATTQVVSAAIVVERQEEGHALPVQRPVYFVSEVLSETKIRYPQVQKLLYAVILTRRKLRHYFESHPVTVVSSFPLGEIIQCREASGRIAKWAVEIMGEAISFAPRKAIKSQVLADFVAEWVNTQLPIAPIQPELWTMFFDGSLMKTGVGAGLLFISPLGKHLRYVLRLHFPASNNVAEYEALVNGLRIAIELGVRRLDTRGDSQLVIDQVMKNSHCRDPKMEAYCDEVRRLEDKFYGLELNHIARRYNETADELAKIASGRTTVPPDVFSRDMHQPSVKIDDTPEPEAPSAQSEAPSARPEAPLVQPEKAPGGYTHLLVAIDKFFKWIEAVAFFTNIIHRFGVPNSIITDNGTQFTGRKFLDFSEDHHIRVDWATVAHPMTNGQVERANDMILQGLKPRIYNDLNKFGKRWMKELPSVVWSLRTTPSRATGFTPFFLVYGAEAILPTDLEYGSPRTRAYADQSNQVNREDSLDQLEEARDKALLHSARY

SEQ ID NO: 50759 - protein, 62 aa, Zea mays
  Coding DNA Sequence Number=SeqID_8980
MADLYDEDKGPSLKSQQSCPGLRLKPSIEIFNYQVSSESGYEYTRVWSGRSLSETKGDYDEG

SEQ ID NO: 50760 - protein, 59 aa, Zea mays
  Coding DNA Sequence Number=SeqID_8981
MTKDFAMTTALPPYEDIVASAAPDTIVFFGGMSKVDALPKVCGSEFTGGGRQCWSLVLK

SEQ ID NO: 50761 - protein, 396 aa, Zea mays
  Coding DNA Sequence Number=SeqID_8982
  Gene Ontology: Mol. function=catalytic activity; Biological process =trehalose biosynthetic process
  Homolog annotation: Hit_ID=Q67VY4; Match level="QueryCoverage=92%, HitCoverage=68%, E-value=1e-135, Identity=68%"; Hit description =Putative trehalose-phosphatase
  Pfam annotation: Domain name=Trehalose_PPase; Domain location=125 -367; Score=306.8; E_value=4e-89; Accession=PF02358.7; Description =Trehalose-phosphatase
  Subcellular localization annotation: CTP_CleavageSite=61; ConfidenceScore=5.07e-01
MTNQDVVVPDMGIAAAAALPPPGLFACRGVAGAVSSLRGTYGSLGLPGGAAADGGEFRSPVAAAANAPPGRTSCTSRVVEAIRASSPARCPAVDEYDAWTRKHPSALGSFDQIAAAAKGKRVVMFMDYDGTLSPIVADPDMAFMTPEVTVPIRCARRFEMRAAVRNVAKRFPTAIVTGRCIEKVCSFVGLPELYYAGSHGMDIKGPNSKEDKTVLLLQPAREFLPVIDKAYKALVEKTKDTTGARVENNKFCLSVHFRCVDEKSWSSLAEKVKAVLRDFPELELTEGRKVVEVRPSIMWDKGKAVEFLLRSLGFDDDRTNVLPVYIGDDRTDEDAFKVLRERGQGIGILVSKCPKETDATYSLQDPTEVMEFLVRLGQWNPLRSPSPAARPRGRKQ

SEQ ID NO: 50762 - protein, 63 aa, Zea mays
  Coding DNA Sequence Number=SeqID_8983
MTTTTTPTVVAPLVPVLPGRLPLNPRDNRLVLTMYNLSKAVHEVESQLRYFHVLAKRAISPTS

SEQ ID NO: 50763 - protein, 73 aa, Zea mays
  Coding DNA Sequence Number=SeqID_8984
MENLSAKDQQGFEEYKRQLIEEGETKYLANFKVDIHQKVVRQKEFDLSSLRPTAPALIDVVPITHNSSTTSGL

SEQ ID NO: 50764 - protein, 262 aa, Zea mays
  Coding DNA Sequence Number=SeqID_8985
  Homolog annotation: Hit_ID=Q8SA97; Match level="QueryCoverage=47%, HitCoverage=19%, E-value=5e-09, Identity=42%"; Hit description =Ornithine carbamoyltransferase
  Subcellular localization annotation: CTP_CleavageSite=37; ConfidenceScore=5.68e-01
MGSHSPTGKSPLPSLDPRARTRAKTRKTANSAPPDPRAQTRAKTRKTANSAPPDPRARTRAKTRKTANSAPPDPRARTRAKTRKTTNSAPPDPRARTQAWPRKTTNSASPDSRARTPPWPLPNDLRLARPRGSGSASATEDRLDLSFGGAPTSPDLGRSPDSRFCICSRCIRLNAAQRPRSRPLASAFAPAGPPCHASAAGHQLRRRLNDFIRPSRGATSFHSTSASAKTCASTVATPVKKPYPPATVTGKPIPPIRRLRLI

SEQ ID NO: 50765 - protein, 155 aa, Zea mays
  Coding DNA Sequence Number=SeqID_8986
MGKNKKGSSSSPRSGDKRKREPTPPSEDFSNSEYSEEEFSSESEGSPAPTSPRRRVMIQMTPRGLSRRSRLTSGPSSAPGSRARMSQSTPRMRRTPWTRPRRAAAAMAETATTTEVMTTAATAAARAVTAAARAAAGAATKPVARCHWFLDISLD

SEQ ID NO: 50766 - protein, 57 aa, Zea mays
  Coding DNA Sequence Number=SeqID_8987
MKFEVLQYGMLTSEAKSLMQSTNFRVIKAERDKVVESGNRDEPKLDQGGVSIGPTHR

SEQ ID NO: 50767 - protein, 95 aa, Zea mays
  Coding DNA Sequence Number=SeqID_8988
  Homolog annotation: Hit_ID=Q108Z7; Match level="QueryCoverage=65%, HitCoverage=2%, E-value=8e-23, Identity=73%"; Hit description =Transcriptional regulator, putative, expressed
MYFAECPKKTLGKDFFAECPQGGTRQRCTAYNLIQHEVLSCVFPDVVKNTMHSSLMNYLWHINPYLTLQGFIDAHSDISCLLRTVEICEDLKEKC

SEQ ID NO: 50768 - protein, 57 aa, Zea mays
  Coding DNA Sequence Number=SeqID_8989
  Homolog annotation: Hit_ID=Q8W1D4; Match level="QueryCoverage=98%, HitCoverage=15%, E-value=1e-22, Identity=89%"; Hit description =Cinful1 polyprotein
MDLILWLLHLSEGLSKYDIRCTACINQNIVDYKSLDDTRYDVTIIVRVILELKVLWR

SEQ ID NO: 50769 - protein, 397 aa, Zea mays
  Coding DNA Sequence Number=SeqID_8990
  Gene Ontology: Mol. function=hydrogen ion transporting ATP synthase activity, rotational mechanism; Cellular component=proton -transporting two-sector ATPase complex; Biological process =intracellular signaling cascade
  Homolog annotation: Hit_ID=Q5ZDY2; Match level="QueryCoverage=71%, HitCoverage=72%, E-value=1e-115, Identity=58%"; Hit description=Leaf senescence related protein-like
  Pfam annotation: Domain name=DUF231; Domain location=269-395; Score =55.4; E_value=1.8e-13; Accession=PF03005.6; Description=Arabidopsis proteins of unknown function
MKPPASGSMCALACLFLLSAGILLAAAVYRPFQSRAAASWDPFSRVQQKEEAPAPPPLARRGSYRAAPPAPDAVSPSAGGPADWSPDDDDDADAGPPSPAPAPSEEGWGDGDEDAQCDLFDGEWVEDAAGYPLYDAAECPFLSDQVACRRNGRPDSGYERWRWQPRGCGGTTRLGGAEALELCRDKRLVLVGDSLNRNMWESLACILYAAVPDRLRTRLIDDAGSEYMIFRAMDYNCSVEFFWSPFLVKLETKDNKTKALELDQLPPMLQRTLGADVLIFNTGHWWTHTGKLRAVNWCYNQTAPISRGNIAPWFPQSLIDIIEKNIKRMKTPIVYMNITRLSELRIDAHPSIYTITHEGKPLSKEQRQQPLTYSDCSHWCLPGLPDTWNMLFVQLPN

SEQ ID NO: 50770 - protein, 107 aa, Zea mays
  Coding DNA Sequence Number=SeqID_8991
MAGVALDVNCDDLNGEEKMQQHEMTNLKTMMVSRPCYPLLFACFLPCLEVLIEMKVVAAKMKVVVAASKEKVQQDEPKAAISDVKCDNPKEEGNVQQTKSCCLKCEM

SEQ ID NO: 50771 - protein, 247 aa, Zea mays
  Coding DNA Sequence Number=SeqID_8992
  Gene Ontology: Mol. function=RNA-directed DNA polymerase activity; Biological process=RNA-dependent DNA replication
  Homolog annotation: Hit_ID=UPI00004C1733; Match level="QueryCoverage =67%, HitCoverage=17%, E-value=2e-41, Identity=85%"; Hit description =UPI00004C1733 related cluster
  Pfam annotation: Domain name=rve; Domain location=39-205; Score=48.0; E_value=3.3e-11; Accession=PF00665.16; Description=Integrase core domain
MEAYCDKVRCLEDKFYRLELNHVARQYNETADEIAKIASGGQRFTRTSSPETYINPPSRPTTHPSPRKPWPSPRYPRPPRKAPGGFTHLLVAIDKFSKWIEVRPVTSIRSEQAVAFFTNIIHRFGVPNSIITDNGTQFTGKKFLDFCEDHHIRVNWAAVAHPMTNGQHGISSLCDATTPEGFGLETSRWETWYFGCGRTPEVATSLLLPGKNSAKRVRAHVSGKADRAEGLLRLRDTDTSLVTFRKK

SEQ ID NO: 50772 - protein, 169 aa, Zea mays
  Coding DNA Sequence Number=SeqID_8993
  Gene Ontology: Mol. function=nucleic acid binding; Cellular component= intracellular; Biological process=translation
  Homolog annotation: Hit_ID=Q3LRV2; Match level="QueryCoverage=75%, HitCoverage=64%, E-value=6e-40, Identity=60%"; Hit description=Gag
MKKVVYYETDSSSPSTSGSDAASVTSKRHERKKFSKPPFFYGEDYCMWSDKMRHHLTSLHASIWDIVEFEAQVPSVEDEGYDSDEVTQIRHFNSQATTILLASLCREEYNKVQGLESAKEIWQSVDFPHTIVPLARRTSILTLIHMSPLHSLPMPLMAFKEEGAPSGRQ

SEQ ID NO: 50773 - protein, 110 aa, Zea mays
  Coding DNA Sequence Number=SeqID_8994
MAGVVRLVVNFAAMNPLFPRLYIIGRGAPSYPLGCNSKSENCGRQGTSSSGGARGAAVGGEILIIVVVRALGGVRILVSRVRTPASPEFFTATAGCALCCCRTLCDANHW

SEQ ID NO: 50774 - protein, 126 aa, Zea mays
  Coding DNA Sequence Number=SeqID_8995
MGFPGAPVPLGGPERWNWEFARAPRRVFPGEGFPGAARDAPEGGSLGEGLVAWGTGRRGRGSPGRARAGAGSGRGGGAGAGAEAARGAGKEATWGRRMGGGGEGEGKGRGKTHLGDPNSGDLDSKP

SEQ ID NO: 50775 - protein, 72 aa, Zea mays
  Coding DNA Sequence Number=SeqID_8996
MEMGRGMRARGAVPDFIARGKSQLIPAGLEPHASAGTVTGIAGGKYGDGSWARRLRREAEGAKESSRAGPTW

SEQ ID NO: 50776 - protein, 79 aa, Zea mays
  Coding DNA Sequence Number=SeqID_8997
MARWRDEELEIMPLWDVTSHMSGSDDVLSGRKTYTGSSRMCLHPVFGGMNYWHLAHEWKEDRLPYRGLAPGVLNMFSHL

SEQ ID NO: 50777 - protein, 162 aa, Zea mays
  Coding DNA Sequence Number=SeqID_8998
MAQLLAKIEEGNLKASRPLRDPTAADLFSTRIQESFFRAQLTAHIALRAHRLLDLPAFLLAVGADSEGTLEVSRLQFGSYRPAPEDPAPVPDLVPDIQAEDEAFRQFKTQGTTTDDAAVDDDDFGIPPPPPMPHRSHDHEAGSSSAAPATPPAIDPALAAIL

SEQ ID NO: 50778 - protein, 390 aa, Zea mays
  Coding DNA Sequence Number=SeqID_8999
  Gene Ontology: Mol. function=zinc ion binding
  Homolog annotation: Hit_ID=Q9M4C5; Match level="QueryCoverage=89%, HitCoverage=69%, E-value=1e-115, Identity=61%"; Hit description=VIP2 protein
  Subcellular localization annotation: CTP_CleavageSite=46; ConfidenceScore=5.12e-01
MLSPKIRSDLFNNLSICSVAVNPALFLLPVMKKLVLFTYTFPFSVREGESSPPITFHDFMGQHVFTEQVAVSAAPGTTHPCPYVAYLHPLPPLTSSSSHVPERTTDRTAYHDHWNPMVGPSDVRPMQTMQPADFHHSHWAHVPHSYAQPNSNNEQPGIPFGTRATRVDGDSQRRISVVSPSYFSNGSRPPSVPPLMPQFMRAHGSINEQYQQNSSSSLFAGAHRSGGMRPAPTPLPENPTFSLFPPGSSGHSSMETDDAGGSQFYAWERDRFAPFPLMPVDCEISWWTSQQQSHSTSEPSSAPRRLFGQWLGVGRSSPENRPPEGSSYRQMMPVDCETSWWSSQHQSHSTSEPTSAPRRLFGQWLGVSRSSPENRSPEGSSYRQMHSPRM

SEQ ID NO: 50779 - protein, 36 aa, Zea mays
  Coding DNA Sequence Number=SeqID_9000
MWVTRASGIPQQRSVHVADPPRTVDELATPSIAGAK

SEQ ID NO: 50780 - protein, 111 aa, Zea mays
  Coding DNA Sequence Number=SeqID_9001
MWGMMVWAPGTYVLSSQTMWVTRASGIPQQRSVHVADPPRTVDELATPSIAGKNLPSVLAITPSRFSTGQFQVRGVRASDCASAGDAPPWVSSAQPSRGFGGEKKNRGPEI

SEQ ID NO: 50781 - protein, 34 aa, Zea mays
  Coding DNA Sequence Number=SeqID_9002
MASSTSSSSPLARLWPSLADPKAKNFKKVITQDL

SEQ ID NO: 50782 - protein, 118 aa, Zea mays
  Coding DNA Sequence Number=SeqID_9003
MDTLPQDGDWRIVRLKIHQRHLRSLRHHPLIKILAKGAQLGEGRRVHRARRGSGEARRGRGGADIEVVWLRRGALADTGEVRRANRGRREKSSGLARERSGASSAVGERRARPVLFIE

SEQ ID NO: 50783 - protein, 137 aa, Zea mays
  Coding DNA Sequence Number=SeqID_9004
MWKSLSEGGMFAFAKHLPSEGPVRPSQLVPKTAVIWLVSRKPRASADVEVLRKFEVQVHQLTPNVVVALANYVWAVSSYDGQPSVEVFAKNYFLHWQKRKIGDKIAQFGSCSFTPRTGKTSAEVVEIVPCARNKWGN

SEQ ID NO: 50784 - protein, 84 aa, Zea mays
  Coding DNA Sequence Number=SeqID_9005
MEKDRQDAQRKKRWAPVRLVDPRREVKVARPSAKSVASASAIAFAERFISGTLTLEFATERQWLERRIERLRTQHTEAVRGKTI

SEQ ID NO: 50785 - protein, 69 aa, Zea mays
  Coding DNA Sequence Number=SeqID_9006
MAFHDGDTAFRGSCYGRVELGGSMSIVIRRNLPGEHESRWRIASVGFTEPKIFSVTVPSLAPFSDLTAT

SEQ ID NO: 50786 - protein, 95 aa, Zea mays
  Coding DNA Sequence Number=SeqID_9007
MTSVFLPRYPEPRKVPTNPRWCPLKGKCALGPFLSILVIKCQHKCLNVNQCPWMNKVQIFNKGTPRRMEEKTKHSYNTPKHQDIDFAHLFHCDSI

SEQ ID NO: 50787 - protein, 340 aa, Zea mays
  Coding DNA Sequence Number=SeqID_9008
  Gene Ontology: Mol. function=metal ion binding; Biological process =cell redox homeostasis
  Homolog annotation: Hit_ID=Q69TX4; Match level="QueryCoverage=92%, HitCoverage=94%, E-value=4e-70, Identity=47%"; Hit description=Zinc finger-like
  Pfam annotation: Domain name=PHD; Domain location=206-250; Score=0.3; E_value=0.054; Accession=PF00628.19; Description=PHD-finger
  Pfam annotation: Domain name=zf-C3HC4; Domain location=207-247; Score= 42.9; E_value=1.1e-09; Accession=PF00097.15; Description=Zinc finger, C3HC4 type (RING finger)
  Pfam module annotation: Pfam domain module=PHD::zf-C3HC4; Domain location=206-250::207-247
MSTGAGAGGGGDAVRRPRRRTWRLYWCYVCGRAVRAISYPASEVFCPRCFGRFLHEIDLPAPRPVVPPPDQFFQPPFLPHEGPRRWVIYTGATDARDDPLADTGAPLPRRRRRVPSPPPPGPGPATRRPDEDDDVDAPLPLPPPPPPLPPAVVGWDEFFAGPNGLNALIERLTQDDRPGPPPAPESAIESLPTVQVSPAHLSDGSQCPVCKEEFEIGEAARELPCKHAYHTDCIVPWLRLHNSCPVCRQELPQPADGGSQDAAREEGSGETEAPPAPGPLVMAGWAPLAWLALPRGPDGDGLARNEPDDGDARRSGVCAPAILQSFAVVAACFFILSFLV

SEQ ID NO: 50788 - protein, 49 aa, Zea mays
  Coding DNA Sequence Number=SeqID_9009
MENVVADFFWKRFHLPMEAVGATAACFGATTGAALCVLVGRMGAAELPH

SEQ ID NO: 50789 - protein, 494 aa, Zea mays
  Coding DNA Sequence Number=SeqID_9010
  Gene Ontology: Mol. function=RNA-directed DNA polymerase activity; Cellular component=intracellular; Biological process=RNA-dependent DNA replication
  Homolog annotation: Hit_ID=UPI00004C1733; Match level="QueryCoverage =99%, HitCoverage=37%, E-value=0.0, Identity=90%"; Hit description =UPI00004C1733 related cluster
  Pfam annotation: Domain name=RVT_1; Domain location=56-225; Score =137.0; E_value=5.2e-38; Accession=PF00078.17; Description=Reverse transcriptase (RNA-dependent
MPNIPRDVAEHSLDIRAGARPVKQPLRRFDEEKRRAIGEEIHKLMAAGFIKEVFHPEWLINPVLVRKKGGKWRMCVDYTGLNKACPKVPYPLPRIDQIVDSTAGCETLSFLNAYSGYHQIRMKESDQLATSFITPFGMYCYVTMSFGLRNAGATYQRCMNHVFGEHIGRTVEAYIDDIVVKTRKASDLLSDLEATFRCLKAKGVKLNPEKCVFRVPRGMLLGFIVSERGIEANPEKIAAITSMGPIKDLKGVQRVTGCLAALSRFISHLGERGLPLYRLLRKAECFTWTPKAEEALGNLKALLTNAPILVPPAAGEALLIYVAATTQVRPVYFISEVLSETKIRYPQIQKLLYAVILTRRKLRHYFESHPVTVVSSFPLGEIIQCREASGRIAKWAVEIMGETISFAPRKAIKSKVLADFVAEWVNTQLPTAPIQPELWTMFFDGSLMKTGVGTGLLFISPLGKHLCYVLRLHFPASNNVAEYEALVNGLRIAI

SEQ ID NO: 50790 - protein, 160 aa, Zea mays
  Coding DNA Sequence Number=SeqID_9011
  Gene Ontology: Mol. function=protein binding; Cellular component =integral to membrane; Biological process=transport
  Homolog annotation: Hit_ID=Q69TX8; Match level="QueryCoverage=88%, HitCoverage=68%, E-value=5e-75, Identity=94%"; Hit description =Putative transmembrane protein Tmp21
  Pfam annotation: Domain name=EMP24_GP25L; Domain location=6-70; Score= 29.8; E_value=9.6e-06; Accession=PF01105.14; Description =emp24gp25Lp24 family
MTGCDETQGHASKSLGPVTSPYGNTVHHNENATTGQFAFTTSEAGNYLACFWIDSVEKGSGTSLNLDWKIGIAAKDWDTIAKKEKIEGVELELRKLEAAVESIHHNLLYLKAREADMRTVSERTNSRVAWFSILSLGVCVAVSVLQLWHLQGFFRKKKLI

SEQ ID NO: 50791 - protein, 86 aa, Zea mays
  Coding DNA Sequence Number=SeqID_9012
  Homolog annotation: Hit_ID=Q69TX8; Match level="QueryCoverage=45%, HitCoverage=19%, E-value=3e-14, Identity=87%"; Hit description =Putative transmembrane protein Tmp21
  Subcellular localization annotation: CTP_CleavageSite=28; ConfidenceScore=5.27e-01
MAASVFPALLLGRSGGASPTGGRGRVARAPAVGDQVRLRGDPAQRRSARRLRYHVRVPPQLASHRRRQDGDNLQFGYCYAGWRSLK

SEQ ID NO: 50792 - protein, 81 aa, Zea mays
  Coding DNA Sequence Number=SeqID_9013
  Subcellular localization annotation: CTP_CleavageSite=44; ConfidenceScore=5.27e-01
MAPRLLRDDGGSQPPYGSKRTSARTQLFQQLSLRQAPSLLRRPRHHTSWVPKSLRLPHRHFITCILMLQDVDVISILVYKD

SEQ ID NO: 50793 - protein, 174 aa, Zea mays
  Coding DNA Sequence Number=SeqID_9014
  Subcellular localization annotation: CTP_CleavageSite=56; ConfidenceScore=5.01e-01
MGACRSILACCTVAFSTRLRRLQYITLTSGLSDSRMGRSIMAVASMFCPELRRYCVIAAFGELVMDLPHPRPFSLKVLLLDVTVNPIEFIDGSIELLLLLLEGGLAGEDAGLALALIFFLLVRGLLIPLPLSFCDGVATKQALFTILSTSELGSVEPWLDRPRAGRGRMLVNGR

SEQ ID NO: 50794 - protein, 140 aa, Zea mays
  Coding DNA Sequence Number=SeqID_9015
MAQLWSGVADPLPQMRKVRVARETKIEKVVKICIFFMWMDDYVKMLEGAGVVGGSGEMMASNIWDERAVANRADVTTNWDKFAAELKKMNDNMVELKKIKDNIVELKKMIHGEPMLNICDVESVMDICGGKCVDSVRVLL

SEQ ID NO: 50795 - protein, 219 aa, Zea mays
  Coding DNA Sequence Number=SeqID_9016
MAGGAEASNKFAEELAKICTKPGEVMTSHVLQEASARMLEVTEAECCRDDHIPLASGEDDSTSFLAWYFKVFPDGQNVGVVVRAMIDKNRHEPTKKKRKALLRLVDPRCEMKSLCTIAAEGSKFGATEIVVAAVSMPPLMAWVVAAVGTTSTGKAGQDAALRGIEAGIVGVVVPDVFVEDYLFEGVSEFDTHTGLASYDTYCICVLILNFFVFTDEAWM

SEQ ID NO: 50796 - protein, 173 aa, Zea mays
  Coding DNA Sequence Number=SeqID_9017
MTRSTVRVLQEGKAASDENSLYVLGSLADLQRGPNPGQDLHVIPLALSRMWRRESAEDWSVRQSPYLYIPANLHIPALAAGAACASPSLPSLRYFLVASVSLPSPAHRHLKGSFHVSVPAMSYWIGDAAMNKLSFFFSSEKKKKNNILRDALPPALLQEHYLLDPLSEQPKVA

SEQ ID NO: 50797 - protein, 73 aa, Zea mays
  Coding DNA Sequence Number=SeqID_9018
MGVSTCSTPSEHILVSEYTRLRPEHEKETMVKEEVVSQAENPPAENNFYFDICRVDLEPPATQGKPQCIIPFP

SEQ ID NO: 50798 - protein, 426 aa, Zea mays
  Coding DNA Sequence Number=SeqID_9019
  Gene Ontology: Mol. function=protein serine/threonine kinase activity; Cellular component=membrane; Biological process=protein amino acid phosphorylation
  Homolog annotation: Hit_ID=Q6I5Q6; Match level="QueryCoverage=68%, HitCoverage=59%, E-value=1e-122, Identity=72%"; Hit description =Putative serine/threonine protein kinase
  Pfam annotation: Domain name=Pkinase; Domain location=80-353; Score =162.8; E_value=8.7e-46; Accession=PF00069.15; Description=Protein kinase domain
  Pfam annotation: Domain name=Pkinase_Tyr; Domain location=80-353; Score=116.5; E_value=7.7e-32; Accession=PF07714.7; Description =Protein tyrosine kinase
  Pfam module annotation: Pfam domain module=Pkinase::Pkinase_Tyr; Domain location=80-353::80-353
MPPRRIESREVAVVKTAPSQNEAPPRESGSIRPSLVTSKHKHKPSSETAASIEPPKGSCSVAKTAKAFTFRELATATKNFRSDCLLGEGGFGRVYKGKLENGQLVAVKQLDLNGYQGNREFLVEVLMLSLLHHPNLVNLVGYCADGDQRLLVYEYMALGSLADHLLDSTPEQVPLSWYLRMKIAHGTAKGLEYLHEKANPPVIYRDLKSPNILLDEKYNPKLSDFGLAKLGPVEGKTHISTRVMGTYGYCAPEYIRTGQLTVKTDVYSFGVFILELITGRRAVDTSRPASEQILVNWVKPMLRDRKRYNELVDPHLRGEYPEKDLSQAVGVAAMCLQEEASVRPYMSDAVVALGFLAEMPAGYKHKSGPILQMKVGDPSLTGSAKQDKDAYNRQKAVAEAIEWGSLRQKQKAQSQGTVSPPEASRL

SEQ ID NO: 50799 - protein, 467 aa, Zea mays
  Coding DNA Sequence Number=SeqID_9020
  Gene Ontology: Mol. function=oxidoreductase activity, acting on the CH-CH group of donors; Cellular component=mitochondrion; Biological process=electron transport
  Homolog annotation: Hit_ID=Q75IM9; Match level="QueryCoverage=80%, HitCoverage=94%, E-value=0.0, Identity=89%"; Hit description =Putative isovaleryl-CoA dehydrogenase
  Pfam annotation: Domain name=Acyl-CoA_dh_1; Domain location=315-464; Score=211.7; E_value=1.7e-60; Accession=PF00441.14; Description=Acyl- CoA dehydrogenase, C-terminal doma
  Pfam annotation: Domain name=Acyl-CoA_dh_2; Domain location=330-453; Score=48.5; E_value=2.3e-11; Accession=PF08028.2; Description=Acyl -CoA dehydrogenase, C-terminal doma
  Pfam annotation: Domain name=Acyl-CoA_dh_M; Domain location=208-259; Score=94.9; E_value=2.5e-25; Accession=PF02770.9; Description=Acyl -CoA dehydrogenase, middle domain
  Pfam annotation: Domain name=Acyl-CoA_dh_N; Domain location=86-204; Score=113.1; E_value=7.8e-31; Accession=PF02771.7; Description=Acyl -CoA dehydrogenase, N-terminal domain
  Pfam module annotation: Pfam domain module=Acyl-CoA_dh_1::Acyl-CoA_dh_ 2::Acyl-CoA_dh_M::Acyl-CoA_dh_N; Domain location=315-464::330 -453::208-259::86-204
MGTQKKAAEWAARDAISHHQSAAAPPTAPPETGGEGRRELDATPTVLRLPITTSPAPSTDQINQARPDPKMQRWLPALLRRAAPGGGAARLFASSSLLFDDTQEQENIAPRAAAIDASNHFPRDVDLWRLMGDFNLHGLTAPEEYGGMGLGYMYHCISMEEITRASGAVGLSYGAHSNLCINQLVRHGSPEQRLKYLPKLISGEHIGALAMSEPNSGSDVVSMKCKAEKVDGGYVLNGNKMWCTNGPSAQTLVVYAKTDLAAGSKGITAFIIEKGMPGFSTAQKLDKLGMRGSDTCELVFENCFVPRENVLGEEGKGVYVMMSGLDLERLVLAAGPIGLMQACLDVVLPYVRQREQFGRPIGEFQFIQGKMADMYTSLQSSRSFVYSVARDCDNGKVDRKDCAGVILFAAENATQVALQAIQCLGGNGYINEYPTGRLLRDAKLFEIGAGTSEIRRMIIGRELFKED

SEQ ID NO: 50800 - protein, 74 aa, Zea mays
  Coding DNA Sequence Number=SeqID_9021
  Subcellular localization annotation: CTP_CleavageSite=46; ConfidenceScore=5.19e-01
MPTELRDSYASGIRIPHSSPSAKKRLSCRFDCFDSRTLKTTRVHVQTSAGGAAAPSATFPPSADPGPALDGDSG

SEQ ID NO: 50801 - protein, 146 aa, Zea mays
  Coding DNA Sequence Number=SeqID_9022
  Gene Ontology: Mol. function=ATP binding; Cellular component =membrane; Biological process=apoptosis
  Homolog annotation: Hit_ID=Q2R1P5; Match level="QueryCoverage=96%, HitCoverage=9%, E-value=1e-49, Identity=69%"; Hit description =Leucine Rich Repeat family protein, expressed
MAELASGAVSSLLGVIGNEARLLRGVRGDVQFIKEEMESMNSFLVHLARTSHTGGEHGVQVRTWMNQVRILANDCNNCIDKYVYRGNPDVHLRRSGLLRYLLWPPWFVRKMFAQHDAAGQLRVLKDRAREVGERRMRYDVKVLLNN

SEQ ID NO: 50802 - protein, 764 aa, Zea mays
  Coding DNA Sequence Number=SeqID_9023
  Gene Ontology: Mol. function=ATP binding; Biological process=apoptosis
  Homolog annotation: Hit_ID=Q2R1P5; Match level="QueryCoverage=90%, HitCoverage=60%, E-value=1e-103, Identity=44%"; Hit description =Leucine Rich Repeat family protein, expressed
  Pfam annotation: Domain name=HD; Domain location=351-437; Score=3.0; E_value=0.021; Accession=PF01966.12; Description=HD domain
  Pfam annotation: Domain name=LRR_1; Domain location=592-619; Score =4.4; E_value=43; Accession=PF00560.23; Description=Leucine Rich Repeat
  Pfam annotation: Domain name=LRR_1; Domain location=621-642; Score =8.3; E_value=7.8; Accession=PF00560.23; Description=Leucine Rich Repeat
  Pfam annotation: Domain name=LRR_1; Domain location=644-666; Score =7.3; E_value=12; Accession=PF00560.23; Description=Leucine Rich Repeat
  Pfam annotation: Domain name=NB-ARC; Domain location=257-496; Score= -117.6; E_value=0.0086; Accession=PF00931.13; Description=NB-ARC domain
  Pfam module annotation: Pfam domain module=HD::LRR_1::LRR_1::LRR _1::NB-ARC; Domain location=351-437::592-619::621-642::644-666::257 -496
MERGDVMHSAAVVAPEADQEVIALARRALAQGHRSVLVDIPQVHMDFEPLRPQEILYYILCQLQQDRASSPPQLGSLEGSPDTLVKQYLLYRSKREISHGKESLLGETEIQQDIQNVMGKLDEVKRGIQDEQLLLQLLEGIRDVKELEEKPISVLFELLVLQQQAARRDQARGKAMRKLAAWHAHILRITAESLKKYIEAEHLPQQEAEKKTAKKFDFYDARYGYVIHKVFATKASNSKRRHGHVKIQGMISKVPQDVATETEEKIDEIKKTVQEQMETGWIVRKIIENHFEDDKRPLVVILRIGDKIYESNWDENRYAFTRLEKHVAGVLTVTTTRSTQQAKESLRQQELIDSFRQGEPLDYSLAGLYHDIVLQFTSHLMSEDKNEEYSDPQIIRDILGECEQFEFCMKILAHSFYARPKRSNQELTKLRDSLQAVSPKSFEGVAAKMLKFSYNDLPKEYKSCLLYLAIFPPGRSIRRSTLVARWVVEGLINRDDWNAAVRQSDRCFEALIDRGLVDPAEISGTGKAKSCIVGNRVHGFITMIAKKQHIVETRLSQHLAQHFSIFSDVRLRASEKIRDFLQVLPKQYHFSRLKVLDLEGCKCVGTKNTSYLKDVCCNLLLLKYLNLRSTNVTQLPGEINRLHELEVLDIRHNNVHKTATRYLRLLKLKRLLAGCIDDPTLPSVELPEKIGKMEGMECSKKAKISFAAGSCPKLEKLVTNIESLSGIGNLVRLKELELKVEGDSVPAELGLGNWDIDSMGCTQP

SEQ ID NO: 50803 - protein, 139 aa, Zea mays
  Coding DNA Sequence Number=SeqID_9024
MGKSKKGGSSSHHSGDKRKRDPSPPSEDFDDSEYSEEEFSSESEGSPAYASPPVSSDDSDDSQGIAAEVWTYIRAVERSGLEGLDESEISSDEEDSSDSSEEGSGGDDDDEGDDGDKGDGGNDKDDGGSGRASGKAPPA

SEQ ID NO: 50804 - protein, 173 aa, Zea mays
  Coding DNA Sequence Number=SeqID_9025
  Subcellular localization annotation: CTP_CleavageSite=26; ConfidenceScore=5.06e-01
MDKAFLLSGNEGIVGSSLTWGRGRSSSAVGWSGQDSSLQTTRNTESCEESEMAYVSPATDDTSTDLDTDEKNQMGLPSGSLTSIFHPLVCLVDTQMAKPEYQAMETGRESKETTPRFVNVSGMAKPQPDASLSFLLPPDAAAEGLHDMILNARDDLDVLSPWSVGASACGVGR

SEQ ID NO: 50805 - protein, 82 aa, Zea mays
  Coding DNA Sequence Number=SeqID_9026
MAIYEWPDIATVLLLALLKNTASFNLCLLVVQSDFPSFNLMSFVAYGAAGEYVHVVLLPLIGLSHFFSSHMGPECIHECFLS

SEQ ID NO: 50806 - protein, 759 aa, Zea mays
  Coding DNA Sequence Number=SeqID_9027
  Gene Ontology: Mol. function=protein kinase activity; Cellular component=cell surface; Biological process=protein amino acid phosphorylation
  Homolog annotation: Hit_ID=Q6ZFS5; Match level="QueryCoverage=86%, HitCoverage=90%, E-value=1e-120, Identity=41%"; Hit description =Putative receptor-type protein kinase LRK1
  Pfam annotation: Domain name=Lectin_legB; Domain location=29-271; Score=35.7; E_value=7.8e-13; Accession=PF00139.10; Description =Legume lectin domain
  Pfam annotation: Domain name=Pkinase; Domain location=375-702; Score =117.4; E_value=4.1e-32; Accession=PF00069.15; Description=Protein kinase domain
  Pfam annotation: Domain name=Pkinase_Tyr; Domain location=375-702; Score=54.9; E_value=7.7e-16; Accession=PF07714.7; Description =Protein tyrosine kinase
  Pfam module annotation: Pfam domain module=Lectin_legB::Pkinase::Pkina se_Tyr; Domain location=29-271::375-702::375-702
MAVMSSGGLLPTLCCLCYVLSSVHVPLAASLSFHFNFSDPDSTCTAQNAELACSSDAYFHSTEDAIELTKNGMDNHNNKSVGRLVYTQPIPLWNGATGELASFTTSFTFRIKRAQPGSPSGDGMAFFLAHPPPDGCPPAASAGTWASSTTAPTGTPRATTAPWRSSSTRSRTTSWRMRMATTSASTSTPSSLPIPSRPTRASSPARPWQPTSPFDNTTETLSVTLWMSGAPYRVSANVDMRKSLPQMVAVGFAASTGNNVEMHQLLSWSFNSTLASSKDGETRPPAPSQAIVSKNKSKARSSAIAVSSAAAFVVVCALTGFLLRRKLRMWKTSKEASGAGELDDDEHDGEEAEFEKGVGPKRYSYRELAAATRNFSEETKLGRGGFGHVYQGRLNIDGQDRRVAIKKFSESSMQGRKEFEAEVKIISRLRHRNLVRLIGWCDCCKGLLIVYELVSEGSLDRHIYNAARWLTWPQRGEAISQIVWQKQLIVKSKSFPCIKVPETAKMALAFKCFSQYKIIIGLGSALRYLHAEWEQCVVHGDIKPSNIMLDSSLDAKLGDFGLARLVDHGVKPATTKVVLGTAGYIDPELVNTRRPSAVSDVYSFGVVLLELVTGRRPVEEPDDSDELFVLIRWVWRLYGRNAIAEAVDERLKLVGREGDGGGGEVEEEEERGQMERALVVGLWCAQPDRGDRPSIAHAMHVLQSADVKLPVLRPHMYASAADTVHSTIAMGGDGYSELSFGVTSTDGSDTSTTSERESK

SEQ ID NO: 50807 - protein, 111 aa, Zea mays
  Coding DNA Sequence Number=SeqID_9028
  Subcellular localization annotation: CTP_CleavageSite=53; ConfidenceScore=5.53e-01
MQGSCLTAIAAKSTKDLPTLTTPLLPLPLSGKGSRCKFSKTQSTTRVDGGLITAFLGDSSTKSTREGVLADSGRWIRDRAPRSAYSLHESVFDPSRWIPHQWPCFNEPQCE

SEQ ID NO: 50808 - protein, 147 aa, Zea mays
  Coding DNA Sequence Number=SeqID_9029
MPLLLVAASASAVAAEAAGLVDGGAGFDRAGSLGVPAWLGEQESKRGGRRGERQSQFEAGAQTAVGKWMRTAGSGGEGRGLRQGSGEGLGRRAGMASHCGGEWRGRRAEMAWTQWESALRVAVGKGGGMVKPIVERDLGGARGRDGV

SEQ ID NO: 50809 - protein, 187 aa, Zea mays
  Coding DNA Sequence Number=SeqID_9030
  Gene Ontology: Mol. function=structural constituent of ribosome; Cellular component=ribonucleoprotein complex; Biological process =translation
  Homolog annotation: Hit_ID=Q9LIT4; Match level="QueryCoverage=86%, HitCoverage=87%, E-value=6e-25, Identity=58%"; Hit description =Putative ribosomal protein L3
  Pfam annotation: Domain name=Ribosomal_L3; Domain location=78-166; Score=-80.3; E_value=0.00073; Accession=PF00297.12; Description =Ribosomal protein L3
MAAASRGLLARLRVLSLSGGGSPWLRFPPSRLFSAEAFVSHSDDDDAGGEGGGGGRIIEARSGVMGPTSRRTGVIGVKCGMSAMWDKWGAKVPITVLWVDDNVVTQVKTAEKEGFFALQGVMKRYGFGGMPASHGTSLAHRSGGSTGQRDAPGRVPGPQGSFIFVKDSIYKKPDTALLPFPTYFTRE

SEQ ID NO: 50810 - protein, 80 aa, Zea mays
  Coding DNA Sequence Number=SeqID_9031
MGRLRLRDTGMGQARIGREISGGRGEGEGRGVDHAAPMSPLVTVAAGMRRRGGRGSAGARLRAAGTGRARIGSEISDAFH

SEQ ID NO: 50811 - protein, 93 aa, Zea mays
  Coding DNA Sequence Number=SeqID_9032
  Subcellular localization annotation: CTP_CleavageSite=61; ConfidenceScore=5.48e-01
MQNHRLNQWGHRPRDALAGPVTAVEARSLTRSSRGSGGRRVRAPPTRRRRARGLAGGGHVVVDTRDSTSMGGVGDDSLGDVAGGGALMQGCFM

SEQ ID NO: 50812 - protein, 149 aa, Zea mays
  Coding DNA Sequence Number=SeqID_9033
  Subcellular localization annotation: CTP_CleavageSite=49; ConfidenceScore=5.06e-01
MGRGPCSTEPPRHEAGRRQRNHGSRLVPVPPRPGRFALPSKLLLLAVVSSSSVWSKRKQATSDCDKAGGVAGQGIKGARAVPESTAGRLAAVVKTGATVEIATLITDGLTGLKLINVPFATLNAIELMAGELDLSAGVEPLWSAWNIPV

SEQ ID NO: 50813 - protein, 543 aa, Zea mays
  Coding DNA Sequence Number=SeqID_9034
  Homolog annotation: Hit_ID=Q6H5V0; Match level="QueryCoverage=65%, HitCoverage=72%, E-value=9e-88, Identity=51%"; Hit description=WD-40 repeat protein-like
  Pfam annotation: Domain name=WD40; Domain location=421-459; Score =40.9; E_value=4.4e-09; Accession=PF00400.22; Description=WD domain, G-beta repeat
MQRHAEELFRKGTGRTTGCMRFEKTGRMSVIVVCLLPFCRSAILQPQPSIPLFCNFNRSITSRSIPHRRQSSDPIARSPPRRLEMRGMAPAPVPPTPLPSSDPLPPPQSPIRPASPNPPLPTQQPPTMFAAPPPRLASVLLTGLERRRVHKRQGRAPARPRATAAALDVWTSEPAPVQERRRKLLQMLGLAGDPALARLEMGRSVSYDDGPVPVRPAPASPPISRSRSDGGAVPASATKPPLGGRSPGSFEATPEGEEEEEADPRCLIRNLDDGSEFVVKEGSELREVGTGRQLTMEEFVDLCVGRSPIVQELMRRENVASSGSSTPVQRSNSDSSNGVTRHRRRRHSSWLRGIRNVTGSVVASSRDRRSSDDKDTCSEKGGRRSSSATDDSQDSAGAVRHDPVRVKVRQYGKSYKEFSGMFMNQEIQTHDGSIWSIRFSPDGRYLASAGEDCVIHVWEVSEFDRKREENGACNPFVAMVCNGSPEPTLAVASNVDGSNREKKRRARFLEGRRSVSSDRLMLPEHVFALSEKPIRTFMGHSED

SEQ ID NO: 50814 - protein, 144 aa, Zea mays
  Coding DNA Sequence Number=SeqID_9035
MEGESDAPDRRPSLHGRGVLSICVRAVHGRNLAVSASPLGLYRSRSYISKPPEVLPNRQLLQQLISSAASQNELKAANKQKLLFTSLSDKLLFQQAAAVPNRALEPCIEVLLTSSKLLYSNITGKLSVDVSRSYDGVLFALHDS

SEQ ID NO: 50815 - protein, 50 aa, Zea mays
  Coding DNA Sequence Number=SeqID_9036
MTVAGGQRKGKSVVDKGPTAVTVVAEKAVVTVVSSRECPVISKYRAVVHT

SEQ ID NO: 50816 - protein, 38 aa, Zea mays
  Coding DNA Sequence Number=SeqID_9037
MSASKRESTTVRLHGGPVVSAPFFQSWAALRLVNKVSI

SEQ ID NO: 50817 - protein, 146 aa, Zea mays
  Coding DNA Sequence Number=SeqID_9038
  Subcellular localization annotation: CTP_CleavageSite=65; ConfidenceScore=5.49e-01
MAKRRGSPYAQSRFLPSASSSRTAALVSARPDERRPPGLLPPPCARSAPFPTVLDKRFERVVLPSSSSNEKSSRLHVDVVDHHPRLRQAPSREDALVMATRHRLDKKESMGIWSRIETMCFARQTCVIKDVNRKPSSCFRLSRRIS

SEQ ID NO: 50818 - protein, 398 aa, Zea mays
  Coding DNA Sequence Number=SeqID_9039
MFPSSSSSSSTAIASSNAPSSDKMISDLAAVVELRPDHSIEFGTLRIYSGRVHEMQRLGYFENGVVRAPGAKDVPEPEEDIEGVPGLPPSILCSHCYVAFPQYKVKKGDKGEEALWYVAQMSSGRDLVEDFVAYYVWLLAHGWNLGKVKLRPLPFLGDRMVQSPAFTIDSRGRDVTAIVREVESEAAKIVSKYSLKTELVGSWDVRAIRSLPGGGSADARNDRGKKVKTWSEEGTSKGKAMIAATRKRKMEAKGTKRIMARPRASRCFIEEMARTCAGPREVMTSPDLWETSLLMLKVTEGAGTKTGQLVVAPVRPPANTRASEKGVSVTSLDPWVQFCAIADGGGEIVGASMAEGVPAVVARQLCYATVFADQIVSGALVNVVTRNCVPRGDGWKAK

SEQ ID NO: 50819 - protein, 162 aa, Zea mays
  Coding DNA Sequence Number=SeqID_9040
METEIARAEAQAASKLAAELELEVKSMRANHERMEAAMRVGVANALAHKGYKHFEAFDRSNEDFDAGVFYVESDVLKRSTGALYDRMWGPHGRDVVQERVDQPLAHVMRDEEVEDLARLEISLARKGADVEVGAEEQFSLAKVRAEDPMTEGTVQPSASAQV

SEQ ID NO: 50820 - protein, 54 aa, Zea mays
  Coding DNA Sequence Number=SeqID_9041
MEPFSMSTELHKFDRKRQKVTDFEAYQYSVGVDIHHTMQCLINTTLGLGPSTTA

SEQ ID NO: 50821 - protein, 149 aa, Zea mays
  Coding DNA Sequence Number=SeqID_9042
  Gene Ontology: Mol. function=metal ion binding
  Pfam annotation: Domain name=zf-C3HC4; Domain location=91-134; Score =28.0; E_value=3.3e-05; Accession=PF00097.15; Description=Zinc finger, C3HC4 type (RING finger)
  Subcellular localization annotation: CTP_CleavageSite=29; ConfidenceScore=5.38e-01
MINNSSSPPPSPAQPPTPIDPWGDTFLSRLSAVVLLLAYSSCAAVCLYHTARFLLQCLERRRAAREAQDPKPPSQAVDGAGAGAVWAEADCAICLSELDPEGGERVRVLPACGHAYHDACVQAWLATRASCPTCRAPSRSRPSRTTRAP

SEQ ID NO: 50822 - protein, 406 aa, Zea mays
  Coding DNA Sequence Number=SeqID_9043
  Gene Ontology: Mol. function=transporter activity; Cellular component= membrane; Biological process=transport
  Homolog annotation: Hit_ID=Q6H5A2; Match level="QueryCoverage=99%, HitCoverage=100%, E-value=2e-93, Identity=65%"; Hit description =Putative permease 1
  Pfam annotation: Domain name=Xan_ur_permease; Domain location=35-318; Score=-84.9; E_value=6e-05; Accession=PF00860.11; Description =Permease family
MAAAPPPKADELQPFPPKEQLPGVAFCITSPPPWPEAILLGFQHFVVMLGTTVIIPSALVPQMGGGNEEKARVVQTILFVAGINTLFQTLFGTRLPVVMGGSYVFVGPTISIVLAGRYSNEADPHEYLPQVLDFGKSVFSRFSVLFTVAIVWLYAYILTIGGAYKNSPPKTQRFVSNTLFVQSLSSLRKLDLVTPLEICECNYDSSIDYQSGRGMAGHWSVARFIFRDSERDIGFSIYCNAVFCYVHVYFHRCRGKFGALFASIPLPVFAGMYCLFFAYVGGVGLSLLQFCNLNSFRTKFIMGFAFFMGLSVPQYFNEYTAVASYGPVHTGARWFNDMINVPFTSKPFVAGLVAYILDNTLQVKESAVRKDRGNHWWEKFRSFKKDARSQEFYSLPFNLNKFFPSV

SEQ ID NO: 50823 - protein, 168 aa, Zea mays
  Coding DNA Sequence Number=SeqID_9044
  Homolog annotation: Hit_ID=Q6QP51; Match level="QueryCoverage=31%, HitCoverage=24%, E-value=3e-08, Identity=62%"; Hit description =Putative growth-regulating factor 1
MNRHRHSRHYRASSTAEPDRRHLWQAKQATLRFRHNDRVRKGTGKGDTPKGILLREGNGPRAPLLIRGSKAGPSKGFNSRLRVLGLRAHYWSEVRRSAPRKGSRAASGHSGSAPTTDQGFVGWPSKGSAAASDAERGMTLGSGAALANPAPAKPLTVSTYQSENLELD

SEQ ID NO: 50824 - protein, 232 aa, Zea mays
  Coding DNA Sequence Number=SeqID_9045
  Gene Ontology: Mol. function=DNA binding; Cellular component =nucleosome; Biological process=chromosome organization and biogenesis (sensu Eukaryota)
  Homolog annotation: Hit_ID=Q6WS85; Match level="QueryCoverage=73%, HitCoverage=57%, E-value=1e-62, Identity=76%"; Hit description =Single myb histone 1
  Pfam annotation: Domain name=Linker_histone; Domain location=63-125; Score=24.5; E_value=3.4e-05; Accession=PF00538.9; Description=linker histone H1 and H5 family
MWSGDPDRIELLTFDRFCRFGILPRLCEGVTWGPTEQLELRSHVLGMGTQNTKHYFLEPWLDDLILEAIRKLKEPSGPSKAAIAAYIEDQYWPPADFQRLLSTKLKALVNSGKLIKVNQKYRIAPSPPPSGRIGTKVSSAEGMKAENNNAKRLTKHQVIAELEKMKGMTKEEAAAFAAKAVAEAEVAIAEAEEAARVAEAAENDAEAAKAFLDAVTLSMRNRNAASMMLRAC

SEQ ID NO: 50825 - protein, 47 aa, Zea mays
  Coding DNA Sequence Number=SeqID_9046
MPHMQRKHDTAGIPGQYEPVSHHAGPELGEGIGGAAEGGVERAIGLV

SEQ ID NO: 50826 - protein, 78 aa, Zea mays
  Coding DNA Sequence Number=SeqID_9047
  Subcellular localization annotation: CTP_CleavageSite=27; ConfidenceScore=5.27e-01
MTRTPKQTENPSSGTGGTNLVKSSLARAETGTPNAYCRCFEPGGSLDRRVNCRRVPQPRWVGARRSAKGGRGAGGRQA

SEQ ID NO: 50827 - protein, 168 aa, Zea mays
  Coding DNA Sequence Number=SeqID_9048
MRKLKSKGRDENTHRRRQYFYRGIQNHARSRLILVGVPTQRVAQARAKHHALVESRGPSPRTSGALLPASSRTLHTVFNIEFLAKTPRTSFSLVHGGDRTTNAVDAVSQDSRCTWYNYNGSRKSQGVFGLSNLTHTTRNKPREIIELGGKAVYHAKAVPVRDKENKWT

SEQ ID NO: 50828 - protein, 93 aa, Zea mays
  Coding DNA Sequence Number=SeqID_9049
  Subcellular localization annotation: CTP_CleavageSite=77; ConfidenceScore=5.05e-01
MATIWNGFVPTNGTKKTRRPISGEEQRGRPGGVGLSSGRRGAASEVARERGGGAAQRAGWRRPGAQCARAGGRRRVRALVGSRKGDRKRDARD

SEQ ID NO: 50829 - protein, 67 aa, Zea mays
  Coding DNA Sequence Number=SeqID_9050
  Pfam annotation: Domain name=DUF1070; Domain location=9-67; Score =36.2; E_value=1.1e-07; Accession=PF06376.3; Description=Protein of unknown function (DUF1070)
MSSLTARLALLAYLLLATLLHPCLCHAAAAAPAARGAGNWRMDPKAIDQGVAYVLMLLALFVTYIVH

SEQ ID NO: 50830 - protein, 207 aa, Zea mays
  Coding DNA Sequence Number=SeqID_9051
  Gene Ontology: Mol. function=ion channel activity; Cellular component= integral to membrane; Biological process=ion transport
  Homolog annotation: Hit_ID=Q6ZHE3; Match level="QueryCoverage=73%, HitCoverage=28%, E-value=1e-36, Identity=45%"; Hit description =Putative cyclic nucleotide-binding transporter 1
MSRGLATTARRSLPSPVLVFVIVVVFPLALCCPSWESELVTYVELGNDDSGWALLAYVAPESRVVGAGDLVDEPKKVAIHYLRGYFLLDFFVVLPLPQVMILLVVPKVGLSAANYAKNLLRVTVLLQYVPRIIRFVPLLDDCGRGIGSGLYRQQWFNDSGAEACFNTGNDATFQYGIYEQAVLLTTEDSAVKRYIYSLFWGFQVVTI

SEQ ID NO: 50831 - protein, 125 aa, Zea mays
  Coding DNA Sequence Number=SeqID_9052
MAAWASAAARRALRRAPRRAPARLRPPIGIVPPRAPLPMCRAISHQIRTKHLATAILGAEQLLQYFDSLNPIKCWGRRDMVVDNYCKTEGVRSGWQGYAMSTIKNCSEQCNFSISRNQYMIKGLF

SEQ ID NO: 50832 - protein, 247 aa, Zea mays
  Coding DNA Sequence Number=SeqID_9053
  Gene Ontology: Mol. function=ion channel activity; Cellular component= integral to membrane; Biological process=ion transport
  Homolog annotation: Hit_ID=Q6ZHE3; Match level="QueryCoverage=99%, HitCoverage=31%, E-value=1e-114, Identity=78%"; Hit description =Putative cyclic nucleotide-binding transporter 1
MTDQERDDVPMLLRNVELPRFPLRSTSMCIPVRDDDYEEDTFVPHTGPLFVQPSTQTAPGISFTGRDTPDRLPKPSQGKQVSKPHAIMPEEIRGNKWSYSGQVPKNEHLMMSGPLGQCDNPDCVNCPPACKNRRHFQRGSNALDNKIHNILYGHSRGWKKKIEQIMACIPIMNPHAKPVQRWNQFFVISCLIAIFIDPLFFFLLSVRQDGNCIVLNWEIATALAVVRSVTDAIYFLHMLLQANILEV

SEQ ID NO: 50833 - protein, 249 aa, Zea mays
  Coding DNA Sequence Number=SeqID_9054
  Gene Ontology: Mol. function=ion channel activity; Cellular component= integral to membrane; Biological process=ion transport
  Homolog annotation: Hit_ID=Q6ZHE3; Match level="QueryCoverage=98%, HitCoverage=31%, E-value=1e-101, Identity=73%"; Hit description =Putative cyclic nucleotide-binding transporter 1
  Pfam annotation: Domain name=cNMP_binding; Domain location=107-194; Score=6.8; E_value=0.073; Accession=PF00027.19; Description=Cyclic nucleotide-binding domain
MQLRRRDVEKWMSHRRLPEDLRRRVRRAERFTWAATQGVNEEELLSNLPEDIQRDIRRHFFRFLNKEKILNVSFCDNIYIYRCTMDVRLFTLMDWPILDAICDKLRQNLYISGSDILYQGGTVEKMVFIVRGKLESISADGSKAPLHDGDVCGEELLTWYLEHSSANRDGGKIKFQAFVLRASDLEEVTSQFARFLRNPRVQGAIRYESPYWRTIAATRIQVAWRYRKRRLKRAEKSRLSEETYASLGS

SEQ ID NO: 50834 - protein, 185 aa, Zea mays
  Coding DNA Sequence Number=SeqID_9055
  Subcellular localization annotation: CTP_CleavageSite=17; ConfidenceScore=5.29e-01
MELLLVPCRAASARPLRAASPRAFRCPSARPAAASSSNAEVIDTTATTSSPDAPKQWRAGGLGLELSEELRRGMTWRMLAPPAAAVAADAAFLGLLERAQPGDLPAWAAAAGLRRALRGGAARGPLRLPVVETLVDLRNHSNSGQMTFEMLAVRWREYSIFYNEQENRTVAAAGLKGVMGEEDKN

SEQ ID NO: 50835 - protein, 156 aa, Zea mays
  Coding DNA Sequence Number=SeqID_9056
  Gene Ontology: Cellular component=chloroplast; Biological process =cell redox homeostasis
  Homolog annotation: Hit_ID=Q6Z7L3; Match level="QueryCoverage=99%, HitCoverage=100%, E-value=1e-50, Identity=59%"; Hit description =Putative hioredoxin 5
MALLAPSPRALCVREAAAASPHPHSLATAACSTVGGGVAGRALWLWNGGGTGRRRRERRERFRAEAYFWDVSKPVEMEEIDSMEKLDDALRWSVENNQPIIIDWFYFVDVNKVPQAVVKRGNVTLWKDGEWKAEVIGGHKAWLVMDEVREMIQKNK

SEQ ID NO: 50836 - protein, 694 aa, Zea mays
  Coding DNA Sequence Number=SeqID_9057
  Homolog annotation: Hit_ID=Q69T67; Match level="QueryCoverage=99%, HitCoverage=100%, E-value=1e-170, Identity=51%"; Hit description =Lustrin A-like
  Pfam annotation: Domain name=DUF231; Domain location=518-682; Score =251.9; E_value=1.4e-72; Accession=PF03005.6; Description=Arabidopsis proteins of unknown function
MKGAWRQSGVAAVAEHLGHLGGAGLVGRALPVRLCLYGLTLTFAGFAVFLCFAPSLIVPPASSPGVAWFDDGLIASASPYRAQVSGFLSSLFPAISSSTVPPGGVAVSCSRGNGSSAVRRGEQLGSGGGAPVSSKEAPVPGDATATVLSGAAPVDHVQGGAKAKHSAWSAAAESKGGPGPGLASGGSAQNVTSAKGGVPVGINGSDDTNASSVDAGDGNGVRPSARYTAGSTHQLGSGTAALVNGATASFLNQTASEVAAAMDGNGSAAAVNNQTVPIQAPADSKSHSSAASDGSNSTAANKQNESTASPQGSTSPVKDRSARGATPTASDNGDVPVEADANAGWRMKADWIENMARCDMFYGNWVRDDSYPLYPAGSCPHVDESFNCHLNGRPDKAYERLRWQPSGCRIPRLNPTDMLERLRGKRLVFVGDSLNRNMWESLICILRNSVKDKSKVFEVSGRSQFRAEGSYSFLFQEWEMPISNGKGTRETLRLDVIDPAFPRYKNADIIIFNTGHWWTHDKTSLGKDYYQEGNRVYSELDVHDAFRRALNTWAKWVDSSVNPKKTTVFFRGYSASHFSGGQWNSGGSCDKETDPITDGQYLTPYPEKMSILEEVLREMKTPVVYLNITRMTDYRKEAHPSAYRKQELTEEERQSPELYQDCSHWCLPGVPDSWNELLYAQILLKQQHAMAMQQ

SEQ ID NO: 50837 - protein, 273 aa, Zea mays
  Coding DNA Sequence Number=SeqID_9058
  Subcellular localization annotation: CTP_CleavageSite=72; ConfidenceScore=5.18e-01
MSGVPPDSVWCTTGQCPNAFNALQCASVSEQRQKAHRTVYTLPASPSILGDSNVNPSHRRTLSPSLPPLSCYAAAEAEGQRRLRHSDCSATRQSESDRQSGLAKGATANSAPPDPRARTRAKTRKTANSAPPDPRARTRAKTRKTANSAPPDPRARTRAKTRKTANSAPPDPRARTRAKTRKTANSAPPDPRARTRAKTRKTANSAPPDPRARTRAKTRKTTKLRLARPQGSDSALASAERLPPRPTPWLGLGHGNRKADSTSASEETPRRPA

SEQ ID NO: 50838 - protein, 899 aa, Zea mays
  Coding DNA Sequence Number=SeqID_9059
MPSDHFLGGRHYDHDTDLLPRRCQLDIPEQDFGAIYIGVETRTTQSTFTSPGGIWSQSDPHRRRGRLLGWSPGLDETEARVDDGGDEDDEAEEGKPMPAAGARRSTRVFMPKAAKPPQSQEHVDPATRVLRSGKRLAADRIRWDAKEAAAFHVDINHGHDQQHQKEDYPKPGLPALTKSFGLVYRRKRRRRRRHPADEVVAEDEDGSRRFGIVYTRRKGKRSKVSPLLVPQEPEVPCDIAAAIPCSSSREFASRTGFLDAHFSALVDDAVTYSGAQMLVILVDTSCSGSSHRLTGLLVPMLRWMRRSWQRGKFRNLATFIFSSGIAAAFASHGVHFVKLQCQSASALLHRPLAHCGWCVLHGSKKSEPLLSVDFSALPSYFSSLHYAVALDSMYLSAMIQHSRLLVEGSEEIYPRSPLYLESGAQSSGFAATAAGNNEPCRVVPNYMPLEQVAGLVAHGLRLKKHQRRRTMRHPRNRRRLIIARLPDNGIGMKHSTTSMQTEENVRSSRQGPPVEPVYPKAALEISLDLLENMDESDVSTPIGSARRKRSSLKSPVERMNEKVALAEVRQNIDSVQSKANLLNLQADRCWREEGAEVMLELSDTNKWCIVVKIQGITRYSLKPSDVRSYVINRHSQAYMWAVDDAWKLEFTDKWDWLLFKELHVVGRERNSQGKTIPIPGVHEVSDGMEGIVTDPFSRPVPDYIRMVDDEVGRAISRDSIYDMDSEDEQWLIQLNPADSDSNSSQRNHLSYEDFERIISIFEKDAYNNAQGKNDLSEFFYRYPALGKDDNVHAVYKYWTSKRSKRAAPLLRVFQNNLISLVCALWLTDNAEEDAALHRVAQAERAAKQAVERAIRLRNRAQSLMTNAELAAYKSVMALRIAEAARISDSSRDIVCTILD

SEQ ID NO: 50839 - protein, 93 aa, Zea mays
  Coding DNA Sequence Number=SeqID_9060
MEEEKKADAKRIADLESALPAQVELHKSEVLKLEEKLDENNFCTMEFSPLIEPYNVKDDPMLKKILAEFKVVHAAIDEALDTVLNEAAEKVLK

SEQ ID NO: 50840 - protein, 160 aa, Zea mays
  Coding DNA Sequence Number=SeqID_9061
MGCSLLPCTVKGDAGVSLVGVLLEWGAKEGKEGLLLLGAELRKGKVQEARPWGRGVPAPRELSGGAGGEGAMAATEGASASTMGKIGTTCLHGCRLEGAREVLAMDNRWRGFLLLSPMENRERCHLGETTSRGWRLGGCCPGKPERRMAWGEEVEKVDGG

SEQ ID NO: 50841 - protein, 123 aa, Zea mays
  Coding DNA Sequence Number=SeqID_9062
MGNSVVERAYIQDIEQAGIDDLDDSDDSKDEEESMEEEEDEDRYDGGKEGGKDDKVISGGGDSDKGGENRGGSGKGGNDSGGNGKCHRSFGARIPSEQGIEKDDGVNFVMTTRKRRQKINKAR

SEQ ID NO: 50842 - protein, 149 aa, Zea mays
  Coding DNA Sequence Number=SeqID_9063
MQRRHAGWLCTTALARRAARQDEGEAVIVARSRRDDDGEHAGYAEKTGRLGAVREGDRGETTSREKNAGRGRQGHEQPRVRATCATWAQSVAEDLAGVRRQCGACGWLLACGWDALLAAEWGVRGAAESSGAGVGPVGVALGRALAVGG

SEQ ID NO: 50843 - protein, 831 aa, Zea mays
  Coding DNA Sequence Number=SeqID_9064
  Homolog annotation: Hit_ID=Q43831; Match level="QueryCoverage=9%, HitCoverage=18%, E-value=4e-10, Identity=51%"; Hit description =RuBisCO large subunit-binding protein subunit beta, chloroplast
  Pfam annotation: Domain name=MFS_1; Domain location=254-672; Score= -16.6; E_value=0.0018; Accession=PF07690.6; Description=Major Facilitator Superfamily
MIVNTILKDLSDSSFHVGRVAGKSRKATSKWTKIKPVIKLEGRGLAISKIYRRVCIVQRDQLFELSPVAAVEVGIDIDDGSTLLKLASKVDSIIESLENDKQKVGVGAEISREALNHLLNLISKKMIVLTAVLGGLKYGYSAGKYEDLIASLVELLAPLSLGAACGRLWRRRTRRRRRLLRRPRRRRPSPRTANGNGGKNGGGAGSGNGGAPPQSGEETAREIQVVREAYRRETAAPAYVIPEEPPAVVELVGWYIYGFCSYFITHLLLPVLFPAIITQVAFPNSDFTPDPKYTLKGVTCSVHEMSMYQRLTKHSIVIDGSRMSPLGWSGLSWAIGILIVAPLLTQTAHHLDRGQYQSLILIAATSFGSFFCLLTGFFKTVWVFLFYILFIAGSIIVAEAVHTRNLGLMIRGLAAHDSGKHLVLRRRAAASQLSLYCTAIGGIGAALMAAFMYHMLRRTDQLTGLWVVSIFCGLIWFIGICHGLFTNRPSSSSPTTAFEPNFFTKLSYSMTLLRYPQAIGSLVAVFLSSFATMCIFTSGTLYAIGGVCIKPVLVLALWILYFLFPLISLPLLHPIQIIIRADAVRMQLLGFIICLFVSGAGFYFKSHRWRAAHIIVIALVQSTANGILYAFGRILLLDASPPGKEGAFSVWYAFVRVTGAMIGFAASSAGPGRAGGSFAAAFLGSFLGIIVLIFGNVSNIGALKAAGHLKGMDDEKRMGGLGMEKGEGMGSAVADSGESRGRVVVLSKYADVNYKLVRLSFNRIRTPAPAIHKDKILYKPEEEDDPATSRTVRCDTGKAPLLCLESRPSSPELRMVHAATDGNARRYTPSD

SEQ ID NO: 50844 - protein, 126 aa, Zea mays
  Coding DNA Sequence Number=SeqID_9065
  Homolog annotation: Hit_ID=Q6QP51; Match level="QueryCoverage=97%, HitCoverage=55%, E-value=8e-10, Identity=45%"; Hit description =Putative growth-regulating factor 1
MTCRSEPWVRRGRGSSEVEVESVFQGRGRVRAPGRVRRRPSSEAKARVRALGSDEAEFIIFRGRGRGRALGSGEAELPMAHEAGLGCCQPHSIEWHNSRSDAGGTVFLSGRSVERRSDCGHFGSVD

SEQ ID NO: 50845 - protein, 114 aa, Zea mays
  Coding DNA Sequence Number=SeqID_9066
MAVIEKGEGGPTRQAAAPDPTRQGNSVGGGRRERRCRAGSGDVRQQPTHQSRKYDKSRGGARRAPVAASATGEDVAISRGRVRGGGLGGRRWQGRWLAAIGRRVVAARGGREKP

SEQ ID NO: 50846 - protein, 156 aa, Zea mays
  Coding DNA Sequence Number=SeqID_9067
  Gene Ontology: Mol. function=protein binding; Biological process =multicellular organismal development
  Homolog annotation: Hit_ID=Q5NBT9; Match level="QueryCoverage=79%, HitCoverage=11%, E-value=5e-59, Identity=88%"; Hit description =Putative CTV.2
  Pfam annotation: Domain name=LisH; Domain location=6-32; Score=20.2; E_value=0.0056; Accession=PF08513.1; Description=LisH
MSSLTRDIVFLVLQFLDEEKFKETMHKFEQESGFFFNMKYFEAKGHAGDWDEVEKYLSGFTKIDDNNYSMKIFFEIRKQKYLEALDRHDGAKALDILVKDLKVFSTFNEESYKEITQLLTFENFRFVHLAFSIHGIRSLQSIYNKYFLELLTPSMF

SEQ ID NO: 50847 - protein, 276 aa, Zea mays
  Coding DNA Sequence Number=SeqID_9068
  Subcellular localization annotation: CTP_CleavageSite=100; ConfidenceScore=5.42e-01
MERAKRLPPPLPDAYRTPARAKPPHARLSPAFASNLTPVSQSPRTRRYRTPAVAAKSAATNRPHASLPPPYARLPARNPATTAIWLPALRNPATPLRPLRACRNRCDPPALLNPPARRNLAARPPSSIARPPQSGRPPARHDRRDPVQRQMQEKRVHKHVETLDANQCSARTGTATRGPLRRRCRSMNDFAAARLATRVHDDVELACDHLHAVEVLLVLDEASNGWSQELPASHAATAGGRGGDASAGADTSLPPWFNRRFLEVGSAKTYTVEATT

SEQ ID NO: 50848 - protein, 102 aa, Zea mays
  Coding DNA Sequence Number=SeqID_9069
MAFRSHYTLQEMLWQTARANQEPEDSTQNSWNNRESGQSSGRFCQDDGTWRRELYKDSRGTQTSSEPTSRNLQSNKKSQAQQKVVKKLLVSDRRGKLSGVAS

SEQ ID NO: 50849 - protein, 87 aa, Zea mays
  Coding DNA Sequence Number=SeqID_9070
MNQDIPLDVSQKVLATVEGGTAAHFLRREAPRHDTKDAVVKSARVDYGGYPFRSVLTTMWFTGKRMGSRWRVAVQGEMVKKARRFYG

SEQ ID NO: 50850 - protein, 595 aa, Zea mays
  Coding DNA Sequence Number=SeqID_9071
  Gene Ontology: Mol. function=enzyme inhibitor activity; Cellular component=cell wall; Biological process=cell wall modification
  Homolog annotation: Hit_ID=Q1SFY8; Match level="QueryCoverage=90%, HitCoverage=92%, E-value=1e-139, Identity=47%"; Hit description =Pectinesterase; Pectinesterase inhibitor
  Pfam annotation: Domain name=PMEI; Domain location=49-225; Score =110.3; E_value=5.6e-30; Accession=PF04043.6; Description=Plant invertasepectin methylesterase inhibitor
  Pfam annotation: Domain name=Pectinesterase; Domain location=284-578; Score=657.2; E_value=1.3e-194; Accession=PF01095.10; Description =Pectinesterase
  Pfam module annotation: Pfam domain module=PMEI::Pectinesterase; Domain location=49-225::284-578
MASSSSTTATTSCCPLLLALLWVLMAAHRGHAAAVFTGLVFESPGEAEAFEDALLRQACFNVSFFLSAGGRREACVSRLDTARGGAGSGPVPVLRAALRDTLGEAVGAAGAVRGLASLSNHAREEVALRDCVELLGYSVDELGWALDAMAADDTDDGGGLELLDSPGRRSASSRAENDIHAWLSAALGNQDTCVAGFHGTDGRLLRRVEAAVAQLTQLVSNLLAMHKRLRSITPLRHGPPKSNSASSGAGDDELPPWVMDVEDEEELVAKRARRAGRTSSTRVDVVVAQDGSGRYRTVSEAVARAPSHSKRKYVIYVKRGEYHENVEVRKKKTNIVIVGEGMGETVISGSRSFSSGWTTFRSATFAVSGAGFIARDLTFRNTAGPAAHQAVALRVDSDRSAFFRVAVEGHQDTLYAHSLRQFYRDCRIAGTVDFVFGNGIVVVQRSLVATLPLAPGQTGSVTAQGRKDPNQNTGFSFHGCVLEAKYPTYLGRPWKPFSRVVVMESYLGSGIQARGWLEWAAAGSGDHSPGLATLFYGEYRNYGPGAGVAGRVKWPGYHVIMDAAVASRFTVRRFIDGLAWLPGTGITFTADLFRR

SEQ ID NO: 50851 - protein, 127 aa, Zea mays
  Coding DNA Sequence Number=SeqID_9072
MKDCHTRARAAAAAGRAVAVARGDVWFKKYNINDNGNGLYSITSGKPAAEPSVWRDGQQEQDPREGMRHREDCGRRARALGVGRVSIIYVIGWLAGCIQTHGVPLTLRSFCLVNRRGGWQPVPAHAA

SEQ ID NO: 50852 - protein, 332 aa, Zea mays
  Coding DNA Sequence Number=SeqID_9073
  Gene Ontology: Mol. function=protein transporter activity; Cellular component=membrane; Biological process=intracellular protein transport
  Homolog annotation: Hit_ID=Q5S1U0; Match level="QueryCoverage=82%, HitCoverage=78%, E-value=4e-77, Identity=93%"; Hit description =Syntaxin related protein
  Pfam annotation: Domain name=SNARE; Domain location=251-313; Score =94.0; E_value=4.4e-25; Accession=PF05739.9; Description=SNARE domain
  Subcellular localization annotation: CTP_CleavageSite=75; ConfidenceScore=5.18e-01
MSFQDLEAGHVRGAPPGGGRRSGRAGGAGAGAGASQAVASGVFQINTAVATFQRLVNTLGTPKDTPDLRDRMCVRSPTRLPALPFAPQPVPIAVPLIPICFGIADSARSAFGPPGKLRFVPVVDRGCVGSCRKWLTHRLLLPMVAWGLTFLPPILLEIASATKKIADAKLAKDFQAVLKEFQKAQRLAAEREAAYAPFISQAGLPQSYNSSEVNNGADRLAEQRTQLLESRRQELVFLDNEIVFNEAIIEERDQGIQEIQHQITEVNEIFKDLAVLVHDQGAMIDDIDSHIENAVVATSQAKGQLSKAAKTQKSNSSLGRFVSENLRIICVF

SEQ ID NO: 50853 - protein, 209 aa, Zea mays
  Coding DNA Sequence Number=SeqID_9074
  Gene Ontology: Mol. function=RNA binding; Cellular component =cytoplasm; Biological process=regulation of translation
  Homolog annotation: Hit_ID=Q9T0G5; Match level="QueryCoverage=57%, HitCoverage=16%, E-value=1e-23, Identity=50%"; Hit description =Putative DNA-directed RNA polymerase
  Pfam annotation: Domain name=KH_1; Domain location=110-162; Score =37.4; E_value=4.8e-08; Accession=PF00013.19; Description=KH domain
  Pfam annotation: Domain name=KH_1; Domain location=18-80; Score=50.4; E_value=6.1e-12; Accession=PF00013.19; Description=KH domain
  Pfam annotation: Domain name=KH_2; Domain location=110-163; Score =2.3; E_value=0.063; Accession=PF07650.7; Description=KH domain
  Pfam module annotation: Pfam domain module=KH_1::KH_1::KH_2; Domain location=110-162::18-80::110-163
MGPLSHNYLLRVAHLSNPLMVDIRVGVIIGKAGETIRYIQLQSGSKIQVTRDHEAEPGALTRQVELSGKPEQISKAEQLIKEVLAEADVGSSGVGSGGRKYNATQQGAETFQMKIANNKVGLIIGKGGETIKSMQTNSGARIQSSISDGGLSQDAKQCRNLKFLHTEGCLSITKASLRALVQYAKRLESLTLGSYPQIEQHDIFSLLMN

SEQ ID NO: 50854 - protein, 140 aa, Zea mays
  Coding DNA Sequence Number=SeqID_9075
MEVAAAGRYSLPSLPSVGPLRRGEGEPGRLARPAARWDRGRASGPAGQDVEGRPTPAVPSPSEEGGELGDGFGELVVDGPWTCGAQARRRPRGARAERVLPTAWRANGAWLMTDWNDGAMTMRPPWALKGQGCADRGEQQ

SEQ ID NO: 50855 - protein, 476 aa, Zea mays
  Coding DNA Sequence Number=SeqID_9076
MRESEELDIEIAKPAGSLVEEMDVGRSVCSPAVEIEGFAERVGSSTIAPSPCIPSHDMNLQSLPVATGAPYPASMAPSSSAFSTVTTHGCFPYSTPSTAHPSLSGILPCNNNMISYSVLPEEPSGGIFSGQSPEGCADPGDIDYRVESQQIPGPGRTVDESDNRDEWFVPTDITWNWHQMAESAPVPSYPNSKSWQHDEQHMNFGTVSLSPYKVLLAFYCAKPKAILDIMNVEGLTRDQVKSHFQKYKLQVKQHPSEVPGTSVEMTMRSEAIPSDVQKFVTTRKNKAFANYHLCHHRHFYKKSLIFLCNQPGVHLTRHIQDYALQVQVEFQKKLHDMVESTMLETSRSSEQGRALQRDGDDDAVSEPEPIGGRYVPVLGHGDREDLVRGGDRGGHEDLAPMLVYDDGRDDHDGLAPVLVHGGRGDHDDLPPVHHRGHEHDENPTAAPPGRDDHGGGDEGSERRQEHRPAPDARSAP

SEQ ID NO: 50856 - protein, 90 aa, Zea mays
  Coding DNA Sequence Number=SeqID_9077
MTREQTKFGLSNVPRRRSHGVGLGSSNQWRWSQAARIERQTTIDIDGDLRGKLERRTVVQRAVGWVPAARAREATVMLLEAGGCHGHIKR

SEQ ID NO: 50857 - protein, 43 aa, Zea mays
  Coding DNA Sequence Number=SeqID_9078
MEMLKKNHKRPLCEALSRSKMVTKELIYPPTMYFTDKHTHIFS

SEQ ID NO: 50858 - protein, 315 aa, Zea mays
  Coding DNA Sequence Number=SeqID_9079
  Gene Ontology: Cellular component=cytoskeleton; Biological process =regulation of actin filament polymerization
  Homolog annotation: Hit_ID=Q01CA0; Match level="QueryCoverage=44%, HitCoverage=46%, E-value=1e-08, Identity=31%"; Hit description=[Z] KOG2826 Actin-related protein Arp2/3 complex
  Pfam annotation: Domain name=P34-Arc; Domain location=52-277; Score= -96.9; E_value=0.00063; Accession=PF04045.5; Description=Arp23 complex, 34 kD subunit p34-Arc
MAFFSSGSRVLVEILTRMQSAERPMPVDHTFFESGSIRYHVEASASDPENVFLSISTPSLSYDYEEAAAAPSSSRLPELTLQEARKTYHRFAEMVEPPREGYVLTLKLNFSGLTRPKDRVKAINQVSLLQSVVLSSQLKHMLGSLGSSGTMRLVYNNQREPFFVSKTAEKINAIFPMRFRDDTDLAIATSFFQELQEVGNSFARAPKCSWSPIPPPELRGENVHHLTTNGGFVSFVVKKRSKRRLASLAKASDRVRKGFRAVLDKMKRLRLRVRVKGLDRLRRQFRCRCFAVPRLPAPSRTGRRKEHYRYHKLAE

SEQ ID NO: 50859 - protein, 262 aa, Zea mays
  Coding DNA Sequence Number=SeqID_9080
  Gene Ontology: Mol. function=calcium ion binding; Cellular component =membrane; Biological process=homophilic cell adhesion
  Homolog annotation: Hit_ID=Q1IQY9; Match level="QueryCoverage=51%, HitCoverage=25%, E-value=3e-12, Identity=35%"; Hit description =Hypothetical protein precursor
MTATKKVCHIIRFRILFLFLFLSLTTGTGKGDTPKGILLREGNGPRAHLLIKGSKAGPSEGFNSRLRALGLRAHYWSEVRRPAPRKGSTAASGHSGSAPTTDQGGNDLVTESHQREASSPRTPSKGDQPSPASSAIGNSASPNPRARTRAQPRKTTNSASPDLRARTRAQPRKTTNSASPDPRARTRAQPRKTTNSASPDPRARTQPWPQPTVSASPDPGARTRPRPQKTDSTSTSEEPPPRLTQGSDRPRHRRGHHYPTPS

SEQ ID NO: 50860 - protein, 105 aa, Zea mays
  Coding DNA Sequence Number=SeqID_9081
MEEELVATRQARGIVLMVAENFVCRVVVVVLGCHLTDKYSWGAGSLRMARERSSAAVGALACSSSRAARALLYPQPEEEDHLATVRSGLRMGLDPELTQCEPSIS

SEQ ID NO: 50861 - protein, 139 aa, Zea mays
  Coding DNA Sequence Number=SeqID_9082
MDSTCARAERSCRGAAAPLRHCCTLAVELHWRSSRPRALEIRRRAPRVNRLQAVGINWWSGTSSVAREEGALGKSVAASPARAAGAGLLAWLRQSHAKRAGQRDFGGRARGHGERWLEMCCSRRRLLALLEEGDGGDRP

SEQ ID NO: 50862 - protein, 253 aa, Zea mays
  Coding DNA Sequence Number=SeqID_9083
MAAAARANHDCANKWARWWGSKGGGAATGDQAMGVHGPCVERVAGRPSRRGGEMGGESVTPGFWGHPRPEREYFISSARAALDDEHVGAPTATELRSRAILRDPTPKSTCCMHNRVGYGQRLVAQKQIVDGDTSGSFPDSARFTSDSAASMKGKEMGTDSGSAPEDDELRLARPQGSDSGSAPEDDELRLAQPQGSDSALASADGLRLTRPRGSDSTSASEDRLDLDLGGASASPNPGLGPTTSQEGPSLPYP

SEQ ID NO: 50863 - protein, 127 aa, Zea mays
  Coding DNA Sequence Number=SeqID_9084
  Gene Ontology: Mol. function=nucleic acid binding; Cellular component= intracellular; Biological process=DNA integration
  Homolog annotation: Hit_ID=Q3LRV2; Match level="QueryCoverage=68%, HitCoverage=37%, E-value=1e-42, Identity=94%"; Hit description=Gag
MSGEHAKNEMDTGDKPTTSHGKASSGESRNKGKGRRRSLLPTSKPPTFDGEDYARWSDLMRFHLTSLHKSIWDVVEFGVQAPSVGDEDYDEDEVAQIEHFNSQATTILLASLSREEYNKVQGLKSAK

SEQ ID NO: 50864 - protein, 173 aa, Zea mays
  Coding DNA Sequence Number=SeqID_9085
  Gene Ontology: Mol. function=hydrolase activity, acting on ester bonds; Cellular component=cell surface; Biological process=D-amino acid catabolic process
  Homolog annotation: Hit_ID=A0AFE5; Match level="QueryCoverage=90%, HitCoverage=32%, E-value=2e-17, Identity=34%"; Hit description=, complete genome
PSKFARQRMTKSPAEQVCETERTTKSPVEQVYEAERMTKSHAEQVYKVEQMTTKSPAEQVYGAERTTKSHAEQVYEVDQMTKSSTEQVCETERTTKSPTEQVYGAERTTKSHVEQVYEAERMTKSPAEQVCETERTTKSPAEQVYETECTTKFPAEQVYKADRTTKLCQTQSY

SEQ ID NO: 50865 - protein, 480 aa, Zea mays
  Coding DNA Sequence Number=SeqID_9086
  Homolog annotation: Hit_ID=Q9SLZ6; Match level="QueryCoverage=43%, HitCoverage=41%, E-value=2e-82, Identity=75%"; Hit description=OsPK4
  Pfam annotation: Domain name=Pkinase; Domain location=35-310; Score =174.2; E_value=3.2e-49; Accession=PF00069.15; Description=Protein kinase domain
  Pfam annotation: Domain name=Pkinase_Tyr; Domain location=35-231; Score=-42.6; E_value=7.5e-10; Accession=PF07714.7; Description =Protein tyrosine kinase
  Pfam module annotation: Pfam domain module=Pkinase::Pkinase_Tyr; Domain location=35-310::35-231
MAATPPLSWDASLQPRRSASSSGPAKRGGLLLGRYELGRLLGHDTFAKVYHARHADDTGETVAIKVLDKEKALRNGLVPHIKREIAILRHVRHPNIVRLFEVMATRSKIYFTMEFVRGGELFARVAKGRLKEDTARRYFQQLISAVGFCHAHGIFHRDLKPENLLVDERGDLKVSDFGLSAVADQFHPDGLLYTFCGTPSYVAPEVLARRGTKRIRLLRDALRPLVLAQRLLAAYARSGSLASRRRSRVLTIPSPPPSLDLTPPHVSAARADILVHGGRRGWVRHAEAFEALPKERATNRGKFAALQQSIQSYLGVCGPFLPSPPSHWDLVIASRGLQQRARSSRRLGQLGACSTGRRPSWCLVLQPLRLTIETKHMYYIECELSVDDFLCVDDYKINIFDSNEDQFDNPHGIGQLITLSKILEMSLFTCQTCLQQYGHHPLSIWGQNVHFRTVVGQLEGQRTLEITASLQPLPCWFGFE

SEQ ID NO: 50866 - protein, 144 aa, Zea mays
  Coding DNA Sequence Number=SeqID_9087
  Homolog annotation: Hit_ID=O80377; Match level="QueryCoverage=17%, HitCoverage=8%, E-value=1e-07, Identity=100%"; Hit description=40S ribosomal protein SA
MVHCKITIALLYILLLLSLRHTPGTFTNQLQTSFSEPRLLILTDPGLVTRSIFFLLQDIEEAKEKEEEEALVAPGYGAVAEYTAPRADNWGDEWGAGEGEAVRLQLHLLASRLLVQTGLLLQLLPLMRDDVWDAAAPPPAAAAA

SEQ ID NO: 50867 - protein, 232 aa, Zea mays
  Coding DNA Sequence Number=SeqID_9088
  Gene Ontology: Mol. function=3-oxo-5-alpha-steroid 4-dehydrogenase activity; Cellular component=integral to membrane
  Homolog annotation: Hit_ID=Q1S3A5; Match level="QueryCoverage=60%, HitCoverage=42%, E-value=2e-47, Identity=63%"; Hit description=3-oxo- 5-alpha-steroid 4-dehydrogenase, C-terminal
MALRGSIQMDTGSGPALQYLLCLAWVAATLPIAAAALPIPAAAGGRFIHGLLCAFSSRGKTVRPSSSSSSKAVLRRLYETEHVFHYSPSAQMHIIGYLTGIFYYVAAPLSLASSCLPEAIQYLRYQIAEFIVKGRARMPDLSIDPSHLLKPLLKLGWCQWIGAVIFIWGSLHQIRCHAILGSLREHKDSDEYVIPCGDWFSLVSCPHYLAELGLGAWDIGMDSLFVDEGASK

SEQ ID NO: 50868 - protein, 1169 aa, Zea mays
  Coding DNA Sequence Number=SeqID_9089
  Gene Ontology: Mol. function=protein serine/threonine kinase activity; Cellular component=integral to membrane; Biological process=protein amino acid phosphorylation
  Homolog annotation: Hit_ID=O65510; Match level="QueryCoverage=96%, HitCoverage=97%, E-value=0.0, Identity=52%"; Hit description =Putative receptor protein kinase
  Pfam annotation: Domain name=LRRNT_2; Domain location=36-77; Score =52.1; E_value=1.8e-12; Accession=PF08263.3; Description=Leucine rich repeat N-terminal domain
  Pfam annotation: Domain name=LRR_1; Domain location=108-130; Score =8.4; E_value=7.8; Accession=PF00560.23; Description=Leucine Rich Repeat
  Pfam annotation: Domain name=LRR_1; Domain location=132-155; Score =14.2; E_value=0.48; Accession=PF00560.23; Description=Leucine Rich Repeat
  Pfam annotation: Domain name=LRR_1; Domain location=157-176; Score =8.3; E_value=8.1; Accession=PF00560.23; Description=Leucine Rich Repeat
  Pfam annotation: Domain name=LRR_1; Domain location=179-201; Score =13.5; E_value=0.75; Accession=PF00560.23; Description=Leucine Rich Repeat
  Pfam annotation: Domain name=LRR_1; Domain location=204-226; Score =16.1; E_value=0.13; Accession=PF00560.23; Description=Leucine Rich Repeat
  Pfam annotation: Domain name=LRR_1; Domain location=228-250; Score =15.3; E_value=0.22; Accession=PF00560.23; Description=Leucine Rich Repeat
  Pfam annotation: Domain name=LRR_1; Domain location=252-274; Score =4.4; E_value=44; Accession=PF00560.23; Description=Leucine Rich Repeat
  Pfam annotation: Domain name=LRR_1; Domain location=276-299; Score =14.9; E_value=0.29; Accession=PF00560.23; Description=Leucine Rich Repeat
  Pfam annotation: Domain name=LRR_1; Domain location=303-323; Score =3.9; E_value=53; Accession=PF00560.23; Description=Leucine Rich Repeat
  Pfam annotation: Domain name=LRR_1; Domain location=326-348; Score =8.5; E_value=7.2; Accession=PF00560.23; Description=Leucine Rich Repeat
  Pfam annotation: Domain name=LRR_1; Domain location=350-372; Score =14.8; E_value=0.31; Accession=PF00560.23; Description=Leucine Rich Repeat
  Pfam annotation: Domain name=LRR_1; Domain location=374-396; Score =5.5; E_value=26; Accession=PF00560.23; Description=Leucine Rich Repeat
  Pfam annotation: Domain name=LRR_1; Domain location=398-420; Score =16.4; E_value=0.11; Accession=PF00560.23; Description=Leucine Rich Repeat
  Pfam annotation: Domain name=LRR_1; Domain location=422-444; Score =14.5; E_value=0.39; Accession=PF00560.23; Description=Leucine Rich Repeat
  Pfam annotation: Domain name=LRR_1; Domain location=446-468; Score =1.1; E_value=1.8e+02; Accession=PF00560.23; Description=Leucine Rich Repeat
  Pfam annotation: Domain name=LRR_1; Domain location=470-492; Score =20.3; E_value=0.007; Accession=PF00560.23; Description=Leucine Rich Repeat
  Pfam annotation: Domain name=LRR_1; Domain location=494-516; Score =11.8; E_value=1.8; Accession=PF00560.23; Description=Leucine Rich Repeat
  Pfam annotation: Domain name=LRR_1; Domain location=518-541; Score =13.7; E_value=0.68; Accession=PF00560.23; Description=Leucine Rich Repeat
  Pfam annotation: Domain name=LRR_1; Domain location=543-565; Score =14.1; E_value=0.49; Accession=PF00560.23; Description=Leucine Rich Repeat
  Pfam annotation: Domain name=LRR_1; Domain location=567-589; Score =17.0; E_value=0.069; Accession=PF00560.23; Description=Leucine Rich Repeat
  Pfam annotation: Domain name=LRR_1; Domain location=591-613; Score =14.9; E_value=0.29; Accession=PF00560.23; Description=Leucine Rich Repeat
  Pfam annotation: Domain name=LRR_1; Domain location=615-637; Score =20.9; E_value=0.0045; Accession=PF00560.23; Description=Leucine Rich Repeat
  Pfam annotation: Domain name=LRR_1; Domain location=639-661; Score =20.9; E_value=0.0044; Accession=PF00560.23; Description=Leucine Rich Repeat
  Pfam annotation: Domain name=LRR_1; Domain location=663-685; Score =11.1; E_value=2.4; Accession=PF00560.23; Description=Leucine Rich Repeat
  Pfam annotation: Domain name=LRR_1; Domain location=687-709; Score =18.7; E_value=0.021; Accession=PF00560.23; Description=Leucine Rich Repeat
  Pfam annotation: Domain name=LRR_1; Domain location=711-730; Score =7.4; E_value=12; Accession=PF00560.23; Description=Leucine Rich Repeat
  Pfam annotation: Domain name=LRR_1; Domain location=84-106; Score =3.7; E_value=59; Accession=PF00560.23; Description=Leucine Rich Repeat
  Pfam annotation: Domain name=Pkinase; Domain location=855-1143; Score= 62.6; E_value=1.3e-15; Accession=PF00069.15; Description=Protein kinase domain
  Pfam annotation: Domain name=Pkinase_Tyr; Domain location=855-1145; Score=9.6; E_value=4.7e-13; Accession=PF07714.7; Description=Protein tyrosine kinase
  Pfam module annotation: Pfam domain module=LRRNT_2::LRR_1::LRR_1::LRR_ 1::LRR_1::LRR_1::LRR_1::LRR_1::LRR_1::LRR_1::LRR_1::LRR_1::LRR_1: LRR_
  Pfam module annotation: Pfam domain module=LRR_1::LRR_1::LRR _1::Pkinase::Pkinase_Tyr; Domain location=36-77::108-130::132 -155::157-176::179-201::204-226::228-250::252-274::276-299::303 -323::326-348::350-372::374-396::...
  Pfam module annotation: Domain location=398-420::422-444::446 -468::470-492::494-516::518-541::543-565::567-589::591-613::615 -637::639-661::663-685::687-709::711-730::84-106::855-1143::855-1 45
MPLSRSLFLLLMLALAPLASLAAPAPAPPVARTAGVQAEIDALLAFRRGLRDPYGAMSGWDAASPSAPCSWRGVACAQGGAGGRVVELQLPRLRLSGPISPALGSLPCLERLGLRSNDLSGAIPASLARVTSLRAVFLQSNSLSGPIPPSFLANLTNLDTFDVSGNLLSGPVPVSFPPGLKYLDLSSNAFSGTIPANIGASMANLQFLNLSFNRLRGTVPASLGNLQNLHYLWLDGNLLEGTIPAALANCSALLHLSLQGNSLRGILPSAVAAIPTLQILSVSRNQLTGTIPAEAFGGQGNSSLRIVQLGRNEFSQVDVPGGLAADLRVVDLGGNKLAGPFPTWIAGAGGLTLLDLSGNAFTGELPPAVGQLSALLELRLGGNAFAGAVPAEIGRCSALQVLDLEDNHFTGEVPSALGGLPRLREVYLGGNTFSGQIPATLGNLAWLEALSIPRNRLTGRLSRELFQLGNLTFLDLSENNLTGEIPPAVGNLLALHSLNLSGNALFGRIPTTIGNLQNLRVLDLSGQKNLSGNVPAELFGLPQLQYVSFSDNSFSGDVPEGFSSLWSLRNLNLSGNSFTGSIPATYGYLPSLQVLSAAHNHISGELPAELANCSNLTVLELSGNQLTGSIPRDISRLGELEELDLSYNQLSGKIPPEISNCSSLTLLKLDDNHFGGDIPASVASLSKLQTLDLSSNNLTGSIPASLAQIPGLLSFNVSHNKLSGEIPAMLGSRFGSSSAYASNSDLCGPPSESECGVYRRRRRRQRVQRLALLIGVVAAAALLVALFCCCCVFSLMGWRRRFVESRDGVKKRRRSPGRGSGSSGTSTENGVSQPKLIMFNSRITYADTVEATHQFDEENVLSRGRHGLVFKACYSDGTVLAILRLPSRSADGAVVIDEGSFRKEAESLGKVKHRNLTVLRGYYAGPPPDVRLLVYDYMPNGNLATLLQEASHRDGHILNWPMRHLIALGVSRGLAFLHQSGVVHGDVKPQNILFDADFEPHLSDFGLEPMVVTAAAAAASTSAATATPPVGSLGYVAPDAAAAGQATREGDVYSFGIVLLELLTGRRPGMFAGEKEEEEEEDIVKWVKRQLQRGAVAELLEPGLLELDPESSEWEEFLLGIKVGLLCTASDPLDRPAMGDVVFMLEGCRVGPDIPSPSSADPTSQPSPA

SEQ ID NO: 50869 - protein, 96 aa, Zea mays
  Coding DNA Sequence Number=SeqID_9090
MPLGAASPIEGVMFPSFVFRGRKPGPPRTGNDGIPDVTPFLKASLLKGCGSATMMCGDPPLLRGLVCFEDEVFGGGGAVDHGFGSLAGEESELYRE

SEQ ID NO: 50870 - protein, 229 aa, Zea mays
  Coding DNA Sequence Number=SeqID_9091
  Subcellular localization annotation: CTP_CleavageSite=33; ConfidenceScore=5.00e-01
MGGRWMAGALFLVACDGYQASSQRRDGDGRWIRGSGARSGGTVPSLVPLVVPSLSPRLGYPIGRIVSFGMVAIGRIVSFGMVAVVVSAGPVGAARWWTGDICWWWRGCVISAAGTRRGGSRAGRPACSSWCRGCGVWVRSGPLAAGDGCVGNDDGGLGLVRGDNRAAVRSGGSGSSMVVCGVAVAARDGQRVVWREMLPPLDQDRGPTGGGDDRRCFATIMAVGTSLAL

SEQ ID NO: 50871 - protein, 60 aa, Zea mays
  Coding DNA Sequence Number=SeqID_9092
  Subcellular localization annotation: CTP_CleavageSite=25; ConfidenceScore=5.29e-01
MSAAEAAGAGAVPRAVVFPVPGGVLTVHGGSTTQAPCWVTGTRFHVGRRLMTGAFTPAWA

SEQ ID NO: 50872 - protein, 43 aa, Zea mays
  Coding DNA Sequence Number=SeqID_9093
MAAAMNNNETTTIELPNCGQQKKWATIYSAGRLLNHEGTPVYM

SEQ ID NO: 50873 - protein, 158 aa, Zea mays
  Coding DNA Sequence Number=SeqID_9094
MVKSPETGQERPLGGLGSPGLAGTDGEGPANSLVELQPPERDRRRENGGGGARGGSGELGVLRLGLALVREGERYGPQPRFRTRLNWPDTACAWRTSMAELRQGRINHGRAESRETKHRSEFLTSGLHLGRLGAVPGVLDGQYIGCGSPAGSSGGDRA

SEQ ID NO: 50874 - protein, 214 aa, Zea mays
  Coding DNA Sequence Number=SeqID_9095
  Homolog annotation: Hit_ID=Q1SPJ4; Match level="QueryCoverage=50%, HitCoverage=7%, E-value=2e-29, Identity=58%"; Hit description =Thiolase
  Subcellular localization annotation: CTP_CleavageSite=39; ConfidenceScore=5.12e-01
MQQAFQPYLASYFGTKNSIITGIVMSIVNSKRGKSSGCLDNAGAAGTLYEAVPKSITVSNNNLSTQTDTVFLDPPYEPLWTNVFVRNCAKVSLPLRWSRIQAQGQILLAGGTLTFGLTHYPYSEFELLAEELLMSDSIIKISSQNPSVETLLAVCCVHMLAHYHVQEALNGWLWISDISGGLSVGVLMDYLVLWDLLEEVELQVGIEDRQVVRT

SEQ ID NO: 50875 - protein, 80 aa, Zea mays
  Coding DNA Sequence Number=SeqID_9096
MDVPANDHRQKPDDPWLSGLPEEYGSFGTSVAAAGEDIVCPRASGSLRAPRRRASFGRERRDADSGVPRANYAVYAMRGA

SEQ ID NO: 50876 - protein, 952 aa, Zea mays
  Coding DNA Sequence Number=SeqID_9097
  Gene Ontology: Mol. function=binding; Cellular component =intracellular; Biological process=metabolic process
  Homolog annotation: Hit_ID=Q6K892; Match level="QueryCoverage=88%, HitCoverage=91%, E-value=0.0, Identity=71%"; Hit description =Putative pentatricopeptide (PPR) repeat-containing protein
  Pfam annotation: Domain name=PPR; Domain location=138-172; Score =32.5; E_value=1.5e-06; Accession=PF01535.11; Description=PPR repeat
  Pfam annotation: Domain name=PPR; Domain location=245-279; Score =35.5; E_value=1.8e-07; Accession=PF01535.11; Description=PPR repeat
  Pfam annotation: Domain name=PPR; Domain location=347-381; Score =35.1; E_value=2.5e-07; Accession=PF01535.11; Description=PPR repeat
  Pfam annotation: Domain name=PPR; Domain location=382-416; Score=4.9; E_value=1.9; Accession=PF01535.11; Description=PPR repeat
  Pfam annotation: Domain name=PPR; Domain location=417-450; Score=1.0; E_value=5.7; Accession=PF01535.11; Description=PPR repeat
  Pfam annotation: Domain name=PPR; Domain location=520-554; Score=5.1; E_value=1.9; Accession=PF01535.11; Description=PPR repeat
  Pfam annotation: Domain name=PPR; Domain location=582-616; Score =31.9; E_value=2.2e-06; Accession=PF01535.11; Description=PPR repeat
  Pfam annotation: Domain name=PPR; Domain location=682-716; Score =50.5; E_value=5.6e-12; Accession=PF01535.11; Description=PPR repeat
  Pfam annotation: Domain name=PPR; Domain location=717-751; Score =17.1; E_value=0.065; Accession=PF01535.11; Description=PPR repeat
  Pfam annotation: Domain name=PPR; Domain location=753-787; Score=2.8; E_value=3.5; Accession=PF01535.11; Description=PPR repeat
  Pfam annotation: Domain name=PPR; Domain location=820-854; Score=1.7; E_value=4.7; Accession=PF01535.11; Description=PPR repeat
  Pfam module annotation: Pfam domain module=PPR::PPR::PPR::PPR::PPR::PP R::PPR::PPR::PPR::PPR::PPR; Domain location=138-172::245-279::347 -381::382-416::417-450::520-554::582-616::682-716::717-751::753
  Subcellular localization annotation: CTP_CleavageSite=25; ConfidenceScore=5.26e-01
MGARYRSLGRTSYSAASASSRKARRAFHGAAPATGHMQSQCGSAPLGLAAPAAQHIGCMLGEGHRPGALELAAAIRSSSALPGSGSALARCLHGLAVKAGRVASSATVAKAVMDAYGRFGSLADALLLFDEMARPDAVCWNILITACSRRGLFEDAFILFRSMLSCGVGQGMPTAVTVAVIVPACAKWRHLQTGRSVHCYVVKTGLESDTLCGNALVSMYAKCGGSRVMVDAHRAFSSIRCKDVVSWNSVIAGYIENQLFGEALALFSQMISQGYLPNYSTVASILPVCSFTEFGRHHGKEVHSFVVRHGMEIDVSVSNALMTHYSKVLEMKDVESIFTSMDVRDIVSWNTIIAGYVMNGYHHRALGLFQGLLSTGIAPDSVSFISLLTACAQVGDVKTGMEVHGYIFQRPVLQETSLMNALVTFYSHCDRFDDAFRAFTDILNKDSISWNAILSACATSEQHIEKFFVLMSEMCRGVNQCQWDSVTVLNVIHMSTFCGIKMVREAHGWSLRVGYTGETSVANAILDAYVKCGYSHDASILFRNHAGRNIVTDNIMISCYLKSNCIEDAEVIFNHMAEKDLTSWNLMIQLYAQNDMDGQAFSLFNHLQSEGLKPDIVSIANILEACIHLCSVQLVRQCHAYMLRASLEDIHLEGALVDAYSKCGNITNAYNIFQISPKKDLVTFTAMIGCYAMHGMAEEAVELFSKMLKLDIRPDHVVLTTLLSACSHAGLVDAGIKIFKSIREIHRVVPTAEHYACMVDLLARSGHIQDAYMFALDMPPHAVNANAWSSLLGACKVHGKVEIGQLAAGRLFSMEGGDIGNYVIMSNIYAADEKWDGVENVRKLMKSIDMKKPAGCSWIEVEKTRHLFIASDINHQDRSCIYDMLGSLYQQIKDTHTQNMTMGFHFLAANSNEFAFVSLRGWRLTPLCKYVSTDKDLEAKKETMEFQVNQCP

SEQ ID NO: 50877 - protein, 67 aa, Zea mays
  Coding DNA Sequence Number=SeqID_9098
MAVGLTRAAVVAVSDLKMVAAEGSRPSARPGPKSTETIDGDGKDQMGSCPCTRSSEGDRCRALTKGQ

SEQ ID NO: 50878 - protein, 172 aa, Zea mays
  Coding DNA Sequence Number=SeqID_9099
  Gene Ontology: Mol. function=protein serine/threonine kinase activity; Cellular component=membrane; Biological process=protein amino acid phosphorylation
  Homolog annotation: Hit_ID=Q5VRE1; Match level="QueryCoverage=86%, HitCoverage=23%, E-value=2e-51, Identity=74%"; Hit description =Putative wall-associated kinase 4
  Pfam annotation: Domain name=Pkinase_Tyr; Domain location=72-172; Score=-155.3; E_value=0.0061; Accession=PF07714.7; Description =Protein tyrosine kinase
MRWMQEHTWRSRLSDTLERCDATICGKKLAKIKRKYFQQHGGMLLLHEISLKQGTAFTVFTEAELIEATDNFADKNILGRGGFGTVYRGLFKDDGVVAVKRCVSLMASEQQKKEFGKEMLILSQINHKNIVKLLGCCLEVEVPMLVYEFIAKNCREASCQSHLNGLCQNKCP

SEQ ID NO: 50879 - protein, 155 aa, Zea mays
  Coding DNA Sequence Number=SeqID_9100
  Homolog annotation: Hit_ID=Q7XB62; Match level="QueryCoverage=23%, HitCoverage=12%, E-value=6e-11, Identity=89%"; Hit description =Putative stationary phase survival protein SurE
MDSTTAAATAAAAAAPAPVLLVTNDDGIDAPGLRFLVDRLVAAGRYRVLVCAPDTFCGRITGFTPRGRTDDRLVDVFPLDHCIGMKIVGAKFAVKNLRNRKYKFGLEKQNLSINVSMQCLQVFSAQHQAALQYNIIQLQVLVAYPLFLRHRLGDA

SEQ ID NO: 50880 - protein, 228 aa, Zea mays
  Coding DNA Sequence Number=SeqID_9101
  Homolog annotation: Hit_ID=Q8SA97; Match level="QueryCoverage=27%, HitCoverage=12%, E-value=9e-11, Identity=59%"; Hit description =Ornithine carbamoyltransferase
  Subcellular localization annotation: CTP_CleavageSite=58; ConfidenceScore=5.34e-01
MAGPSKGSTAASGHSGSAPTTDQGGNDLVTESHQREASSPRTPSTGDRVQQITRSAVCAAPTAEPPDRVRLTTAKAGHERHRKLRLARPRARTRAQPRKTANSAPPDPGLGLGLSPGRRRTPLRPTQGSDSGSAPEDGELRFARPRARTRAQPRKTANSAPPDPRARTRAQPRKTMNSAPPDPGLGLGLSPRRRQTPLRPTQGSDLGSAPGDDGLRFARPQGSDWPRR

SEQ ID NO: 50881 - protein, 319 aa, Zea mays
  Coding DNA Sequence Number=SeqID_9102
MWKLLRSPGRVRAPGSGEAEIAGWCRGGVRALGSGEAEFVVFWGRAQVRALGRARRRSSSSGAEPKSEPWVGRGGDRRLLGLSPSPSPGSGGVRRLPGLSPSPSPGSGGVRRLPGLSPSPSPRSGGAEFAVFRDLARVRALGRAEFVVFRDLARVRALGRAERSGAVLLSGRSVERRSDGGHFGSAGWGARVRIKGLERAGNMFAAEGGPRARRKSSRLCADGGYQLRIRSLEDHTKREMETGDKPTTSHGSTSSEESRTKRKEKKNSSNKGKGKEKKSSSHKSHRRGDKHKRMRESGLLRDRLFITIDLRLRCAVHNF

SEQ ID NO: 50882 - protein, 174 aa, Zea mays
  Coding DNA Sequence Number=SeqID_9103
  Homolog annotation: Hit_ID=Q7XB62; Match level="QueryCoverage=89%, HitCoverage=51%, E-value=6e-63, Identity=77%"; Hit description =Putative stationary phase survival protein SurE
MVDLEYGLTNDYNFCLVAGRSSVNDLKVSAEVCMPLINAIVTEIKNGTYPQGSFLNVDVPTDAAHPKGYKITKQGTYMARISWEQTVYKKPAVESYQTANMDVDGEKDSELVTSENDLLFKRVIVGRSSNGVEGEETDHNSLVDGYITVTPLGALSRTEPDAIPYFKSLCLTSG

SEQ ID NO: 50883 - protein, 163 aa, Zea mays
  Coding DNA Sequence Number=SeqID_9104
MAAAAAAPDADVYDIPWLEKYLPARVADVIGNSDAVTRLEAGNVIDDETHLEEHIPPFPSSTDVKRDSPLVPPPTLHHLPLKNLWKKHPRHMLLLRTKSKATMAITESQQAQQLAQQPQSASVHEKSNLDNHRDVSIPEDECLFHFLFTVSLMLLMSFYWTYV

SEQ ID NO: 50884 - protein, 140 aa, Zea mays
  Coding DNA Sequence Number=SeqID_9105
MKAELEMMRNEKTSIEALLRPAESALAENKRVLSVYKAMAKITDDLLDVVLATGGDKVNENNGQELDDETMKELIEEAMRDFTRALNQAQSCRSRPTDGRNGGGYDGSSGGDHHSLDGTNINFGKEAGGSGGGNGGGHAQ

SEQ ID NO: 50885 - protein, 98 aa, Zea mays
  Coding DNA Sequence Number=SeqID_9106
MEVVDGQSSQQYMASGSQAQAEIQRLKDQMTQMQATKIEVQRKYEELQLQLKAEAAAREAEAAVREAEVQKKYEELQLQLKADAASREAEQSKKYDEL

SEQ ID NO: 50886 - protein, 46 aa, Zea mays
  Coding DNA Sequence Number=SeqID_9107
MAEQLRADGAALEALENKHDNMNFVAQRAMLNRIVDLMSRDAARGV

SEQ ID NO: 50887 - protein, 65 aa, Zea mays
  Coding DNA Sequence Number=SeqID_9108
MAKDVAAGGDGFEAEEESQPTVEVLTTEMLDAEKFDEIYLLRKVVHINLEFHILKDFSRTSRNKR

SEQ ID NO: 50888 - protein, 114 aa, Zea mays
  Coding DNA Sequence Number=SeqID_9109
MEQMDPEEQDVIKFILYLMLLEVEMRKKREKTREMEEQLRADRAALEAMENECLMLMSERDDKITEKKTVDKLVADFLQADANGDFEAQKAMENQIVALISRNAGNTGPSGGGS

SEQ ID NO: 50889 - protein, 71 aa, Zea mays
  Coding DNA Sequence Number=SeqID_9110
MSQNATKKEKSFGFFPHFDAALGKSLGIWKPFKLEGTTNNKGAGVCGSQRRWETMPCHFSERRVGLRWRTC

SEQ ID NO: 50890 - protein, 62 aa, Zea mays
  Coding DNA Sequence Number=SeqID_9111
MAVMGSTSDKMYLCQVPNFEILNDKAETGQVRKQQTFAFSFHWWYPNKSPSSEVREDVGLPL

SEQ ID NO: 50891 - protein, 71 aa, Zea mays
  Coding DNA Sequence Number=SeqID_9112
MALAPCALPSVLSACSLYLDNEQSEVPECVVGDLPEQQPGGSGLFPEYLSCPGGDAGNMEDFEEFQDYNEF

SEQ ID NO: 50892 - protein, 235 aa, Zea mays
  Coding DNA Sequence Number=SeqID_9113
  Subcellular localization annotation: CTP_CleavageSite=31; ConfidenceScore=5.34e-01
MVPGATILATLTPGLYSPRLGTVHRVAPYKRSRVGSGPALALLSAVSLYGRSDGVPSFHSPRNHGVPSEPNVVFMVVNHLLGQNRALFASFYKPQPVVRLLVILDVSLELAFDQVDGSYDASHATVEATKAEVERWRMQLAEAGGRVVDNALCRVRDIADFGVHQGAAVVLLMKEDCSDCHLKDIIGPPSSLSDEGLEDILEGYDYVASHVVLRDLLGALKVHPMGVALELRVDY

SEQ ID NO: 50893 - protein, 63 aa, Zea mays
  Coding DNA Sequence Number=SeqID_9114
MALGPVLPLFGAFLRVAEFLASGADVRGPLRLDPEGGVVNHSIRIWRMGLDPESITSRGRSGP

SEQ ID NO: 50894 - protein, 109 aa, Zea mays
  Coding DNA Sequence Number=SeqID_9115
  Subcellular localization annotation: CTP_CleavageSite=32; ConfidenceScore=5.74e-01
MPAHAPSSLFRAPPVPPTHPSPHFAQLPTLSRSAHAASRRQRPAPAFPAFQLTEDRSKPPRALPRDNEQSEIPECAVGDLPEQQPGEGKCPQTYYILLYFIIHCPTLHY

SEQ ID NO: 50895 - protein, 85 aa, Zea mays
  Coding DNA Sequence Number=SeqID_9116
METLASAMLRENRRSNVPASSDVSALLLRCLRPRLGQGPSCHGFPRLSRLSLRHRTVLKVLSVEDKIRNIGCKAIRRKIVEVEMT

SEQ ID NO: 50896 - protein, 1047 aa, Zea mays
  Coding DNA Sequence Number=SeqID_9117
  Homolog annotation: Hit_ID=Q10N70; Match level="QueryCoverage=85%, HitCoverage=89%, E-value=3e-50, Identity=24%"; Hit description =Expressed protein
MPRFALWPKCREVDVAALAGPAPSLLPRGPPPPRYPTVQDLNSSGESETQGLRQSLEEQTGEAEAEAMLHGASGAVASASHESKEQSALEAPVMSSVEETSFTFEFKRAKKAMTPPSLLPVDEPRGENNSREGLSNKPSAVPAKKDTPKQVEFTHCSPGIVGRLMGLDTVPRPKKSLDRCQSDTRGNRRHLSGVARGVDSASSGDQACNTSSDELPAFNDVFEVTEMENMAMHGPLQPGNQEPYLTNIEADLEFVRQKFLDVKRLATGEGNMNSKEFSEALEVLHSKRDVFLEILQENRTAVSGFSGHILSHSGLQCSSYTSNAAAAAAAQPFEKEIPCGMEGVCDGMHVIPKEFEEPVPSMPPRETSVTPVAPLAPNEGKSKGSCRRSEIVVLKPNLQRKSFTPVLSQIVVLKPNLQRKSFTHVLSSQEASQYKQKRDTQHLKPPHHSKQFSVARNDEVLEGERGFALQKARKQAHRSGSRRRSSQEEYNLEADTEKARVSSTSTSHEDTVPIYSSIHSSGPSVSRKARKHLSKRWQMTCQSDSEDSIPKGIKTLGEMLGLSDRDAPRETTHMVGSDPNFSPYNVREVPDSPLGISSKDGWKTGIYCEDDSRAGISRNFLRSKSLPASSTTSTKLSCRRQSAPTCRLPILKDILNAPTDESENAHIRKRSPIRNAKQRNEKATAHLGRENMLPEKEIHVTSEIARHSICVSDISRASNIHTEKCPDDAIKTEDQEESDSALQHDYKKKTQGFMGCYQTIATSSPETKEVISIQNQDCIELKEERNPSVEIEADQVYTRTAESASIASAECCDCSSPSALSQQSSGEETYSGIFKSINVGIQELKEQLKMLKMEDQNDICGDYSDTLSSDEFDNMNISIYRTMEEQLSMFKDGEDRDFSYVQDMLASACDLPEHLEDWQVSSDVFLCLENKYSKLVLWSKSDRKLLFDLVNSILADMTIPDIGLCSKLMMKRWPEIDHGQLTEIVRQMVQKRSNCGHFFLEDVQPLPLDHGSEVELVGTKIAMMIHDDIMTDFIVGIMSQENLLVIS

SEQ ID NO: 50897 - protein, 59 aa, Zea mays
  Coding DNA Sequence Number=SeqID_9118
MQQTVVKAISKNEIIMVTKYPPKMDQIIEDKEEDKDINQSKRPSSNVGQAEEDRSIASA

SEQ ID NO: 50898 - protein, 112 aa, Zea mays
  Coding DNA Sequence Number=SeqID_9119
MDRSKSRLVERLIINIFSIFIFLGARKDRTSFYDPFLDCLGPSNEKSRQHVMRSHGAYAEVEAHQRKLDHQSQLELALICLLDSWSQSSRECSRQPNAMDLARQEKFPIKEF

SEQ ID NO: 50899 - protein, 60 aa, Zea mays
  Coding DNA Sequence Number=SeqID_9120
MALDKMGGGLLILEHTDEESCSLWIRTCGAREAESLTERDLLVILTPCAREYTVQETEAG

SEQ ID NO: 50900 - protein, 173 aa, Zea mays
  Coding DNA Sequence Number=SeqID_9121
MAQFLRAEGKLARRTSPPSCLPVRSWDETLPVSSAIPAAKGSMEHQEHQHRSGHPRGLDIVIPSGLISRIRANELLGGPCCTELDAVKVVRATAGVVASSGIGHLVAVGSPTSTVGFVDDSDGWRIELLSAVTVVRTNAARDKTHTGSQWTGAARPSDGVVLTRRSRRSQSRM

SEQ ID NO: 50901 - protein, 408 aa, Zea mays
  Coding DNA Sequence Number=SeqID_9122
  Gene Ontology: Mol. function=transferase activity; Biological process= paclitaxel biosynthetic process
  Homolog annotation: Hit_ID=Q8S7Z4; Match level="QueryCoverage=92%, HitCoverage=96%, E-value=2e-46, Identity=35%"; Hit description =Putative 10-deacetylbaccatin III-10-O-acetyl transferase
  Pfam annotation: Domain name=Transferase; Domain location=17-395; Score=37.9; E_value=8.7e-13; Accession=PF02458.6; Description =Transferase family
MHGEASAQRNEWTAGTVVITKASPVVVRPSELELGRTPTPTLPAGDYTTVPLSSFDRRVPPMPATSLLVFERTINEPIETIKRALSRVLAHYRPMAGRLDGAGGIACTDEGVTFVGAAASCALKEATTTALQEMDLAVCYPGLLCRDADPLLLVQVTEFACGGFVVGVTSNHVAADGLGMAQFLQALGELARGTWPPSCIPVRSWDESLPVSSAIPAAKGSMEHHEPQHLATLDIVIPSDLISRIKADGCCSVLDAVMAVLWRCRTRATMSPGDAESPAPLNGIGHLVGLIRRAKEKVPDLLSTPGSGAAADHQGHQAAPPTSSLWYETFTVTDWRNLGLDTVDFGSGPPERVLLRHDRRAMVPGCVVCPPRRARRHGCDGVVVSSKFVKPQHVDALLAELAALATSG

SEQ ID NO: 50902 - protein, 102 aa, Zea mays
  Coding DNA Sequence Number=SeqID_9123
  Gene Ontology: Mol. function=actin binding; Cellular component=F -actin capping protein complex; Biological process=actin cytoskeleton organization and biogenesis
  Homolog annotation: Hit_ID=Q75M66; Match level="QueryCoverage=62%, HitCoverage=25%, E-value=2e-18, Identity=73%"; Hit description =Putative capping protein beta subunit
  Pfam annotation: Domain name=F_actin_cap_B; Domain location=1-102; Score=-157.8; E_value=0.073; Accession=PF01115.8; Description=F -actin capping protein, beta subunit
MDLMRRMPPRSAETALNALLSLLPDHSLDLLSQVDLPLQVCMDKESLKEYILCEYNRDADSYRSEIHDFLHRHIYILFMFSTSTGLSLFGSACCKIDFQCSA

SEQ ID NO: 50903 - protein, 104 aa, Zea mays
  Coding DNA Sequence Number=SeqID_9124
MEITRKHELSVDFTILRAPHLLVTVVRYRMTAKLYLALVGVSVTHMVVRAHAQGFLNAEALDLLAPKATGRKSQTGEVLWCNTLVLAQFYSKSNDSRVAGSTMF

SEQ ID NO: 50904 - protein, 138 aa, Zea mays
  Coding DNA Sequence Number=SeqID_9125
  Gene Ontology: Mol. function=pseudouridylate synthase activity; Cellular component=nucleus; Biological process=tRNA processing
  Homolog annotation: Hit_ID=Q75M65; Match level="QueryCoverage=61%, HitCoverage=20%, E-value=3e-33, Identity=76%"; Hit description =Putative pseudouridine synthase
  Pfam annotation: Domain name=PseudoU_synth_1; Domain location=59-138; Score=-0.8; E_value=0.0084; Accession=PF01416.10; Description=tRNA pseudouridine synthase
MEKDLSSPFDHTVISNANEMQCNRNADDNGLPEDSSKHTKRTGRKVGILSHCPKRLVALKVMYFGQRFYGFSSEGNIEPTVESEIFKALERAKLMVANRKESCYSRCGRTDKGVSATGQELALCILPNPDKNDRQIRL

SEQ ID NO: 50905 - protein, 150 aa, Zea mays
  Coding DNA Sequence Number=SeqID_9126
MSRASNPFNAGHGWPRYGSVLLTRCPECERPEPLVRLVSKRSENGNFGSEFVKCESKPRPGKVQEKCKIFMWMDDYIKMVEGTGFTSGLGEMMACNYGDERVAANYDMFTAELKKLNNNLSDLKKMFGVLYASMIFIALLFFVMNYGCKR

SEQ ID NO: 50906 - protein, 94 aa, Zea mays
  Coding DNA Sequence Number=SeqID_9127
  Gene Ontology: Mol. function=oxidoreductase activity; Cellular component=mitochondrion; Biological process=electron transport
  Homolog annotation: Hit_ID=Q6L4W7; Match level="QueryCoverage=64%, HitCoverage=22%, E-value=3e-27, Identity=90%"; Hit description =Putative NADH-ubiquinone oxidoreductase
MLPPAARLAARRLLGLASASASEAAGRRVASSPHLDSPENKPDMKWEFSQANMKKVNEILSHYPSNYKQSGIIPLLDLAQQQHGGWVPVAAMDA

SEQ ID NO: 50907 - protein, 487 aa, Zea mays
  Coding DNA Sequence Number=SeqID_9128
  Homolog annotation: Hit_ID=Q5ZC04; Match level="QueryCoverage=98%, HitCoverage=93%, E-value=1e-167, Identity=63%"; Hit description =Putative histone H1flk
MRAEATGSAAKLLAPRMVVSASSRVQELERFSHYVARQIGFDDVKECPHLCTLAYDYLRKNKGYEENIFAFFQNSMDPEPLIVKFIEELDKCIVGYFSFHWKYATYIITQVLTVEGATKRKFKNFVLEATREQRFERVTRNLKVTRIFSTLVEELKAIGLSSRDDSPRNDVMVPVAHCNRSPVLLLMGGGMGAGKSTVLKDILKEAFWSGAAANSVIVEADAFKETDVIYRAISSRGHHNDMLQTAELVHQSSLDAASSLLVTALNEGRDVIMDGTLSWEPFVQQTIAMARAVHRQRYRMGCGYKLTDDGTITEEYWEPVEDSNTDEENEVPARKPYRIELVGVVCDAYLAVVRGIRRAVVTGRAVRVKSQLQSHKRFATAFNSYCSLVDNARLYSTNTLGVPKLIGWKDGESSLLVDPEEIGCLDRLRSLNEEADCVHELYADGQPTGGSSSAWQDLLVMSPSRVSAQRELKAAIERNEGRFVKPA

SEQ ID NO: 50908 - protein, 1317 aa, Zea mays
  Coding DNA Sequence Number=SeqID_9129
  Homolog annotation: Hit_ID=Q1S909; Match level="QueryCoverage=99%, HitCoverage=98%, E-value=1e-156, Identity=33%"; Hit description=MATH domain, putative
  Pfam annotation: Domain name=MATH; Domain location=102-226; Score =80.6; E_value=4.9e-21; Accession=PF00917.16; Description=MATH domain
MAGSVVTDDSAASTTGMRDDENSLSGESFSEWRSCDRADSDTPSTSPPFWDSDGDDDDPGRVWHLPAGVKEDEKVQVETWKKGDGGDGPKPSELFGHHTWRIENFSKEKKREMKSEPFEAGGYKWYILVYPQGCDVSNHLSLFLCVANHDKLLPGWSHFAQFTIAVANIDPKKMKYSGELNLVCFLLGRFWKKEHDWGWKKFMELSKIQDGFLVDDVLEIIAQVQVIREKVDRPFRCLDRPYRRELIRIYMTNVEQIYRRFVEERRSKLSKLIEDKMKWSSFRAFWSAIDPNTRHHMSREKTETILKILVKQFFVEKEVTSTLVMDSLYTSLKALEYRMKSKKCKTKLADLEELPAPMVHVDMDMFVLADDVIALLERAALEPLPCQPVAPKDDKTSQSRMKDGSSGEVYKVSMEREERRLTELAQKILETFVLSHIFSGIEVAYQEAVALKRQEELIREEEEEAGLLEHQMKGKRGGGANEKDKRAKKKQTKQKKNNRKAKDKERDVKCEVKILERLHDETVIDNSDGLPAKVEVIAKVDALEEGSSDGSDMPNRGKNQCNKGLSISLAKEGDGLPSTSSVTGGSGRNSSGCCTAPKLDQDTVLLTLRDKLRKLGQRLQEKNIEGQKLLKAHFEARDTKVKVEESSDSSNSLDRPPDVPESSMHSSEDTVDLKVNGTPNKDASVVNPVLEESVSGIPVTAKNESLPSARTKEGPVSNKDNASSLKMKTMASCLKLHPADVDKDAPFPSKSPRINRAAPVPSKLPSADKATPVLPKSSLSVNKAALVRPKSPAVDKATPVCPESPAVDKVTPVRPRSPAVDKATPVRSQSPAVDKATHVCPQSPSVDKATPSIDKATPVRPKSPAIDKVTPIPPKSPPVDKASPAPPKSLSGAKDVPVPSRSLQIDRFIPAPPRLSQVDKAALPSSEQPHISPATNSEAQGATTSRKVTASSVLEVAAASRPSSAPVLPTPRSTAPVASHIQTSTLLSRSMSEAAGRRSVNDPSFSAPSYTPQTYRNAIIGKTGLATTSANLAYQSYSLGQDTAPSQPLSAYASSTAVMMPPAGRSDQSSARHGFKSGSGKLEAHDSWQQWKGDNNVDMHLWRDHTTYQQMTRGQAYDQSRRDDTYQQTCSRGTEKFSRHAGLQARQFQTETPASHVWHQQQGQVAEEFPHLDIINDLLEEDQINGSIPESFHQDYNVFGLPFSPRGNVSDMGMASVRSPARFNSTKYEYDGGFSGAYDINAVNGLRERQFPSLDSYSNGLSDVSASKPWLNGSPSPSVMSLGVNTNGYHPQVADYPSLGNGVNGVSLWRRHANGRW

SEQ ID NO: 50909 - protein, 125 aa, Zea mays
  Coding DNA Sequence Number=SeqID_9130
  Homolog annotation: Hit_ID=Q9SQZ0; Match level="QueryCoverage=30%, HitCoverage=6%, E-value=1e-10, Identity=84%"; Hit description =Putative amino acid transporter; 33388-30195
MVGAGVFVTTGCVARLYAGPSLVVSYAIAGLCALLSTFYAVVDELRRMLDPGKPSFTPAKGSPMWSCSSAHRLVTSNRVAVPIPMYLGLLCSALVQFARTAKTESFDRPDGPNEIHGSHSHRRLV

SEQ ID NO: 50910 - protein, 117 aa, Zea mays
  Coding DNA Sequence Number=SeqID_9131
  Gene Ontology: Mol. function=nucleoside-triphosphatase activity; Cellular component=signal recognition particle, endoplasmic reticulum targeting; Biological process=SRP-dependent cotranslational protein targeting to membrane
  Homolog annotation: Hit_ID=P49972; Match level="QueryCoverage=98%, HitCoverage=23%, E-value=2e-41, Identity=73%"; Hit description =Signal recognition particle 54 kDa protein 2
  Pfam annotation: Domain name=SRP54_N; Domain location=2-88; Score =71.1; E_value=3.6e-18; Accession=PF02881.9; Description=SRP54-type protein, helical bundle domain
MVLAELGGSIARALARMSNATVVDEKVLADCLNEICRALLQADVRFDTVRDVKANINRIVNLDALAAGTNKRRIIQQAVVDELRRMLDPGKPSFTPSKGKPNVVMFVGLQGQYRSSA

SEQ ID NO: 50911 - protein, 222 aa, Zea mays
  Coding DNA Sequence Number=SeqID_9132
  Homolog annotation: Hit_ID=Q6L4W7; Match level="QueryCoverage=43%, HitCoverage=35%, E-value=1e-30, Identity=70%"; Hit description =Putative NADH-ubiquinone oxidoreductase
VTSDGLFSVGEMECMGCCVNAPMIAVADYSKGSEGYTYNYYEDLTPKRVVEIVEMLRRGETPPLSCRLPTSAYTAAGVGDVERRNPNVQPVLRPDVDAPVSPPLQPSDTLDDDKDDEDYEFDPLFSETTGGARSSAGGSRGACRGSARGGSASCSGVERARRGAGCARAGPGAQGAWSVGSSSGRRRARTAGRVGASLGRSPSVAWASGSMGRGTVLGGFAR

SEQ ID NO: 50912 - protein, 53 aa, Zea mays
  Coding DNA Sequence Number=SeqID_9133
MTCQIPDYNKGVGAIAHVFLEVVIALISVAANHVSTKKLLQKQFILLARRHNG

SEQ ID NO: 50913 - protein, 379 aa, Zea mays
  Coding DNA Sequence Number=SeqID_9134
  Gene Ontology: Mol. function=nucleoside-triphosphatase activity; Cellular component=signal recognition particle, endoplasmic reticulum targeting; Biological process=SRP-dependent cotranslational protein targeting to membrane
  Homolog annotation: Hit_ID=P49968; Match level="QueryCoverage=98%, HitCoverage=76%, E-value=1e-150, Identity=70%"; Hit description =Signal recognition particle 54 kDa protein 1
  Pfam annotation: Domain name=SRP54; Domain location=8-193; Score =347.2; E_value=2.8e-101; Accession=PF00448.13; Description=SRP54 -type protein, GTPase domain
  Pfam annotation: Domain name=SRP_SPB; Domain location=224-326; Score =166.3; E_value=7.9e-47; Accession=PF02978.9; Description=Signal peptide binding domain
  Pfam module annotation: Pfam domain module=SRP54::SRP_SPB; Domain location=8-193::224-326
MFTRIYEGSGKTTTCTKYADYHRRKGFNPALVCADTFRAGAFDQLKQNATKAKIPFYGSYTESDPVKIAVEGVDMFMKEKYDLIIVDTSGRHKQEAALFEEMRQVSEATKPDLVIFVMDGSIGQAAFDQAQAFKQSASVGAVIVTKMDGHAKGGGALSAVAATKSPVIFIGTGEHIPDFEVFEVNPFVSRLLGMGDLSGLVNKIQEFMPDNQQMQIMDKLGEGTFTLRLLYEMFQNLQRIGPLGQLVSMIPGFSGQFIEKGNEKEGQAKIKRYMTMMDSMTDAELDGTDPKLMNQSRINRIARGSGRRVEEVVHMLDEYKRIAKVWKKLPVLNNNRRSDMNRDIRRISDAIPPNMLTQLGGIAGLQNMIKQMGGRDRSR

SEQ ID NO: 50914 - protein, 110 aa, Zea mays
  Coding DNA Sequence Number=SeqID_9135
  Subcellular localization annotation: CTP_CleavageSite=55; ConfidenceScore=5.85e-01
MEPVIHSSDHRSGKTCSRSRTAPPNRSSRSTKFTSGSTSSRTEMSTGHGLLPRVRAVQGAEAPVLRQSMGNWLVFTYECPEIKRTPRLSGYNEPKVLVSWGTIGLGLGVP

SEQ ID NO: 50915 - protein, 113 aa, Zea mays
  Coding DNA Sequence Number=SeqID_9136
MQAACNRTKGAHPFDFDASSMEAQAHTSCNRRAGYYVRETAPPLAPVPRLLDCGTGAATRGNPAHDPTVPTEHIGNGDRERGYSERDPSPQRKQAPSPPTDQKFEGWPLRRVQ

SEQ ID NO: 50916 - protein, 1045 aa, Zea mays
  Coding DNA Sequence Number=SeqID_9137
  Homolog annotation: Hit_ID=Q10N70; Match level="QueryCoverage=99%, HitCoverage=97%, E-value=0.0, Identity=49%"; Hit description =Expressed protein
MSMAGIARGRSRWRQGDGSSNRNAAHSTVPNPDHQGSLQSGFCMLVTKQIGVFVKRGLVVIEDKYNSFKHQGPGVKLALDFFCLFNEGWKQATYPGMLSDSVFATVDRQSKTRKAIAVPMKILIEEEFSNDVNSRHISPGAVGRLMGLDSLPSSGIHNKHRHTKSHAPKTSPSSFHGRTGLHDIPHRRSVDTINVFEGMEATKTNMHRSPRSKIGSTTSRSDKVVSADIDFIRQKFMDAKRLSIDESLHISEEFNETLDALVSNSDLLLDFLQNFDPAVIRDLHNHGSPSSTANCITILKPSRRNQFIDMDNIYPQEKGTESIFNEQMEGKHSLWKPYSNVPLQSLKEDSCSSRQKLSRSSHQENTGKRGSPTRIVVLKPNLEKPHDIEEALPLHHKISHSDYRRHKECPEVDRWTPNTEDYMCQVPLGDSETLSRMGKGSREIAREITKQMRAARGGSRKHSVKPETRTLASDERSQFQSSVTRPKTPESIHRYSESCDAWASSSLNSLPTYSTETSESKEAKKHLSNRWKKTRQCQHQETDNDSFNTLGDMLALSDQNASNVATHKMTCRKCPKSEVQSDRIQSSYPLGISTNDGWKDTTTSKLTRSKSLPPSFIRGVQKSNNRKRSGSVTYNEFSMLKDVLKVGPHYSEYAYRSRQRRSLSRDSTIHGDESDPMSTDNEENMVVEREIHVNYEEPINGTAVTYTSGQSQHPTNLDHELDAIGVLDTSSAVPFSNKKSLSPAEQDQQVLKMTTTALDNCFLVPNLDDLMPKHEQIEYHQADDYPATYDPHIASDSPEENNHHLGDVSETLCILPDVLESPANSNKDDQQKLRLQLGLLKRETTDTRDGSELSILSDDETARRSLPETGESHAFRNTEERDFSYVFDMLAALGIHAANEDDLLDNCYLLECSAGLDLYDDLEQKYDSLILWPVHERKLLFDITNAVLGDMITSVMNGCSKGLMARCSPGWNREEFAELVWQRVVQLRQEIEFNQEALLLSVEWAGSEDGASLVGRDIGNMLQDDLVQEIIADFLGATKSAKLRG

SEQ ID NO: 50917 - protein, 136 aa, Zea mays
  Coding DNA Sequence Number=SeqID_9138
MAVNWELQGCCHRDQRIFIAAVGVSTVVILLLWRTFLLTPFKLITVFLHETSHALACKLTCGDRSSQEFWSMSANCLQKCALLGSTLQPPGNGNEQWLFVRCKREVMPAFGVRDYVDYHMIKCETFGGRRHAGPCE

SEQ ID NO: 50918 - protein, 354 aa, Zea mays
  Coding DNA Sequence Number=SeqID_9139
  Homolog annotation: Hit_ID=O80630; Match level="QueryCoverage=63%, HitCoverage=72%, E-value=5e-61, Identity=53%"; Hit description =Putative disease resistance response protein
  Pfam annotation: Domain name=Dirigent; Domain location=168-353; Score= 172.6; E_value=1e-48; Accession=PF03018.5; Description=Dirigent-like protein
  Subcellular localization annotation: CTP_CleavageSite=48; ConfidenceScore=5.25e-01
MYSTHGWLSSYPARLLYNPGISQRHAQQQQAPQSSLFSTYATRLGALRDMAKNAVQTVRAVLCLVLALAVANCAFAGRFLDDEQAAAPLPADPLPAPTDPPTDPAVAPAGAGAGAAATGNAGAASDHPLTFFMHDILGGSQPSGRIVTGVVASAAANGQLPFARPNTNIFPIQGAVPLPQGASSLINGNNAPYVAGLGGTSSAVVQNNGNPANGGNKNIPFVNAGDLPSGATLQNLLFGTTTVIDDELTEGHELGAGVVGRAQGFYVASSQDGTSKTIVLTAMFEGPEAPHGGDTLSFFGVHRMAAPESHIAVIGGTGKYENAKGFAAIQTLHPGDEHTTDGVETLLQFNVHLI

SEQ ID NO: 50919 - protein, 233 aa, Zea mays
  Coding DNA Sequence Number=SeqID_9140
MRANSVGGPCCKGHKKSLPSSGTTDDMATADDEGHHQLSHAPRLRALAAYGSRGSRRQWRVMGHDGEKTLEGEGFAVGVDITGACHGGGCRCRGGGASGERRMGPGTTALSHVPRPPSAPSPSFPHVRRHHLPSPRVEATIRAITIFPHASPFSVVMAWWRARRVGKGGDSALGKGGDDIVARGAVVSGDGGHARRGWLWRPSMTNSSDPMGSAASFDLAASGSSFGDELSDS

SEQ ID NO: 50920 - protein, 370 aa, Zea mays
  Coding DNA Sequence Number=SeqID_9141
  Homolog annotation: Hit_ID=UPI00004C1732; Match level="QueryCoverage =31%, HitCoverage=7%, E-value=1e-07, Identity=41%"; Hit description =UPI00004C1732 related cluster
MAGNDVGVSRAPRAIERFGNFDNTLSNEETTNSASKALTPLESLDIIGRLHHLRLDPSKGGSMRLGSSQPILAKALEVSGPVQGPSFGFPFVRIGRQTGFSVEWDYSRFSPRMPRNLVDRGGTSLLSGNLKGSFADTATRAVVSAPAHLDLPCQGSLPGQVPARSDRGLFTRKRVLSQWQTYIEAARALHRLTFGQSEADPEQVPPHRNLKKMRERGARLTHGATGRAHTYAQETHGTSAEVRRGPEGLYLVLFTTLQSVDQPHGHQLYWLLYPGNHQQTLVHKLGRKTPRTTKEFFFDIATDHALGEDLARAIASHRKWRTMHDRGRMKTSMTPQRKKEKRPTTTSRCVGEYGKPDGRKASSQGNPRSF

SEQ ID NO: 50921 - protein, 113 aa, Zea mays
  Coding DNA Sequence Number=SeqID_9142
MAAGSLIHGTNKNPEPVSLGLDLGRPFPDQRPAPIFFSLPRARRQRHDSTAAHPPDFSNSARQHLIPKSPSPTASSCKKGSTEGVLTVEFKAQVIGDDVREIRRTAPSSISKF

SEQ ID NO: 50922 - protein, 37 aa, Zea mays
  Coding DNA Sequence Number=SeqID_9143
MASPPSGTPAAGHERRVREDVRWSLDGQGAAVIRRHY

SEQ ID NO: 50923 - protein, 366 aa, Zea mays
  Coding DNA Sequence Number=SeqID_9144
  Homolog annotation: Hit_ID=Q5GJ60; Match level="QueryCoverage=25%, HitCoverage=17%, E-value=4e-10, Identity=36%"; Hit description =Terpene synthase 6
MNTTNKIEEELKLQGNMHAELVKKMREQASLDHVASTVQTCMKQYEVTEEEANEKLRAINEMAWMDIVQDNLEQERPIALLDTAINVARIADFLYKREDAYTLPFSLKDIIGSMDDKTWRQIELAVKSSIIVGYTLDPTVILGDCFSAGGLCGGHQSPHCTKLVTWWEARCYIPVYEKKGTQDETLLEFGPVSVRREEQRGRGRTEGCPLVADVEAKLTEATSTTRTRRRPQNELETKAVGDDVFSGMHTALGEDGSSAGVRVREVRGVSEGATSKGVECVGEVAGRCATWARPRQEVRGKEGDDKRGQRGSERGRMGEWGGADRRNPLQREKEGATGARGERGGADRRGPLVIGRAGTGARASWA

SEQ ID NO: 50924 - protein, 108 aa, Zea mays
  Coding DNA Sequence Number=SeqID_9145
  Subcellular localization annotation: CTP_CleavageSite=18; ConfidenceScore=5.58e-01
MKLWKETSRSSKTTTSSRCGLAATPSRLPVKAALSTFLFCTLIYCKNTSIVIAMSCTLCSSVQFDNGARGRPIGVTVVLLHRTVMATVALLGWWGEDEGRPLIWPGRL

SEQ ID NO: 50925 - protein, 173 aa, Zea mays
  Coding DNA Sequence Number=SeqID_9146
  Subcellular localization annotation: CTP_CleavageSite=43; ConfidenceScore=5.37e-01
EAPYAPFLTPWTPLPNLSNVRPFRFLCMVPGLLACGPPPSVAPSTAAWALAGGPRSVRTFYHPPFGLAHPWDYIIKSPLAVFITGMHQEPRARARRKNSEVPDLRHRRSCLWSGRESDAGKVVVTVRGGTLHVIMAFSGEAVLLCSTNCSPEQLGHHGSALHRGRSPTRLNYG

SEQ ID NO: 50926 - protein, 529 aa, Zea mays
  Coding DNA Sequence Number=SeqID_9147
  Gene Ontology: Mol. function=magnesium ion binding; Cellular component=chloroplast; Biological process=metabolic process
  Homolog annotation: Hit_ID=Q2NM14; Match level="QueryCoverage=95%, HitCoverage=97%, E-value=2e-96, Identity=36%"; Hit description =Terpene synthase 10
  Pfam annotation: Domain name=Terpene_synth; Domain location=28-202; Score=130.3; E_value=5.2e-36; Accession=PF01397.11; Description =Terpene synthase, N-terminal domain
  Pfam annotation: Domain name=Terpene_synth_C; Domain location=207 -478; Score=255.5; E_value=1.1e-73; Accession=PF03936.6; Description =Terpene synthase family, metal binding domain
  Pfam module annotation: Pfam domain module=Terpene_synth::Terpene _synth_C; Domain location=28-202::207-478
  Subcellular localization annotation: CTP_CleavageSite=44; ConfidenceScore=5.18e-01
MTTSVPVPLASQPQAPQRKPRTYTPSPWGDFFLHHTPCTPSQLLSMKERAKVKEQQRLGVDYRYYEEIDQLLRSVYDDGDKDGGGSDDLYLTSLRFYLLRKHGYTTSSDVFEKFRDERGSVSSDDASCLLMLYDAAHTRTHGEEILDDIIAWSKSRLQSLLEEKNLEPELAEEVRCALETPRFRRVKRVEARRYISAYEKKGGRDGTILEFAKLDYNISQAIYCDELKELTVWWKDFQSHIDMRFTRDRLVELHFWMLGVIHEPYYSYSRIMMTKFFIFGNFFDDLYDNYGTTEESDVFTAAMERWDEQIAHQLSAGLKVLLASILNATNKIEEELKLQGNMHAELVKKMVIDTAKSYHAEVKWRDEHFVPATVEDHLQISIPSSGCMQITNLALISSRGNMTTREDVEWVFTFPKIVRGACIVGRICNDIMSHEREQASLDHVASTVQTCMKQYGVTTEEANEKLRAVIEMAWMDIVQDNLEQERPIALLDTMINVARIADFIYKREDAYTLSFSLKGIIGSMYVYSV

SEQ ID NO: 50927 - protein, 97 aa, Zea mays
  Coding DNA Sequence Number=SeqID_9148
  Subcellular localization annotation: CTP_CleavageSite=38; ConfidenceScore=5.02e-01
MAGGAVSFPLLLELPAVTPIPWVWGVKCRAHPRTLNPKAARTQPSSPVTERTIPCGPPPVITAPVDALPPELGVGTSSFGVVCVCSVAVIGEPAGRK

SEQ ID NO: 50928 - protein, 34 aa, Zea mays
  Coding DNA Sequence Number=SeqID_9149
MVKEGCILSFLCEKVAVSWLLGVKYEQQYSLRSV

SEQ ID NO: 50929 - protein, 139 aa, Zea mays
  Coding DNA Sequence Number=SeqID_9150
MANTRKGGADVPTRIHRRRAVAKPEPEMNCPNPLSAGSPEPLQDDDWFKSVEKMLNISQCTNIEKIKKKEFLSLRQGSMLRLLDKGMALEHKCVQLGKMKRKAITQGQGGNSSRSRYTQPQGTIAHVGGGQQSYQCPIQ

SEQ ID NO: 50930 - protein, 132 aa, Zea mays
  Coding DNA Sequence Number=SeqID_9151
MAGERSVPEVLLEPSSDVLETRVEGFSEVTEDMACQTEAATMDPSKDINGISIEEDSTIIHPIKPSHVDFSKSKIKEGHIEALHVGKMVNQTVGFHTEDGCPCPDCGENRAIGLQPALTLVSRFQQLPQSGD

SEQ ID NO: 50931 - protein, 53 aa, Zea mays
  Coding DNA Sequence Number=SeqID_9152
MARRAQGKVRQTLAWAGLRVCGGVRSRPWGSFIGMAWARARGRLDRALRRKSS

SEQ ID NO: 50932 - protein, 143 aa, Zea mays
  Coding DNA Sequence Number=SeqID_9153
MRVVWDTLGHASSHVFFLRTECIGLGTSEEALVVATAPTLALVVALAVTLAIAVVIALVLVAIHAITGRMFLVQLIRVDEAGALNGLGVRPPRKEYSESPKGSEEGVIDRFDLLSFPSSGMVLGRWGILEKSEDRSLKSAQAK

SEQ ID NO: 50933 - protein, 78 aa, Zea mays
  Coding DNA Sequence Number=SeqID_9154
MLLSGLLDYESCVSPPFIVTWIGVLLAYWNPLKFNDQEKGNKMEKKKRNRKATDEGLIANERDSDFSSKDSDSDGLSA

SEQ ID NO: 50934 - protein, 268 aa, Zea mays
  Coding DNA Sequence Number=SeqID_9155
  Gene Ontology: Mol. function=DNA binding; Cellular component=nucleus; Biological process=regulation of transcription, DNA-dependent
  Homolog annotation: Hit_ID=Q8RUX5; Match level="QueryCoverage=96%, HitCoverage=94%, E-value=2e-58, Identity=50%"; Hit description=One repeat myb transcriptional factor
  Pfam annotation: Domain name=Myb_DNA-binding; Domain location=121 -168; Score=36.1; E_value=1.2e-07; Accession=PF00249.21; Description =Myb-like DNA-binding domain
MDMAKSLIPSQITNKTYTNDMETKHIDFVDDLQAMFPWKEKHQVTNLYVELLVEIMRAQSNNQHVVPSSVLVNDNFGMLSKPMDNMKVIEGYLMDEMEAMRILEEQPNMLNVIHKKKRHGVKFWTTDEHRNFLRGLEAFGRGEWSNISKYFVPTRTPVDISSHAQKYFRRQECTTGKQGFNIDNVSFYGTQPWVQNNPSSCEALTFTGGAYNTNYNDLDEKHVAFNSFASDNQLATWFVDQHTSSYLAPLMEEDVSQTNKWMDLENID

SEQ ID NO: 50935 - protein, 327 aa, Zea mays
  Coding DNA Sequence Number=SeqID_9156
  Gene Ontology: Mol. function=nucleic acid binding; Cellular component= intracellular; Biological process=DNA integration
  Homolog annotation: Hit_ID=O24586; Match level="QueryCoverage=73%, HitCoverage=39%, E-value=1e-105, Identity=77%"; Hit description=Gag
  Pfam annotation: Domain name=zf-CCHC; Domain location=292-309; Score =31.8; E_value=2.4e-06; Accession=PF00098.13; Description=Zinc knuckle
MDPKGKGIMIDDKEKETINNNGPKGDKPINSGSNNKKKDRKKKRHITKIVYYDSDASSSSPKDDDDDSSSKKKTKFRKNVQATTVLLASLCRDEYNKVSGLDNTKKIWDTLKISHEGNDATMITKMELMEGELGRFSMNMGEEPTKTYNRLKTLVNKIRSYGSTRSTDHDVMRLMLRSFTVIDPHLVNLICENHGYTKMSPEEILGKFVSGRMMVKEARYVDDIANGPLPHYESQLVALKATTNKVVLPNKVVQVEAARLNEEEMALVIKRFKTVLKGHKDYPNKNKSRGKRSCFKCGKSGHFIAQCPNNENDQEQDKKGKKEKRKF

SEQ ID NO: 50936 - protein, 508 aa, Zea mays
  Coding DNA Sequence Number=SeqID_9157
  Homolog annotation: Hit_ID=Q947D1; Match level="QueryCoverage=94%, HitCoverage=42%, E-value=8e-94, Identity=44%"; Hit description =Embryonic flower 1-like protein
MCLALRKKNIPKNKKKVSQEVHEKQNVIDDIPMDIVELLARNQHERHLMTQTDTNSLENCHDQPKAGEVDCAESAAKDCPVNSSNANFEKPLALESKQKSLQDHASSSTQATNVNPQDLHTQKLPQCPAASSTKVPNGPPSESQTQNSLQVHALPVPPIVQSFNAYPSKLPALDILECAQEQPTRFHRDDEVTIACTSPIFSNYQHIAETPARSWRDSREKKLMWDSFKTASRNPPSPPPSYGFQFGNRLQEVDSAPIHAYGAHQPVIVAVDQPRSVPSTALAMEAGRLYDQRIPGQPGLYPKEPMPATHLLRLMDSSTAPGFTNYQRANRRQMELQTQALGSQYTQHEHYNASPSTSYGSQPLTLEDLSRRHFQQDLRRPLRPHPRVGVLGSLLQQEIANWSGNCGPQSGYRLGDCKGTRPPDANRAGNYETLSSAGWNTLQLGSVSSAANLEYRFPWYGTGQPSTSGNGRTIHPLDKLVRKDICVTNRNPADFTVISDKNEYMRTL

SEQ ID NO: 50937 - protein, 570 aa, Zea mays
  Coding DNA Sequence Number=SeqID_9158
  Homolog annotation: Hit_ID=Q947D1; Match level="QueryCoverage=96%, HitCoverage=51%, E-value=1e-59, Identity=33%"; Hit description =Embryonic flower 1-like protein
MEAAALARRTRAVEELRRLSTVAESDDTPEQRLSTVAKSDGMPAEEQECDHFSLRGYVAMLQKKDPKLCSPHIFHSQPQYDEHHGSSPLLVSKYRRWDCSKCLERVKVSGHRPTSGNVSIEQDGMNDGCSISIVRILPNRVDPRRMFYCKQQSSQGNDQLTLSKTAQECNSKCSSPGNKAITAMNIPVAEENVLEALVERSVPATEDLQASPNNIDVSANILNVVPKDASDLPDDVQTISTIEENGTKNPCSPKLRVMPNEDESNIVQDVPNFDPNESNVCKPLSCHKGKQISGHKSSQVCNKGPRRASLKRKVGSDGKKKRDKSTDLPDISGLKFCQRKPKKMRLLSELIDADQVGISANAVQVDRTDSVDLCEGGKRKRHLEVGKDNDTPNQKLDKIQSRAVKNKAKHTAVDKVDDGPSLMNWLKNTHKKIRTDRKDSEHKNLDSSAISRSYPDIVASDDMYHDFIPSVGDVDQVKLPSTTSAKHGKVNAQNDNLEQNMQKVDESRNLKQRFFSSEKSTILLKRKVQSTSVAHDENIENSIIKRDMLRPDDVPQMGHEGSVQRCLAKV

SEQ ID NO: 50938 - protein, 86 aa, Zea mays
  Coding DNA Sequence Number=SeqID_9159
MTNRGRDGPYIYRWGSEEGPKFNCRFQSCMGPKIAYVCNYITFVYIAPSISLPLRTPFPPSFSSDCFQKIVEPSLTYGCDRGDDGL

SEQ ID NO: 50939 - protein, 198 aa, Zea mays
  Coding DNA Sequence Number=SeqID_9160
MRPDPANSDAENKVRDRGQEGHGPGSAIGAAIRSFGQQDTEQKFDAHREMDAESLKQTGAPLRAGESHGLETRRDGELPGRVAREEIRAGKMPGLGRGWARARGELGRDLGTGRARSSERRGAAQGAGRAGSFARPTMKEKGRAGMGQREARRRPSEGASAGIDSAGKQGDGLRAEQSAAKGCSAGARLEEERSAGRR

SEQ ID NO: 50940 - protein, 89 aa, Zea mays
  Coding DNA Sequence Number=SeqID_9161
MDWTGTPPAGWPGCRLPADGSAAQRPYVRLRPLAYVTGDSPRGSIGPPPERGVEAHWIKPGHVPHPRGPTCSLGSPGPYSEFQAMRTGI

SEQ ID NO: 50941 - protein, 255 aa, Zea mays
  Coding DNA Sequence Number=SeqID_9162
MSSSVNLNPGTSPLGHVWISLQETRGSGERNWDNRLIHGKLGVSLTKLPGEGVSGFLGHQILDQWPRTDPTGECAGAGAQLAGGPRRSAARGGGKADRSGPVTRAQGTDEQDPGVERGGGDRDWVPMGFNGSSRPSAAPLWPAMVRSPETRRARVLGGLGSPERARSDERNLTYLVVAWWRGRSGWVEGGGGAPTSNPGHGEGRLSASRLAFGTFGAKVWARGGATLAGCHGGTMDRRTTAAAISNSLQRSRIEA

SEQ ID NO: 50942 - protein, 157 aa, Zea mays
  Coding DNA Sequence Number=SeqID_9163
  Subcellular localization annotation: CTP_CleavageSite=77; ConfidenceScore=5.68e-01
MTTVVLSPLRKQGGVSRIPAAPSAALLQGSGTSPTATLSHTQGSSTSPTATLACTQGSTTSLPDTIASRKRIECKPKCNSVMFYLRPWHGRTPTLIRATQNGNTVAHEGAWSLGFERGGTEGLKGASTVAGRLGMALATYDGDGGTLCAWIGHDGAW

SEQ ID NO: 50943 - protein, 470 aa, Zea mays
  Coding DNA Sequence Number=SeqID_9164
  Homolog annotation: Hit_ID=Q5Z4L5; Match level="QueryCoverage=99%, HitCoverage=99%, E-value=1e-176, Identity=67%"; Hit description =Putative LYST-interacting protein LIP5
  Pfam annotation: Domain name=DUF605; Domain location=9-463; Score =458.3; E_value=9.5e-135; Accession=PF04652.6; Description=Protein of unknown function, DUF605
MGSESEPAKGLLPYLQRADELQKHEPLVAYYCERRFYPLVGRLYAMEKGLRIPQKERTKTTNSILISLMNQLEKARSYIRDKKSLTLGPDDNLHLEGFALNVFAKADKQDRAGRADINTAKTFYAASIFFEILNQFGELQPDIEQKQKYAIWKAAEIRKALKEGRQPEAGPPGGGKDEAPVNTTTISQDFSRRGSFSAVQPGNNLPPQSTEFNDHPSTQSPYSSPPPSQSQHPSPSQSYSSPSYQATDYPSSDIHKPSPNYSSSPYTSTDYPTNELHKPPSNYSPPPYTRTDHPSNDGYNPHSNDKPDVSAYPQAYQPPPYTIDPQHISQNYYSTKAPAAPYNYPNFQSYPSFQDSTSPSVPTEPTYQSSFYPATDGPAATSYTPASNSSAPTHYHSTADYSPQVTPPAAPPASQYKYDSSYQPEVEKIAEAHKAARFAVGALAFDDVSVAVDHLKRALDLLTNPSAEPR

SEQ ID NO: 50944 - protein, 117 aa, Zea mays
  Coding DNA Sequence Number=SeqID_9165
  Subcellular localization annotation: CTP_CleavageSite=41; ConfidenceScore=5.05e-01
MDCTVSNTIPPFGFKSASSGFQEKTTTTDCGFKVVNHAWLRVMLVRAHRGTWPHLCKAPLVRLELEHAMGLGWRLAVRNTSSAKGEAEAGTTYRAAFGAPHGTLPMDSREENMLTKA

SEQ ID NO: 50945 - protein, 279 aa, Zea mays
  Coding DNA Sequence Number=SeqID_9166
MSWEEKRSWCLVEVTTSAVRGGGPSMVQYCLGNTLGRPTKRIEIRVRPAQPHRRVPTSRTPAGAHSSRPPASNRSPARLQTAPGGAPAARSLGTLGAPAVRSGASLICLSDCLVPPGGRLQAACRLVPPRRRPAPHGCRLPLLPAWPHVCLSSCLLGCLLSASSCLLASCFCVSSCLIVTCETCEHRKVKDLKSYFSQASSGSRLSTRASGVCNEPEYKLEFKRIIVKIPMVKMLMVKSKIRKLDKCNCLDLLELDTTKHFIRYMVFGCKWIVIKMTTK

SEQ ID NO: 50946 - protein, 158 aa, Zea mays
  Coding DNA Sequence Number=SeqID_9167
MAERVVPRIPWFEAKVPPPPTTRWHDSAAELLPRREIPPAPVVRTHCASLRNARHSNHEHPELPTGWMGTRIIDSERWWVLCAALWPRWWMSTDYGGERFKEGARGGPQDPVFNPARSFARWARDLRRRRARHAQQSVEGGADPLDPPDSDVETATEK

SEQ ID NO: 50947 - protein, 129 aa, Zea mays
  Coding DNA Sequence Number=SeqID_9168
MAVVLRLRKKCSGERGPDEPAGEKANQGAFLVVGDRAELTGATDVAGSRSGARAGRDMAELIVEWAANVGERRRSCLVRVQGERARLRAQVSRGRWASGARALKGRGRAEVVGECADVGASTVGAWARG

SEQ ID NO: 50948 - protein, 328 aa, Zea mays
  Coding DNA Sequence Number=SeqID_9169
  Gene Ontology: Mol. function=unfolded protein binding; Cellular component=cytosol; Biological process=cellular protein metabolic process
  Homolog annotation: Hit_ID=Q75HJ3; Match level="QueryCoverage=99%, HitCoverage=58%, E-value=1e-151, Identity=84%"; Hit description =Putative TCP-1/cpn60 chaperonin family protein
  Pfam annotation: Domain name=Cpn60_TCP1; Domain location=1-312; Score= 45.3; E_value=7e-11; Accession=PF00118.14; Description=TCP-1cpn60 chaperonin family
MVLKGDAVGSIKRVEKAKVAVFATGVDSSATETKGTVLIHSAEQLENYAKTEEAKVEELIKAVADSGAKVIVSGGAVGEMALHFCDRYKLMVLKISSKFELRRFCRTTGTSALLKLSQPKPDDLGFVDSISVEEIGGSRVTVVRSEDGGNKVATVVLRGSTDSILDDLERAVDDGVNTYKAMCRDSRIVPGAAATEIELARRLKEFSFKETGLDQYAIAKFAESFELVPRTLAENAGLNPMDIISKLYEKHASGNAKVGIDLRGDDPEDGVCKDVSTVNVWDLYVTKFLALKYAADAACTVLRVDQIIMAKPAGGPARRDQPAGMDED

SEQ ID NO: 50949 - protein, 195 aa, Zea mays
  Coding DNA Sequence Number=SeqID_9170
  Gene Ontology: Mol. function=nucleoside-triphosphatase activity; Cellular component=membrane; Biological process=defense response
  Homolog annotation: Hit_ID=Q19PP7; Match level="QueryCoverage=75%, HitCoverage=10%, E-value=2e-14, Identity=31%"; Hit description=TIR -NBS-NBS-LRR type disease resistance protein
  Pfam annotation: Domain name=LRR_1; Domain location=23-44; Score =18.0; E_value=0.035; Accession=PF00560.23; Description=Leucine Rich Repeat
  Pfam annotation: Domain name=LRR_1; Domain location=46-72; Score=3.1; E_value=76; Accession=PF00560.23; Description=Leucine Rich Repeat
  Pfam annotation: Domain name=LRR_1; Domain location=74-95; Score =11.6; E_value=1.9; Accession=PF00560.23; Description=Leucine Rich Repeat
  Pfam annotation: Domain name=LRR_1; Domain location=97-119; Score =5.4; E_value=28; Accession=PF00560.23; Description=Leucine Rich Repeat
  Pfam module annotation: Pfam domain module=LRR_1::LRR_1::LRR_1::LRR _1; Domain location=23-44::46-72::74-95::97-119
RLSLRDCNLCEGDIPRDISGLSSLKHLDLRGNNFISIPASLTRLSKLGFLDLSNCNMCTLGEADIHSYISGLSSLVHLGLCGNNVISIPASLTGLSKLQFLGLSYCKMLKLLPEIPTRLGQVWLDGCSSLEVCNLVDSAAFRAINCFKLAENINALTLREVCNRTDKGAFRAINCFKLAENMNALTLLKEQLKVD

SEQ ID NO: 50950 - protein, 903 aa, Zea mays
  Coding DNA Sequence Number=SeqID_9171
  Gene Ontology: Mol. function=transmembrane receptor activity; Cellular component=membrane; Biological process=defense response
  Homolog annotation: Hit_ID=Q19PN8; Match level="QueryCoverage=92%, HitCoverage=76%, E-value=1e-126, Identity=35%"; Hit description=TIR -NBS-LRR type disease resistance protein
  Pfam annotation: Domain name=LRR_1; Domain location=316-338; Score =3.9; E_value=53; Accession=PF00560.23; Description=Leucine Rich Repeat
  Pfam annotation: Domain name=LRR_1; Domain location=379-400; Score =0.0; E_value=2.8e+02; Accession=PF00560.23; Description=Leucine Rich Repeat
  Pfam annotation: Domain name=LRR_1; Domain location=402-424; Score =9.4; E_value=4.9; Accession=PF00560.23; Description=Leucine Rich Repeat
  Pfam annotation: Domain name=LRR_1; Domain location=426-445; Score =5.4; E_value=28; Accession=PF00560.23; Description=Leucine Rich Repeat
  Pfam annotation: Domain name=LRR_1; Domain location=449-474; Score =7.6; E_value=11; Accession=PF00560.23; Description=Leucine Rich Repeat
  Pfam annotation: Domain name=LRR_1; Domain location=497-521; Score =9.4; E_value=5.1; Accession=PF00560.23; Description=Leucine Rich Repeat
  Pfam annotation: Domain name=LRR_1; Domain location=566-589; Score =7.7; E_value=10; Accession=PF00560.23; Description=Leucine Rich Repeat
  Pfam annotation: Domain name=LRR_1; Domain location=591-612; Score =14.9; E_value=0.29; Accession=PF00560.23; Description=Leucine Rich Repeat
  Pfam annotation: Domain name=LRR_1; Domain location=614-640; Score =11.7; E_value=1.8; Accession=PF00560.23; Description=Leucine Rich Repeat
  Pfam annotation: Domain name=LRR_1; Domain location=642-663; Score =17.2; E_value=0.06; Accession=PF00560.23; Description=Leucine Rich Repeat
  Pfam annotation: Domain name=LRR_3; Domain location=356-375; Score =22.3; E_value=0.0018; Accession=PF07725.3; Description=Leucine Rich Repeat
  Pfam annotation: Domain name=NB-ARC; Domain location=1-221; Score= -2.5; E_value=3.9e-10; Accession=PF00931.13; Description=NB-ARC domain
  Pfam module annotation: Pfam domain module=LRR_1::LRR_1::LRR_1::LRR _1::LRR_1::LRR_1::LRR_1::LRR_1::LRR_1::LRR_1::LRR_3::NB-ARC; Domain
  Pfam module annotation: Domain location=614-640::642-663::356-375::1 -221
MGGIGKTTLAKVAYTQMLPHFEDECFNFFNVHEGNAIISHRLSRKKVLVVLDDVDNVQHLKCLVGRRDWFSLGSRIIVTTRDEHLLRSYRIDDVYKPTTLNPNDALRLFNLKAFDSDTTPKYDFIELSKQVVHYADVLPLALEVLGSFLCGRDIIQWRSAIQRLKQDSNKEILDTLRISFDGLEEREKNIFLDIACFFNGEEKDLVMKVLDGCECFPDIGIDVLIKKSLIKVSDDNQYLRMHALLQEMGRKIVEEKCVDEPGKRCRLWKERDVHHVLTKNTVTEIIEGIIIDNQGESSKTLNLSDDVFSKMKRLRLLRVLCLSNCDDLKYLSDELRLLDWTKYPLRSLPSSFQPDNLVALLLPYSRIEQLWKRNRPLYKLKIINLKGSQNLIKTPNFTTAPYLEVLIMEGCTRLVDVHPSLGVLKRLKLLNMRDCKSLRSLPTKIGMESLETLILSGCSNLARFPEIDGKMEHLKTLHLYDYYKVEYLLESLHQAESLEELDLSKTAIKEPPSFISQLKNLKVLYFDGCKGPCKLKRNLLSLFKVSQRGRMNSIASMLPSLSGLSSLTKLAVRGCNLGEGDIPSAISCLSSLAFLDLRDNNFNRIPASLTGLSKLEELSLSSCGLCNMGEGDIPSDISGLSSLKVLYLNGNNFTSIAASLARLSNLQYLGAFANSRERFDVIIPGNEIPEWFSQQIGGSVIEIPLPLNIQNDSRWIGVAFCCIFGDDDGSEIKVIGGPTYIHSRYSGQSSSNGSVFQVKNSRKVDFSFLNFVGRCITKDHLYLRYFSALSLKDKCETNNLSLEMSFQSSPKGYPSVKVKKCGVRIMYEKDLEEIEELQCHAIQSSPNLEHIHHHSTENDGSAGSTSRVKRKRDIDVETEEEGPHPKRMQNIFNFITGRSGKKQ

SEQ ID NO: 50951 - protein, 1070 aa, Zea mays
  Coding DNA Sequence Number=SeqID_9172
  Gene Ontology: Mol. function=transmembrane receptor activity; Cellular component=membrane; Biological process=defense response
  Homolog annotation: Hit_ID=Q19PN8; Match level="QueryCoverage=85%, HitCoverage=87%, E-value=1e-166, Identity=37%"; Hit description=TIR -NBS-LRR type disease resistance protein
  Pfam annotation: Domain name=LRR_1; Domain location=503-526; Score =0.3; E_value=2.5e+02; Accession=PF00560.23; Description=Leucine Rich Repeat
  Pfam annotation: Domain name=LRR_1; Domain location=590-612; Score =8.0; E_value=9.1; Accession=PF00560.23; Description=Leucine Rich Repeat
  Pfam annotation: Domain name=LRR_1; Domain location=614-636; Score =8.1; E_value=8.7; Accession=PF00560.23; Description=Leucine Rich Repeat
  Pfam annotation: Domain name=LRR_1; Domain location=637-658; Score =7.2; E_value=13; Accession=PF00560.23; Description=Leucine Rich Repeat
  Pfam annotation: Domain name=LRR_1; Domain location=661-680; Score =7.6; E_value=11; Accession=PF00560.23; Description=Leucine Rich Repeat
  Pfam annotation: Domain name=LRR_1; Domain location=685-705; Score =14.2; E_value=0.47; Accession=PF00560.23; Description=Leucine Rich Repeat
  Pfam annotation: Domain name=LRR_1; Domain location=755-778; Score =10.6; E_value=2.9; Accession=PF00560.23; Description=Leucine Rich Repeat
  Pfam annotation: Domain name=LRR_1; Domain location=780-801; Score =15.5; E_value=0.19; Accession=PF00560.23; Description=Leucine Rich Repeat
  Pfam annotation: Domain name=LRR_1; Domain location=803-825; Score =6.0; E_value=21; Accession=PF00560.23; Description=Leucine Rich Repeat
  Pfam annotation: Domain name=LRR_3; Domain location=544-563; Score =26.1; E_value=0.00012; Accession=PF07725.3; Description=Leucine Rich Repeat
  Pfam annotation: Domain name=NB-ARC; Domain location=168-422; Score =77.9; E_value=3.1e-20; Accession=PF00931.13; Description=NB-ARC domain
  Pfam annotation: Domain name=TIR; Domain location=27-144; Score =106.0; E_value=1.1e-28; Accession=PF01582.10; Description=TIR domain
  Pfam module annotation: Pfam domain module=LRR_1::LRR_1::LRR_1::LRR _1::LRR_1::LRR_1::LRR_1::LRR_1::LRR_1::LRR_3::NB-ARC::TIR; Domain location=503-526::590-612::614-636::637-658::661-680::685-705::75
  Pfam module annotation: Domain location=803-825::544-563::168-422::27- 144
MAPDVDENKEKVEEAFTKHEERKKYDVFLSFRGEDTRKNFTHHLYDALNRTGIVTFRDDPKLETGEEIAPELFNAIQQSWCSELAEIVKQKNDKGHKVFPIFYHVDPSDLRKQKEKVEEAFAKHEKGYKEDKDKIQKWRNALTEVANIKGWHLKNRHESEFIRDVVKKISAKLCQTYPVVHDELVGISLHLEELYSKINIGEDDVRIIGICGMGGIGKTTLARVAYTQMLPHFQGNAIISHRLSSKKVLVVLDDVDNIQHLKCLVGRRDWFNLGSRIIVTTRDEHLLRSYRINDVYKPTILNPNDALRLFNLKAFDGDTTPKVDFIELSEHVVHYAGGLPLALEVLGSFLCGRDIVLWRSAIERLKQDSNKEILDTLRISFDGLEEREKNIFLDIACFFNGEEKDLVMKVLDGCGFFPDIGVDVLIKKSLIKVSDDNQYLQMHALLQEMGRKIVEEKCVDEPGKRCRLWKEMDVHHVLTKNTGIEQDVQFEHRYLLEDENLRLLKVFRVSNCDDHLKYLSNELRLLDWTEYPLKLLPSNFHPDNLVALLLPYSHIEQLWKGNRPLFKLKMINLKGSQNLIKTPDFTTAPKLEALIMEGCTRLVDVHPSIGVLKSLKLLNLRDCKSLRSLPTEIGMESLETLILSGCSNLARFPEIDGKIEHLKTLHLSGCFKVEYLPENLQQAESLEELDLSETSITEPPPFIFLLKNIKILSFNGRKGPSYKSRQNLPSLFKVIQGRGTNPLAPMLPLLSGLSSLRELKLRDCNLCEGDIPRDTSGLSSLTDLDLSGNNFISVPASLTRLSKLEFLYLINCKKLKYLPELLTSIGKVWIDGCASLEVVASPSKGCNLVGWATVRAINRFKLADALALLKKHLKAFPNPRKAFDIIIPGSEIPEWFSQQKSGSSIKIPLPINLRKDSQWIGVASCCSFVNNDASCDIEVIDCEAFIYCRNSEEASWNGSIFRGRNRRQIDWSGWLVGKRFNEPIMKDHLFLRYWPRNKLYPISMEDKYGDCETNNLWTTDCLDQKCDELELSFIKSSVKVKKCGVRIVYEKDLEEIKRVAVPYHSIFSKF

SEQ ID NO: 50952 - protein, 126 aa, Zea mays
  Coding DNA Sequence Number=SeqID_9173
  Subcellular localization annotation: CTP_CleavageSite=40; ConfidenceScore=5.04e-01
MPRGTPHGSAITAGGPSSFSLSSDATALGSRVGSWNLDLRETAEGSRHIWPRDEPASEGGACACYTRSTSGWEGEEIGSPQFRATGKQISVGATSLQSGPTWRRKQQHRRERSQHQPVSKINQFMI

SEQ ID NO: 50953 - protein, 107 aa, Zea mays
  Coding DNA Sequence Number=SeqID_9174
MANDSSTPMLESYLSETRSTVEMSPTQILAVHDIQRQMNVFNLPTLDRAGVHPSHGAAGLQRCGSASPMLLPRLECRSPLTTLGSRMRPDHGVVWTPRWSFESGDQS

SEQ ID NO: 50954 - protein, 137 aa, Zea mays
  Coding DNA Sequence Number=SeqID_9175
MTEEVSEIHIHPIRNQRRGSLYIFKMNRGLTGYNDGSGPGGSTTGMSASVRNYHRSFGNTAPERQREPRRRLGEASGHDRLTSAKAYAMVDYGGKLPLPSLSLLATVMDTRRRWRNYQGYIGMQVPGKRSADCGTSR

SEQ ID NO: 50955 - protein, 585 aa, Zea mays
  Coding DNA Sequence Number=SeqID_9176
  Gene Ontology: Mol. function=oxidoreductase activity; Cellular component=intracellular; Biological process=lignin catabolic process
  Homolog annotation: Hit_ID=Q2QUK8; Match level="QueryCoverage=94%, HitCoverage=84%, E-value=0.0, Identity=70%"; Hit description=Laccase family protein, putative
  Pfam annotation: Domain name=Cu-oxidase; Domain location=168-322; Score=176.8; E_value=5.5e-50; Accession=PF00394.12; Description =Multicopper oxidase
  Pfam annotation: Domain name=Cu-oxidase_2; Domain location=432-569; Score=189.5; E_value=8e-54; Accession=PF07731.4; Description =Multicopper oxidase
  Pfam annotation: Domain name=Cu-oxidase_3; Domain location=39-156; Score=225.8; E_value=9.2e-65; Accession=PF07732.5; Description =Multicopper oxidase
  Pfam module annotation: Pfam domain module=Cu-oxidase::Cu-oxidase _2::Cu-oxidase_3; Domain location=168-322::432-569::39-156
MAPRPWLSPLALPLGPSVALLVLACCCVAEASIVEHTFNVGNLSVSQLCQPPRVITAVNGQLPGPAIHAREGDTVVVHLVNQSPYNITIHWHGIFQRGTPWADGPAMVTQCPVKPGGNYTYRFNATAQEGTLWWHAHISFLRATVYGALVLRPRAGADAYPFPKPHAEETVVLGEWWNDNVYDLQQMAFLTGLPARSADAYTINGKPGDLYNCSDGNQTYRFQVRSNETYLLRIINAALNTPLFFKVANHSFTVVGADAAYTTPYETDVVVVAPGQTVDALMVAARAGGRYYMAASPYDSAIPQGPPFSDTTATAVVEYLGSDTDPTTPPTLPPRPEVNDTATAFRFLSNLTALVRPGQPTVPLSVDTRMFVTVGLGVSDCQPTQLLCNRSATVFSSSMNNASFVLPAPGKPSMLQAHYGGDGETAGVYTRDFPDRPPLVFDYTADASDTAALQYTAKSTRVRTLRFNQTVEMVLQNTRLIARESHPMHLHGFNFYVLAQGFGNYDEATATPRFNLVNPQERNTVAVPTGGWAVIRFLANNPGMWFMHCHFDNHLDLGLAMVFEVPDGPTPETSVPPPPADLPQC

SEQ ID NO: 50956 - protein, 146 aa, Zea mays
  Coding DNA Sequence Number=SeqID_9177
MPEAGTLLLVRDRLLWYCCLRMDGEASARLNSTSSWSWHRAACSNSNAESHRTPLGQRTRLSRTRGADVDRAQTRARGNQSMQPGKLRCAPLSTAARSSSHTAAHGSRRRSLSKPTKYALPNQYFSACLLLEGQKCFLDHKYMDTN

SEQ ID NO: 50957 - protein, 300 aa, Zea mays
  Coding DNA Sequence Number=SeqID_9178
  Gene Ontology: Mol. function=zinc ion binding; Cellular component =integral to membrane; Biological process=carbohydrate metabolic process
  Homolog annotation: Hit_ID=Q1SJT9; Match level="QueryCoverage=78%, HitCoverage=89%, E-value=3e-71, Identity=51%"; Hit description=Zinc finger, DHHC-type
  Pfam annotation: Domain name=zf-DHHC; Domain location=103-167; Score =76.2; E_value=1.1e-19; Accession=PF01529.11; Description=DHHC zinc finger domain
MSVNVKEDDSLNFHILIGGLILTVLVGKLGIAMPDLSLSLVSRMQDLSFLFLTSSGDPGIIPRNSKASEPSSEESKKSPQGPPCDWAINKTNLKIPKVKDVVLKNGQTVKVKFCETCLLYRSPRASHCSICNNCVQKFDHHCPWVGQCIGLGLWTAMSRDVLSVILIVYCFLAVWFVGGLTVFHFYLICTNQTTYESFRYRYDKKKNPFNKGVLRNFKEVFLTRIPSSELNLRAWVSEDGNLSIKDDKSNKFDMEMGLKHNQDSAKFPSHWQRFDYDGFDNSLKGKDGEFDDKPKSSSKM

SEQ ID NO: 50958 - protein, 101 aa, Zea mays
  Coding DNA Sequence Number=SeqID_9179
  Gene Ontology: Mol. function=DNA binding; Biological process=DNA integration
  Homolog annotation: Hit_ID=Q9LL12; Match level="QueryCoverage=58%, HitCoverage=50%, E-value=1e-14, Identity=61%"; Hit description =Integrase
MARAEGVEIFRDSKLVISQLTEDYKYESKSLFQIWMECRLRGMNMIGKINPLSRKGHKWTLAIIDYFTKWVEAVPMIMKSVAMKDVISFVREHAIHRFGIP

SEQ ID NO: 50959 - protein, 117 aa, Zea mays
  Coding DNA Sequence Number=SeqID_9180
  Subcellular localization annotation: CTP_CleavageSite=46; ConfidenceScore=5.35e-01
MAPSIGSKRANKISGGPNNDARHEMAASILSSTRRCTGRAHRSPVRSGGGKTTAGVEEVARQGDMAAGVEDEVRWGSLSTWRRMHNGESRPADSEVLGGDVEEVARSSAMGAKTARS

SEQ ID NO: 50960 - protein, 694 aa, Zea mays
  Coding DNA Sequence Number=SeqID_9181
  Gene Ontology: Mol. function=ion channel activity; Cellular component= integral to membrane; Biological process=ion transport
  Homolog annotation: Hit_ID=Q6K6P3; Match level="QueryCoverage=99%, HitCoverage=100%, E-value=0.0, Identity=80%"; Hit description =Putative cyclic nucleotide-gated calmodulin-binding ion channel
  Pfam annotation: Domain name=Ion_trans; Domain location=140-413; Score=21.8; E_value=0.00078; Accession=PF00520.21; Description=Ion transport protein
  Pfam annotation: Domain name=cNMP_binding; Domain location=514-614; Score=33.0; E_value=1e-06; Accession=PF00027.19; Description=Cyclic nucleotide-binding domain
  Pfam module annotation: Pfam domain module=Ion_trans::cNMP_binding; Domain location=140-413::514-614
MASGASRNVRFQNEIEVQSFRTSPLQSLSRKHGKAHDPRKCRLGFRGGCLEKACRNRKPMLKDRVLSRAFSEELESLMHAAGGSHLFFDPRGQLIHLWNKIFLSACLLSLFVDPLFLYLTGTQRNTCVEFKDSLALTLSMVRSLLDLFYAAHILFRFRTAFIAPSSRVFGRGELVIQPYEIARRYLGRTFWFDLVTALPLPQFVIWIVIPRLNEYSRTANTKNILRFSIIFQYLPRLFQIFPLSGRIVMATGVMTETAWAGAAYNLILYMLASHVLTSTVLGALWYLFSVQRQEACWREACLLVSPTSQTMFFDCKALSSNRTIWYELSNITTSRCTPGNGFYPFGIYEEALYAKLTSSSFTQKYFYCFWWGLKNLSSLGQNLSTSLFIGEITFAIVVGVLGLVLFGLLIGNMQSYLQATMVRLEEWRTKRTDMERWMHHRQIPQPLKQCVRRYHQYQWVATRGVDEEALLQDLPMDIRRDIKRHLCLDLVRRVPLFDEMDERMLDAICERLRPALYTRGTRLMRELDPVDSMLFIIRGYLDSYTTQGGRSGFFNSCRIGAGEFCGEELLTWALDPRPAAKLPLSTRTVRAVSEVEAFALVADDLRFVASQFRRLHSARIRHRFRFYSHQWRTWAACFIQAAWRRYKRRRASMELRVREVRAGGSLLRSRRHSIEGKASIRKPMEPDFTVEEED

SEQ ID NO: 50961 - protein, 33 aa, Zea mays
  Coding DNA Sequence Number=SeqID_9182
MVAGRESKEELMRGDVKSLNIKTDPISAFSVAG

SEQ ID NO: 50962 - protein, 334 aa, Zea mays
  Coding DNA Sequence Number=SeqID_9183
  Gene Ontology: Mol. function=catalytic activity; Cellular component =integral to membrane; Biological process=response to nematode
  Homolog annotation: Hit_ID=Q6K225; Match level="QueryCoverage=99%, HitCoverage=100%, E-value=1e-131, Identity=75%"; Hit description =Phosphate translocator-like
  Pfam annotation: Domain name=TPT; Domain location=162-287; Score =110.8; E_value=4e-30; Accession=PF03151.7; Description=Triose -phosphate Transporter family
  Subcellular localization annotation: CTP_CleavageSite=38; ConfidenceScore=5.35e-01
MTAGFQLGVIGSLTLSVASSVAIVICNKALISTLGFPFATTLTSWHLMVTFCTLHVAQRLRFFEPKAIDGQTVVLFGLLNGTSIGLLNLSLGFNSIGFYQASPLLFLLLFLLIEYEGSNSVCSADDEVGHNTLHGAVGDYIPEEKIQETRPVPSIYRYDKYVLLQYARKLKVSSTQLLYQSAPYQAAILFATGPFVDHLLTGRSVFAHRYTFPVVGFIVLSCLIAVSVNFSTFLVIGTTSPVTYQVLGHLKTCLVLSFGYTLLHDPFTVRNILGILVAIFGMALYSIFSVREGKKKSAGDALPVSQMPDKETEPLLATKDNSDTKKANGVAHDC

SEQ ID NO: 50963 - protein, 480 aa, Zea mays
  Coding DNA Sequence Number=SeqID_9184
  Gene Ontology: Mol. function=transferase activity, transferring glycosyl groups; Cellular component=integral to membrane; Biological process=metabolic process
  Homolog annotation: Hit_ID=Q6Z481; Match level="QueryCoverage=99%, HitCoverage=99%, E-value=0.0, Identity=74%"; Hit description =Putative glucosyltransferase
  Pfam annotation: Domain name=UDPGT; Domain location=4-475; Score= -30.7; E_value=4.5e-09; Accession=PF00201.9; Description=UDP -glucoronosyl and UDP-glucosyl transferase
MATPALVLLPEWGSGHLMSMLESCKRVLLSSSGGKAFSITLLVMRPPTAEATSEVEAHVRREAACGLDIRFHRLPAVEAPTDAVGVEEFIARYIGLHAPHVRDAVAAMACPVAALVLDLFAAPLVDVARGLGVPSYVFMSSTGAMLALMLHLPVLHESVPAVDFDEMEGDVPLPGLPPVPPDSMPCPVADKRSPNYACFVRLGDRFMDATGVIANTADELEPGPLAAVARGRCVPGRPAPPVYPIGPVLSLGGRSPSHECVAWLDAQPPGSVAFLCFGSMGWFDPPQVAEITAALERCGHRFLWVLRGPPSDASGSEHPTDANLDELLPEGFLERTGGKGLVWPTWAPQKEILAHPAVGGFVTHGGWNSVLESLWHGVPMAPWPLYAEQHLNAFQLVADMGVAVPLKVDRKRGNFVVAAELERAVRSLMDADGEQGRRAREKAARMKAVCRKAVEEGGSSHAALQRLAEALHDGAVIPKK

SEQ ID NO: 50964 - protein, 159 aa, Zea mays
  Coding DNA Sequence Number=SeqID_9185
  Homolog annotation: Hit_ID=Q6QP51; Match level="QueryCoverage=87%, HitCoverage=53%, E-value=4e-26, Identity=74%"; Hit description =Putative growth-regulating factor 1
MKLQKVVPKGAQSQVRARRGLLLRLRSGEDAIPPKVEVEAEPWGRARRRPPSEVEVEAEPWGRARRRPPSEAEAGAKPWGQARRRPPSEVEAGAESWGRARRSFLLRLRLNSAAVSLNLAGGTAVGEGRAALFSCQVSQREGEVIAVTSTLPTEAHVSG

SEQ ID NO: 50965 - protein, 203 aa, Zea mays
  Coding DNA Sequence Number=SeqID_9186
  Gene Ontology: Mol. function=protein dimerization activity
  Homolog annotation: Hit_ID=Q2QRD1; Match level="QueryCoverage=36%, HitCoverage=6%, E-value=1e-11, Identity=52%"; Hit description=HAT family dimerisation domain containing protein
  Pfam annotation: Domain name=zf-BED; Domain location=150-200; Score =30.3; E_value=6.6e-06; Accession=PF02892.5; Description=BED zinc finger
MKHDYFDTTRARHDIIVPGSARGPSWVVLGLRGKPVGQHAHGTISDDPISPLIGPFGPKSPARPGPVHLWPDYQAAQPARPAQSAATAGLSTNDDGRVPGLSSDDCNAEGEAAMLGSTPSCPASLDGEGASLESTAGGDNKRMRTRASTSEVWKDLKPLFKILNGKQVRYAAVCKICNVELSAKSTGGTGNLLRHVAACMVDA

SEQ ID NO: 50966 - protein, 261 aa, Zea mays
  Coding DNA Sequence Number=SeqID_9187
  Gene Ontology: Mol. function=acyltransferase activity; Cellular component=mitochondrial membrane; Biological process=photorespiration
  Homolog annotation: Hit_ID=Q2V987; Match level="QueryCoverage=99%, HitCoverage=98%, E-value=1e-102, Identity=68%"; Hit description =Transcription factor APFI-like
  Pfam annotation: Domain name=Hexapep; Domain location=100-117; Score =2.6; E_value=69; Accession=PF00132.14; Description=Bacterial transferase hexapeptide (th
  Pfam annotation: Domain name=Hexapep; Domain location=128-145; Score =15.3; E_value=0.23; Accession=PF00132.14; Description=Bacterial transferase hexapeptide (th
  Pfam annotation: Domain name=Hexapep; Domain location=151-168; Score =11.6; E_value=2.9; Accession=PF00132.14; Description=Bacterial transferase hexapeptide (th
  Pfam annotation: Domain name=Hexapep; Domain location=70-87; Score =4.3; E_value=43; Accession=PF00132.14; Description=Bacterial transferase hexapeptide (th
  Pfam module annotation: Pfam domain module=Hexapep::Hexapep::Hexapep:: Hexapep; Domain location=100-117::128-145::151-168::70-87
MAGLGKAMYAVGFWIRETGQALDRLGCRLQGKYFFHEQISRHRTIMNIFDKTPHVHRDAFVAPSASLIGDVQVGQGASIWLGAVVRTVSLTHQAVGDANNIQIGSGTNIQDNSLVHVAKSNLSGKVFPTIIGNNVTIGHSAVLQGCTVEDEAFVGMGATLLDGVVVGKHGMVAAGSLVWGGNPAKFLRKLTDDEIAFITESASNYSNLSKVHAAENAKPLEKIEFEKVLRKKFAHQDEEYDSSIGITRGSPPELTSPNPAQ

SEQ ID NO: 50967 - protein, 187 aa, Zea mays
  Coding DNA Sequence Number=SeqID_9188
  Gene Ontology: Mol. function=DNA binding; Biological process=DNA integration
  Homolog annotation: Hit_ID=O24587; Match level="QueryCoverage=65%, HitCoverage=11%, E-value=9e-60, Identity=92%"; Hit description=Pol
MASDSSWSRVKQLKDGTFHLPNEVQQNLLKRFGMKDVSPQRLDGDRRTHRPQRRRSPGVHGTLRNQTSVALSHPLRPEYVAAGQCCAQLLWMRQTLRDFGYIRSKVPLLCDNESAIRMAENPVEHSRTKHIDIRHHFLRDHQQKGDIEVFHVSTENQLADIFTKPLDEKTFCRLRSELNVLDSRNLD

SEQ ID NO: 50968 - protein, 78 aa, Zea mays
  Coding DNA Sequence Number=SeqID_9189
  Subcellular localization annotation: CTP_CleavageSite=27; ConfidenceScore=5.11e-01
MRLSQNTLSTKLPAKVSMSVFMALWVRRAQLKGRDGQFCQGRGVGAGERKAAAQPEVEEGPYGWGPCARERERGGEGN

SEQ ID NO: 50969 - protein, 64 aa, Zea mays
  Coding DNA Sequence Number=SeqID_9190
  Subcellular localization annotation: CTP_CleavageSite=20; ConfidenceScore=5.36e-01
MARPGQFLGVAVCVSPARPRARVRLGLRSLDSAFARPRRSSSIAILVLPRELVQPSAVVAELFN

SEQ ID NO: 50970 - protein, 98 aa, Zea mays
  Coding DNA Sequence Number=SeqID_9191
  Subcellular localization annotation: CTP_CleavageSite=4; ConfidenceScore=5.01e-01
MAMMGSTSKKMYLCQVKKQQTFVASVPRWYQKKRIKNKAAGGKGQFQEGEEGWTMSRTTTTTFASANNYESRMTQNQERGNDEDMTHTNTTIDYKLNF

SEQ ID NO: 50971 - protein, 205 aa, Zea mays
  Coding DNA Sequence Number=SeqID_9192
  Subcellular localization annotation: CTP_CleavageSite=19; ConfidenceScore=5.30e-01
MAATSSFAWGRKGHGAAVVGQGASARQRSAVAGVHRRLVNGEGRTDEKEKEVRWGNSPRMRRGWRRSSERRWWTTVRNSRGALHEGSEAQWARWRESSDKLGCGRVQLGWGRWDKGNEMGREVGVHSDFKGGRGSSFVQGCDVGVTTLACMHVACVVERLKEGRGLSGDQWVGVSRAVPPVREGGSTRTAGVGRKAEGRGISGLF

SEQ ID NO: 50972 - protein, 156 aa, Zea mays
  Coding DNA Sequence Number=SeqID_9193
MALRNNGPGAFREAFLPSSGPEGYPSPTVVIVTSDWRVLKRVHEVLPEWLSALRYHFKTSSSSSLSPPRDLLILLEIVVSTALPFDLPTSVVSAVLRPPPLPLHRIHDPPPLPPRRLCSSDRLVTVVAPVSARLMPQSSKLFERCSRKSPEKMRLL

SEQ ID NO: 50973 - protein, 116 aa, Zea mays
  Coding DNA Sequence Number=SeqID_9194
MPPPGAHTQHPCSPRGCPHQRHFCAWIDGDRARDETTSIHVRLANAGTPPNPSGGTRGVRAKHDETAQDTREDDNSPAEDEQEQETTRQMDDDEGKQESGGRGAVGDEFQLDEDLR

SEQ ID NO: 50974 - protein, 102 aa, Zea mays
  Coding DNA Sequence Number=SeqID_9195
MSRRPRGWCDGRRCTRGKGHVSRAGEGEVTTSGRGTTVARHLLGQRLGVGIARLRVKTRVGGVGAEALPRPVGELADAWAGASGVDAFVVLLKLDLRGSEIK

SEQ ID NO: 50975 - protein, 291 aa, Zea mays
  Coding DNA Sequence Number=SeqID_9196
  Homolog annotation: Hit_ID=Q4WST6; Match level="QueryCoverage=74%, HitCoverage=45%, E-value=4e-07, Identity=35%"; Hit description =Verprolin
MAAGRLPGRARQRGAHRGRGRVARQAGPLAAGRWPLGVRERAWGDGRSPLGAWGDGRCPLGAWAAAAVRIVAWASDCPRSRLHPPARPTFGNLAALPTASSNNAGNAANPAARSSSVASTAHSMRAPSPLCSRPRVAQISSGSSPRAPSDLDPWRVDLPAAPRPCPGSRLLSLPYIVLPQYRARGHDNVVIAVPHHRRGPQHRHIVASAFPVSIVVATSTNKCLHCVELSAWSRHEFLNSPWVRVRELLNQLCHPTAPIAIRQPSSIPRAPLKSGGAHPCLPHAQPPPPSP

SEQ ID NO: 50976 - protein, 132 aa, Zea mays
  Coding DNA Sequence Number=SeqID_9197
  Homolog annotation: Hit_ID=Q1EMP9; Match level="QueryCoverage=55%, HitCoverage=37%, E-value=3e-10, Identity=46%"; Hit description =Jacalin-domain protein
MASTKDFSFVSAFRLPFVLKFFRDVKRVREQGAIDDRDTFLHAIGDLLCFHSRRSVWLETHGGTDGGYETDKVKLDFLDKVLASVSGHYGSICGTSVIIRSLTFWSNSSMYGPFSTKDGTLFLLPVSSIKII

SEQ ID NO: 50977 - protein, 187 aa, Zea mays
  Coding DNA Sequence Number=SeqID_9198
MSSPTSHLSLPSPQSRNGAYGFIGGDARPDMVLLVQGRGDSYAVYTSNHPKQQYTNTSPDYNDGALWIKIVSVPSYYGDAGAAAMSTSLRPMAPRINLTRAMGISSIKVLYDRNGHAVWGNKHGFSGGVIPDKVLRFSNNHGADHGQVSDVSHEQAGVWVILGLGVRVYPKIRVGLFGFFKFRVFNS

SEQ ID NO: 50978 - protein, 140 aa, Zea mays
  Coding DNA Sequence Number=SeqID_9199
MGGVPQPPLVPRQEQPPLEQPPLVPRQGLRTAGQGRQDSGVRVGWIGRFRFRSRLPTGPWAVELALGLAPGGLLVEWISGRMGTSGTAGCLWHGERTGSDGTRAMGWGGRLGMGRLGLQEREADLCHERSIHRVDTDRVS

SEQ ID NO: 50979 - protein, 51 aa, Zea mays
  Coding DNA Sequence Number=SeqID_9200
MAELPPWENVRERLSVRVGFGDKGVGWLADKRRVKIRPSQAADWGLPPTHT

SEQ ID NO: 50980 - protein, 70 aa, Zea mays
  Coding DNA Sequence Number=SeqID_9201
  Gene Ontology: Mol. function=3-deoxy-manno-octulosonate cytidylyltransferase activity; Cellular component=cytoplasm; Biological process=lipopolysaccharide biosynthetic process
  Homolog annotation: Hit_ID=Q9M4G3; Match level="QueryCoverage=95%, HitCoverage=17%, E-value=1e-12, Identity=63%"; Hit description=CMP -KDO synthetase precursor
GFHSRFLKIYLELPPIVQPLQMEEDLEQLKVLENSYRMKFKNELADDKYLRTEVIKVEQNARGVDAPEVH

SEQ ID NO: 50981 - protein, 248 aa, Zea mays
  Coding DNA Sequence Number=SeqID_9202
  Homolog annotation: Hit_ID=Q2QUG4; Match level="QueryCoverage=16%, HitCoverage=6%, E-value=2e-11, Identity=85%"; Hit description=3 -hydroxyisobutyryl-coenzyme A hydrolase, putative, expressed
  Pfam annotation: Domain name=KH_1; Domain location=56-108; Score =24.1; E_value=0.0005; Accession=PF00013.19; Description=KH domain
MSVELRNGQTPVAKGGRAVDAVTGTAQQSGVCKCDGKCTILYVQPLPVFHRSVSLSEKVVRQLKGMQTKSGARIQLIPQHPPEGVTLTERIVRVTGNKKQIEAAKDLIKQAMNQAGYASSAPAASQSLPMARQDTPSHLQILQVMISLQHQRRLRAVMLRPLQIHNSLLQQKGSRHSLLLLLLDMVLAGSGRHELCLPNFDDSKVRLDIRFWRVFECLHLLDGMYEPRLPNFDDSKGFTPLSKEIVTP

SEQ ID NO: 50982 - protein, 76 aa, Zea mays
  Coding DNA Sequence Number=SeqID_9203
MEKQSHQVTTQKQFAKHSAHQAVPCPHPLEGDAQEFSIDFPKQSRPYSMCNEYINTKRRYRQKIKGKPKIADEIQV

SEQ ID NO: 50983 - protein, 508 aa, Zea mays
  Coding DNA Sequence Number=SeqID_9204
  Gene Ontology: Mol. function=oxidoreductase activity; Cellular component=integral to membrane; Biological process=electron transport
  Homolog annotation: Hit_ID=Q67WG3; Match level="QueryCoverage=91%, HitCoverage=90%, E-value=1e-174, Identity=65%"; Hit description =Putative cytochrome P450
  Pfam annotation: Domain name=p450; Domain location=38-499; Score =410.6; E_value=2.3e-120; Accession=PF00067.12; Description =Cytochrome P450
MAALPVHPFLLLPLVAVISFLWLRLAALSRRGSGPRLPPSPWALPLIGHLHHFAGALPHRAMRDLAARHGPVMLLRLGGLPVVVASSADAAREVMKTRDLEFATRPVTRMVRLAVPEGAEGIIFAPYDDRWRQIRKICTVELLSARRVQSFRPVREEEVWRLVRSVAAAAPSARAVNLSELLAVYAADSSVRATIGSRFKDRDTFLSMLQRGLELFANMSLPDFYPASRLALLVSRMPGRMKRHRQEVVAFMDAMVQEHAESRVPDGDDDKEDFLDVLLRIQREGDLQIPLTTDNIKSVVGDMFAGGSETPATALQWIMAELMRNPRVMKKAQDEVRQAVAAAGRQRVTEDDLSNLRYMHLVIKEGLRLHPPLPLLLPRECRSSCQVQGFDVPAGTMVFVNAWAIARDPSHWDRPEEFVPERFESSSVDFKGTDFDYLPFGAGRRMCPGMAFGLVSMELALASLLYHFDWELPPGMTAADVDMTEKMGVTARRLHHLLLVPSARVPVT

SEQ ID NO: 50984 - protein, 274 aa, Zea mays
  Coding DNA Sequence Number=SeqID_9205
  Gene Ontology: Mol. function=monooxygenase activity; Biological process=electron transport
  Homolog annotation: Hit_ID=Q1S6E0; Match level="QueryCoverage=82%, HitCoverage=84%, E-value=1e-20, Identity=31%"; Hit description =Ubiquitin system component Cue; UBA-like
  Subcellular localization annotation: CTP_CleavageSite=38; ConfidenceScore=5.05e-01
MAATTVASRKRGTAAFLDDPFSFPGDLPCLQTKRGRCSSSIVAADLGLSFPLEFDPVEALHLIFPGEDRQVLQNHLQASGNVLDAAIRAYKDYLAERSKESASAINYVPSDNEEGDSILSESESDVYLKEETIPTNCSGWAEVIVKEMSSASDLTDAKNRAFKILKLFEKSADRSSSPDEKREVNKEHEIVKQMLGSLLHQNGVLKRAFLIQHNRLKEYQEMVQERSQFNQILEKYREQIKALEQGHSANPYMLLHLHATTCVELGRKIGSAKS

SEQ ID NO: 50985 - protein, 168 aa, Zea mays
  Coding DNA Sequence Number=SeqID_9206
  Gene Ontology: Mol. function=catalytic activity; Biological process =metabolic process
  Homolog annotation: Hit_ID=Q9LJQ4; Match level="QueryCoverage=49%, HitCoverage=20%, E-value=2e-15, Identity=54%"; Hit description =Muconate cycloisomerase-like protein
  Subcellular localization annotation: CTP_CleavageSite=77; ConfidenceScore=5.58e-01
MIRPCSAPSPPPSQPLATTPPPPFGGVAHEGTRPIHRQQPATATTRLCAVLPSPSSPSRVGSFGFDALKETFSVDVSATGARPLRVPLVAPFTIASSRLAALSNVVVRVDLRSGAVGWGEAPVLPSVTAGDQPTALGAAGRTYAAMPRRGRSGAAAPLLPGLARDAPP

SEQ ID NO: 50986 - protein, 260 aa, Zea mays
  Coding DNA Sequence Number=SeqID_9207
  Homolog annotation: Hit_ID=Q208N4; Match level="QueryCoverage=22%, HitCoverage=10%, E-value=3e-25, Identity=98%"; Hit description =Putative calcium/calmodulin dependent protein kinase
  Pfam annotation: Domain name=Pkinase; Domain location=6-216; Score= -97.1; E_value=0.009; Accession=PF00069.15; Description=Protein kinase domain
MVQMNGRRQAAAGSAASDPDPAAPVFPVWARTPSECLAELGVSADRGLSSEEAAARLQRHYSEFDAAGVVRQIARGLQALHGAGVVHRDLKPENCLFADRGEASTLRIMDFGLSSVCLVWLALALSSTAAYFFPCVVVLLLFPLPSLPLYPTTRALPAKPWIRTMRSAKTSQCSSSATRVADDRVRCLRVDVISGVLSRDNIAMDALAVSQQHPLRFQEAAPPFLHPLRSAEEERKSGHGREELSLCGTKEMDDDGVDEG

SEQ ID NO: 50987 - protein, 135 aa, Zea mays
  Coding DNA Sequence Number=SeqID_9208
MAHAESHASPHRKVSTTDGEAPKLVTRVQRAAAHDEERIRGGDPRRQGISLATAGALPISLSPSCYEASPTPTQPYWHLNPTIDEYPRQRSHGDGNLPPRRLPVRNLGQRRRVWVGELREERGSAFSIVHAESVG

SEQ ID NO: 50988 - protein, 97 aa, Zea mays
  Coding DNA Sequence Number=SeqID_9209
MGKEAWLRHAEKLRSEDRALRRYGGSTARELRGEGELGWEEWKTTRLSEGEDQWLQTNNLSDGKRRQQITSPTNRTLDRSVIDDLLENQISIKNSRM

SEQ ID NO: 50989 - protein, 79 aa, Zea mays
  Coding DNA Sequence Number=SeqID_9210
  Subcellular localization annotation: CTP_CleavageSite=53; ConfidenceScore=5.02e-01
MTPLEAVAVHDGPPWGLSPVPPVFQGQGSAQTYAVHYVGTLLGLASPRLNPLTAAQAHGVKVACLFVSRVTLSLRQPAE

SEQ ID NO: 50990 - protein, 144 aa, Zea mays
  Coding DNA Sequence Number=SeqID_9211
MVEEQVPGAGTLGPGAHELREQLGRAGRWGGAAGLEAGERDRRDTGGATTTGCRKEAELGLQGAMGDGHKEEQPTRWRSSGRAELDYATRADEPEQGDAAMAGEGRSAWSRTGAGRKTRRHGSRGAEGARTHSAERKKSVARRR

SEQ ID NO: 50991 - protein, 69 aa, Zea mays
  Coding DNA Sequence Number=SeqID_9212
  Subcellular localization annotation: CTP_CleavageSite=47; ConfidenceScore=5.25e-01
MEPARSVLPSLRPAGARSVPLFLRVLPQSKKSQASGEDGASSMVFIECVTKSSNKSSSVILVHPKPPKP

SEQ ID NO: 50992 - protein, 64 aa, Zea mays
  Coding DNA Sequence Number=SeqID_9213
MALGQGYSRSNISGYVSTYTKFCVWDKVEGQDHEPNTLIDITSLLPTGEHGRGKSAGIWHKMEK

SEQ ID NO: 50993 - protein, 128 aa, Zea mays
  Coding DNA Sequence Number=SeqID_9214
  Subcellular localization annotation: CTP_CleavageSite=52; ConfidenceScore=5.03e-01
MTPVALSPLRQQGDVSRVLAALQALSAPSSPQPPLTHVPAHARRTGHVACPRAQLLFEPHPHPLSLPCLILPMLALSHALPPPPVLAGDPCPPCRPSSPPEVTSGRPEHRPEVRNSLSCSVSFNSAPP

SEQ ID NO: 50994 - protein, 129 aa, Zea mays
  Coding DNA Sequence Number=SeqID_9215
MYGQNENFDGRIYALSAGYYDAYYKRAQQVNVNLAGLLASVVPCGFVEGGAAGLLVGLQIMGSPFCEGSSLNSGVGLVISIMDLVLDCYLLFSTVVKLSSVFKLSTIEVACVVAFVQCNHYVLPFSISL

SEQ ID NO: 50995 - protein, 192 aa, Zea mays
  Coding DNA Sequence Number=SeqID_9216
MRFPGLRHMTVCSRHGKGMVLIWHVVFSGNLPILRFLLDHGDDLHEEGSLEGKSMVLIWHVVFSGNLPILRFLLDHGDDLHEEGSLEELFLFVSFMLYGWHLQAISLFAPSIFFYLTSTIVWLAIWHLQALWKSAFAVDRCAKEPLLRWCTGQSGGVLDSPVNYSGAALEKPETAEFDPVRSWCTGQSSAPD

SEQ ID NO: 50996 - protein, 119 aa, Zea mays
  Coding DNA Sequence Number=SeqID_9217
  Homolog annotation: Hit_ID=Q2QU58; Match level="QueryCoverage=85%, HitCoverage=22%, E-value=8e-08, Identity=32%"; Hit description=Zinc knuckle family protein
  Pfam annotation: Domain name=zf-CCHC; Domain location=64-81; Score =23.8; E_value=0.00012; Accession=PF00098.13; Description=Zinc knuckle
MGKKLEKGIIIPYTYLHQEKKVPRATKKQVKNMGKDKCNNSSVHVDCANNVSISFKNRKRRGNKICYKCKKKGHMIASCPHMENQSLASPNMTNIKKENEKQMPSNTRTAFAIVVKRPS

SEQ ID NO: 50997 - protein, 131 aa, Zea mays
  Coding DNA Sequence Number=SeqID_9218
MAMGRPSRELEGEVTGAHQGATGRALGSRAEGGAAGRAMGGEVKAPANQAEERAGSGGRDQNGSREELRVPEERATMDEQSRGWGRARKGARREGGWGRGIPSELAMGELSELERAATLWRRRSLERSQIF

SEQ ID NO: 50998 - protein, 97 aa, Zea mays
  Coding DNA Sequence Number=SeqID_9219
METRSNNSIVPGRARDGLGGHGHGRAGWDAKVARHNDSLTIEHEPHIESPSRAPGQQRGIPDGTQDMLHDWRRLNAGTHDGLGRPRELETGTDSVGT

SEQ ID NO: 50999 - protein, 193 aa, Zea mays
  Coding DNA Sequence Number=SeqID_9220
MVARAGTHCARRGRANHAGTRKAALGHAQGLPGKGAGLPGACRAAERRGGAAGGGTADGEGCGAAGREPPLGRGAGRRANAGARARGRGRREQPLGRGAGHGVRAARRGRVRPPGRGAARRGTLGEGVAGARAGERKGGAHGGKREGRERKRERGRAHLGDPNPAITVTKSPRAQRGREREVGERELLRGKIE

SEQ ID NO: 51000 - protein, 68 aa, Zea mays
  Coding DNA Sequence Number=SeqID_9221
MEGVSAVAFHGGDTVFRDSGCSIGQHGKQHEAKGMPKQKFDGYELTQGKLAMVGFFTVATMTAPREIR

SEQ ID NO: 51001 - protein, 448 aa, Zea mays
  Coding DNA Sequence Number=SeqID_9222
  Gene Ontology: Mol. function=RNA-directed DNA polymerase activity; Cellular component=mitochondrion; Biological process=RNA-dependent DNA replication
  Homolog annotation: Hit_ID=UPI00005A975E; Match level="QueryCoverage =86%, HitCoverage=22%, E-value=0.0, Identity=87%"; Hit description =PREDICTED: similar to Retrovirus-related Pol polyprotein from transposon 297
  Pfam annotation: Domain name=rve; Domain location=160-319; Score =122.3; E_value=1.4e-33; Accession=PF00665.16; Description=Integrase core domain
MSPRHPRFGPRYPRPPKGEALRIDEERSGVTPNRNWQTPYLQYLHRGELPLDRAEAQRLARRAKSFVLLGDKKELYHRSPSGILQRCISIAEGQELLQELLLGACGHHTAPRALVGNAFRQGFYWPTAVADATRIVRICEGCQFYARQTHLPAQALQTIPITWPFAVWGLDLVGPLQKAPGGYTHLLVTIDKFSKWIEVRPLNSIRSEQAVAFFTNIIHRFGVPNSIITDNGTQFTGRKFLDFCEDHHIRVDWAAVAHPMTNGQVERANGMILQGLKPRIYNDLNKFGKRWMKELPSVVWSLRTTPSRATGFTPFFLVYGAEAILPTDLEYGSPRTRAYADQSNQDNREDSLDQLEEARDMALLHSARYQQSLRRYHARGVRSRDLEVGDLVLRLRQDARGRHKLTPPWEGPFVAAKVLKLETYKLSNSQGEVYNNAWNIQQLRRFYP

SEQ ID NO: 51002 - protein, 242 aa, Zea mays
  Coding DNA Sequence Number=SeqID_9223
  Pfam annotation: Domain name=Hin1; Domain location=24-176; Score= -1.3; E_value=0.002; Accession=PF07320.4; Description=Harpin-induced protein 1 (Hin1)
  Subcellular localization annotation: CTP_CleavageSite=67; ConfidenceScore=5.12e-01
MAPPRTGLKALNLKHYILAALMAILAVAVVVTVFSVLLSPARIFFSVTNPRSHLLVGNGGANLTFTLAANNTSQRAAVWYNTILVDVLNSTVVTPASIWTKADLKKNATSLMAGWQTRGSVATVDATVSVSRGSMAMAFINGADVNSSAFTVTVTAVARFKVGIAKTQLYDINVMCTPVIFLLQNRSGISVAASAYLFSFLCKWSDVSAHIIMLDTKFGNWTAERSSLVASTIRVPNGLRLN

SEQ ID NO: 51003 - protein, 63 aa, Zea mays
  Coding DNA Sequence Number=SeqID_9224
  Subcellular localization annotation: CTP_CleavageSite=46; ConfidenceScore=5.45e-01
MKSGPSRATVTLLWPASLALLRGLRVPRRLRPSMRYTTSEGFNLTSVATVWLSLEGYGLPNSI

SEQ ID NO: 51004 - protein, 335 aa, Zea mays
  Coding DNA Sequence Number=SeqID_9225
  Subcellular localization annotation: CTP_CleavageSite=49; ConfidenceScore=5.22e-01
MTCQARVFDSPHEVHLVTLASMVLALAVGGTPSMPIATLAKTSSPVVVVASTMKATHCLCSERMCLANTELKELRREYDEAEASLHSSVRAVHIQLHDTHRLPSFQSFRVPGFEMYKVEDVDMQRPAGVLFDMMWEPHGIGIVRERASQDVEKVLLLGPMQHILLVIDGTMETEVDAIFVSPNRRSPSVESIEIYMLFGLEESLNIKDKLVCFALLDEVSSAPLAIEKGEPLLANRSDFGSGVPALGENIEGQVPSPSFREYHRADFVSHDRSRDFEDGVALFSRETEFEFLQGHGFGPNISLNGANPVGLVSVVFSEHRTSGSCSAHFPFFVFE

SEQ ID NO: 51005 - protein, 38 aa, Zea mays
  Coding DNA Sequence Number=SeqID_9226
MTSPGFENVAAKSSQKPAVAIVAPNPLSLTTPSDLNCK

SEQ ID NO: 51006 - protein, 118 aa, Zea mays
  Coding DNA Sequence Number=SeqID_9227
MAHSRVLSYSWHNVLSRLSGVRVPVACSTPALSYLMGPVEHALDLLGGDLSFVPPRRLARQELGRSTRLVGLLGGRARKRFMGLAMGTLFLGTRQQPLSLCVTLWSLSEAFLLGIKKP

SEQ ID NO: 51007 - protein, 261 aa, Zea mays
  Coding DNA Sequence Number=SeqID_9228
  Gene Ontology: Mol. function=amino-acid N-acetyltransferase activity; Cellular component=cytoplasm; Biological process=amino acid biosynthetic process
  Homolog annotation: Hit_ID=Q84JF4; Match level="QueryCoverage=70%, HitCoverage=30%, E-value=1e-56, Identity=58%"; Hit description =Putative amino acid acetyltransferase
NKAKYVGQYIITDGDARKAAMDAAGRIRLTIEAKLSPGPPMLNLRRHGVIGRWHGLVDSIASGNFLGAKRRGVVNGIDYRFTGEVTKIDVSRIRERLDSDSIVVISNMGFSSSGDVLNCNTYEVATACALALEADKLICVVDGQVFDEHGRAIQYMSIEEADLLIRKRDRQSDIAVSYVKVVDEEGINSLHKGDNRPSLSPKAYINGINVISISDSRVSRAISSTLAVVFVRVITLAPRVVAVEHTLIHALSARVIKPFRL

SEQ ID NO: 51008 - protein, 138 aa, Zea mays
  Coding DNA Sequence Number=SeqID_9229
MGKNNKGGSSSHHSGNKRKREPSPPSEDLGDSEYSEDFSSESEGSPVYASPPGIAAEVWTYIRAIERSRLEGSNESEISSDEENSSDSSEEGSGGDGDDEGDSGDGGDDGGGGDGDGDGGSGSGKGDNGKASGKAPLA

SEQ ID NO: 51009 - protein, 96 aa, Zea mays
  Coding DNA Sequence Number=SeqID_9230
MGPRAGHAPATARRVEGNKFYFRRAIGHDGRQNVPQNSDEELGNRRPVGVEEIHSDATPGDTGTPVAGCSDPDSADQRQSQARVRRRGSTAKTLVP

SEQ ID NO: 51010 - protein, 103 aa, Zea mays
  Coding DNA Sequence Number=SeqID_9231
  Subcellular localization annotation: CTP_CleavageSite=53; ConfidenceScore=5.44e-01
MAAAHHTLLSSASSLINSLSNSREGSPDRDSGLSMLFSKKPLAQVGRAAGPAVAAARRGDDGATSVFAYELVPPSPFSPHSSHPPAPKRSRRSHSHHDGSDGH

SEQ ID NO: 51011 - protein, 712 aa, Zea mays
  Coding DNA Sequence Number=SeqID_9232
  Gene Ontology: Mol. function=nucleotide binding; Cellular component =endoplasmic reticulum; Biological process=response to stress
  Homolog annotation: Hit_ID=Q6ZFX8; Match level="QueryCoverage=91%, HitCoverage=81%, E-value=0.0, Identity=66%"; Hit description =Putative growth regulator
  Pfam annotation: Domain name=HSP70; Domain location=31-660; Score =171.5; E_value=2.1e-48; Accession=PF00012.10; Description=Hsp70 protein
MAQSCSWGILLAVLVAGLAAAVAVPPATAAVASIDLGSEWLKVAAVHLAPGRAPIAVATNEMSKRKSPALAALADGNRLIGEEAAGITARHPSKVFARARDLLAKPFSYVQSVTESLFLPYDLVPDARGAAAVRADDGQVYSLEEIVAMVLHYAAGLADAHVGAPVRDAVIAVPPYFGQAERRALTQATQLAGINVLALINEHAGAALQYGIDKDFSNASRHVIFYDMGAGSTYAALVCYSAYNAKEFGKTVSVNQFQVKDVRWNSELGGVEMEMRLVNYFADQFNKQLGNVVDIRQSPKAMAKLKKQVKRTKEILSANTAAPISVESLYNDVDFRSSITREKFEELCEDLWEQALTPVKEVLTHSGMKIDDIYAVELIGGATRVPKLQAKLQEFLGRRGLDKHLDADEAIVLGASLHAANLSDGIKLNRKLGMIDGSTYALVLEIDGPGYFKDESIDQILVPRMKKMPIKMFRSIRHTKDFDVSLNYDKAYELPPGIPSHKFAEYSVSGLTDASENTPIDEGNVQEIIAENVLKKRTFRVPLKVVEKTTGAGTILSKELYSEAKNRLEALDKKDAERRKTAELKNNLESYIYSMKEKLEESTGILTVSTEQERESFAQKLSEVQDWLYMDGEDAQANEFKERLGQLKAIGDPILFRLSELKARPAACENARLYLDELQKIWRSIPQRTWVAVCANQEPLDEDESPESSPKP

SEQ ID NO: 51012 - protein, 412 aa, Zea mays
  Coding DNA Sequence Number=SeqID_9233
MTWQGAPDCPVCTGLSGDFHCSTREFRWALGVVDGERTPRDRHDPAPVAIDGRRDDDDDDIERRGRRSRNEDSWSSRLFRSLSRAPHRERDRSEPRRGRHDDRRSTTGGRRHLPDSLDDSLLQQNGSQQVSLDVFPDHVVPRQLVCIDGSASSGGGREQRHHQFRGRGQSMSPSPRPRHDASPNSGMAMAARGRSRERMPRRRPGRRARSVPRCQHGTGLDSTAGGSRCTSDARRDDLDSTHPPPPSPPAIGTTMSAGSTTPVCRFRPGCVYRRRSRSASHQELQAATSFIDSISAPVAQPILRPQDQRYELPKKTQRSFMGRARTSTRKSARLAAIAWPRGDIQSRARQVLMKRLGILPESGSNQRQNRATDEELKRYFSLFNGPLTHLATKALVALCGLDDPNEAGLQSS

SEQ ID NO: 51013 - protein, 115 aa, Zea mays
  Coding DNA Sequence Number=SeqID_9234
MSCAFDDYYIKDCGVISALEVTQRKTDDNDHVYGGACLMIDDVRGNFFQCVWDVLSNDETKQIVAYIEVCMSGCTTLSILNQGDLMVVANFGDSRVVLGITSDHGTITPSSSSST

SEQ ID NO: 51014 - protein, 278 aa, Zea mays
  Coding DNA Sequence Number=SeqID_9235
  Gene Ontology: Mol. function=GTPase activity; Cellular component =mitochondrion; Biological process=cell division
  Homolog annotation: Hit_ID=Q5JJJ5; Match level="QueryCoverage=99%, HitCoverage=28%, E-value=1e-112, Identity=77%"; Hit description =Putative dynamin like protein 2a
  Pfam annotation: Domain name=Dynamin_M; Domain location=115-278; Score=-120.1; E_value=0.00053; Accession=PF01031.10; Description =Dynamin central region
  Pfam annotation: Domain name=Dynamin_N; Domain location=1-106; Score =68.2; E_value=2.6e-17; Accession=PF00350.13; Description=Dynamin family
  Pfam module annotation: Pfam domain module=Dynamin_M::Dynamin_N; Domain location=115-278::1-106
MAETDREAGGNKGVSDRQIRLKIFSPNVLNITLVDLPGITKVPVGDQPTDIEARIRTMIMSYIRHKTCIILAVSPANADLANSDALQMARVADPDGSRTIGVITKLDIMDRGTDARNFLLGNVIPLKLGYVGVVNRSQQYFALSLSWLSKLAIALLNYQRILYTTTTTIKPFSPKHIGGLTDINSDLSIKDALAREEKFFRTQPAYHGIAQYCGIPQLAKKLNQILVQHIKTVLPGLKSRISSQLTAVAKELAVYGDPVDSKAGQGAKLLNILAKYCE

SEQ ID NO: 51015 - protein, 194 aa, Zea mays
  Coding DNA Sequence Number=SeqID_9236
MKTRCRRDSSPAWAERGWRANERERGGEGLWFSPMVELGQANSTVLRVWQLYGFGYGGQVGDVRGEGVGLVVGQGKGVDRKPGPAKGAIGSSARPRARTRAQPRKTANSAPPDPGLGLGLSPGRRRPPLRPTQGSDSGSALEDGELRSARPRARTRAKPRKTANSAPPDPGLGLGLSPGRRRTPLRPTQGSDSG

SEQ ID NO: 51016 - protein, 71 aa, Zea mays
  Coding DNA Sequence Number=SeqID_9237
MGASLDLSNILYGTSRLRSRLRSSSTHDPDDFQSDGDVDGDYNEQWVSDEDNSLDLDEINDRRLSHMNEPI

SEQ ID NO: 51017 - protein, 494 aa, Zea mays
  Coding DNA Sequence Number=SeqID_9238
  Gene Ontology: Mol. function=DNA binding; Biological process =regulation of transcription
  Homolog annotation: Hit_ID=Q10AK2; Match level="QueryCoverage=74%, HitCoverage=93%, E-value=6e-84, Identity=45%"; Hit description =Regulatory protein, putative, expressed
MVGDGMRTRRGRRSTCRTEEEAHQEDDTQQQVEQQAVVDDDAQRDAIGYGASGGHDRNPMASSTFCAGNTSLDWLNLDAMIHGAELGHVDAASTRCRQRSAHLAPRSAPADTGVVGSAEAAFRSEMGGQQNALHQLVSFILGASAAAVLLFFLTTATSGARFTGISSWANGTTGFDDDAPVQAAPATRANHADAKFLDTVVCGSCPARSRVVKQGAAAEQEDELQRLLRAVADEDRTVIMTSVNEAWAAQDSLLDLFLESFRSGERIAHFVDHLLVVALDGGALERCRAVHPHCYLLPTAAARNLSGEKVFMSKDYIDLVWSKVRLQQRILELGYNFLFTDVDILWFRNPFERMSVAAHMVTSSDFYFGDPYSPMNLPNTGFLYAKSSRRTVGAFEAWHAAREAFPGKHEQQVLNEIKVELLATRGLRIQFLDTEHNAGFCNNTRDFNTLYTMHANCCVGLGAKLHDLGNLLQEWRAYRQMDDEERARGPVRWK

SEQ ID NO: 51018 - protein, 395 aa, Zea mays
  Coding DNA Sequence Number=SeqID_9239
  Gene Ontology: Mol. function=sequence-specific DNA binding; Cellular component=nucleus; Biological process=regulation of transcription, DNA-dependent
  Homolog annotation: Hit_ID=Q657C0; Match level="QueryCoverage=99%, HitCoverage=95%, E-value=1e-100, Identity=54%"; Hit description=Heat shock transcription factor HSF8-like
  Pfam annotation: Domain name=HSF_DNA-bind; Domain location=70-242; Score=171.0; E_value=3e-48; Accession=PF00447.8; Description=HSF -type DNA-binding
  Subcellular localization annotation: CTP_CleavageSite=31; ConfidenceScore=5.30e-01
MASSSSCPLAPGTSGCKPRTTRTSGVGFGVEAMARSVAAVKLEPKPEPWAAEAEEGSSVVPRSMEGPPFPAPFVAKTYEMVSDAATDAVVSWAPCGAGNTFVVWDPQALATGILPRFFKHANFASFVRQLNVYGFRKVNPDRWEFANESFLAGQKHLLKSIRRRRASKPQVEASPRNSASACSGQPNKDPGVVESLKRDRAALRAEVITLRQQYSICKSQLVALEERILNNERDQQKAIAFFAKVLSNPAFVQQVLRNYARERELHGASKRQRLMENEGHRQGDLPLRGSTEAAFATGAAGVSVGTGSTNVGTAARQEESGSELNDQEVNSIWSDVWDELDLDLDAVPGAEMDRREADKGVAGFHDVEDLSGRPCGWGDEFSYLAEPMQFVEHYD

SEQ ID NO: 51019 - protein, 323 aa, Zea mays
  Coding DNA Sequence Number=SeqID_9240
  Homolog annotation: Hit_ID=Q9ZWI4; Match level="QueryCoverage=99%, HitCoverage=100%, E-value=1e-110, Identity=69%"; Hit description =ZmGR2c protein
MFFQRKKSKKAKDSRGSQKKGKDGRGKNDLFDRAKGGLDALAGSLQEAKKDAETATEKLQGDVKSGMETIRHKGSGLLEKAKEELGSHSDASRSSKELVSSEKPLKAGPEDQCKYKGGIEFTQLEQVTLWMAHTAAPFKSLFERGSEEQGNNKDMDAFSAVMDKVKGHPEAMEKVSAVMDKVKSHPEVVDKVKDEVMSLAGALRLRRHGSEDKEAESEEKAEGAQSADEGASDGMAGEPSVLEQAVQEIQAVAAALQQTAEPEAEIPAETAAAAAAETSAGGDKPEETNGEVEQDDPKKRLDFAGFFAMLLERFCSPASKKKD

SEQ ID NO: 51020 - protein, 66 aa, Zea mays
  Coding DNA Sequence Number=SeqID_9241
  Homolog annotation: Hit_ID=Q5QM91; Match level="QueryCoverage=67%, HitCoverage=8%, E-value=2e-10, Identity=64%"; Hit description=RNA polymerase III subunit-like protein
MGRRVNESARHVTSPIDGILERVGQKEGGMSMTLDHITSVLNDLECTSTANNPEEFTFGKDLYCYA

SEQ ID NO: 51021 - protein, 227 aa, Zea mays
  Coding DNA Sequence Number=SeqID_9242
MVSNLKMQCPFPTFSEVRTLLLLEELDINDICDDAPSDSKSGAQALVMHQQSQQQRHSTAPAGSGAATSGAGSNGGNRNRRHGHGGNGGNEGNNGNKSTGHPGPRPGAPIPPPGYGNPWSGCVQMWPHGYSVFPGHMPRPPLDQQPQPGLHMMPASTPGFSYGGASTPGFGYSCGPPTTPSLSAGMPLHAPWNPMAGGSWDQASLTSNFNTMSLTPPNSVEWILKVA

SEQ ID NO: 51022 - protein, 71 aa, Zea mays
  Coding DNA Sequence Number=SeqID_9243
MKMSKTRRMNKRFRLKDHFIQESIRIEDTLRDPEWVLTMQEEINNFKRNEAGASAGGSAGEKRPLPPARRR

SEQ ID NO: 51023 - protein, 135 aa, Zea mays
  Coding DNA Sequence Number=SeqID_9244
MKADDTFQQKSTGPTTFFYIKFFRRNLAFDTRNVDIHVEVVKKRRCPTKKPYSRNAIDIDARYLSTHLNCHDLAARSRSVSRRRRMRRKQEGKGDQSPEDANKWHNPEGFQCPKLGDGGRKHYFHCYYAIFDPML

SEQ ID NO: 51024 - protein, 157 aa, Zea mays
  Coding DNA Sequence Number=SeqID_9245
MEANLEFSERVPNKHFPKHLVGRRHPLGGRDGGAQGGAHAAEGEPECRCSRGCGDEYYDVDEAELEGESRRGDNDVGARTRDEAGELGRGCELRWGSSGRDEQPSRSGLRLGHHESGDRRGVGRGRCHGSHGATRLAGEGRTMVKRVGRHLLCSLIE

SEQ ID NO: 51025 - protein, 171 aa, Zea mays
  Coding DNA Sequence Number=SeqID_9246
  Subcellular localization annotation: CTP_CleavageSite=53; ConfidenceScore=5.04e-01
MARHSVPTHINRPHRFPVNRTGLTALAYNARFNQAGELVGGERSGLTTTLPVNPMARGASRGDVEAIRAVNRKMVQRLTRSTCAGGVPNSGEHDCAFPVAGVRSSSSGKLYGLPGDLSRGLDRVEEGGRGFGHGGCPRAALAGREEVAGATGELRGVWRGIKDETGKTAGH

SEQ ID NO: 51026 - protein, 188 aa, Zea mays
  Coding DNA Sequence Number=SeqID_9247
  Subcellular localization annotation: CTP_CleavageSite=51; ConfidenceScore=5.22e-01
MASNGSDVVMMYGTRRCWSRPSSPSQRVSPSRYHNSWIPNLRRMLMLTIIACTQSRAFYRIHAIRDSYLRFARSHTAGRYMAEYQASAKGKLTFGHRVQGAPSYEVLRNSFQILTTSSILGTSPLSMHRVTVYLRKRRCCFQCEAYKEKLEKHFQYLGVRRNYGKNEYSEDMGTRTRTICFKVLIHPF

SEQ ID NO: 51027 - protein, 180 aa, Zea mays
  Coding DNA Sequence Number=SeqID_9248
  Homolog annotation: Hit_ID=Q6Z5M6; Match level="QueryCoverage=63%, HitCoverage=10%, E-value=3e-25, Identity=52%"; Hit description =Transducin / WD-40 repeat protein-like
  Subcellular localization annotation: CTP_CleavageSite=51; ConfidenceScore=5.62e-01
MTHLVVSFPMPNPNLNPKPNANPNAVAPGPNPGARLMQLLENSGPTQFETVVSMPPPTSEFAQLQLLPAMPSAPPARMLSSTSSKASRGRAATVAGGDTDYQVHIGSRARAGQTDRCEPVVYGLKLGNIRVLNINTALRSLLHGHTQTNDQPTVSSYVHSPTELKVAWPCGEILKRNLLP

SEQ ID NO: 51028 - protein, 123 aa, Zea mays
  Coding DNA Sequence Number=SeqID_9249
MAVRKGPTTVKWRGSNDGEVAGKALGYDWGWEVVFRARDEVVKLRGGRAYRSGGRGGGAGLIELRERGEGWLRPVQGEVELRAVPFIGTRGGNSQGQLALVRCIATTLMAHNARDEAARGGVS

SEQ ID NO: 51029 - protein, 81 aa, Zea mays
  Coding DNA Sequence Number=SeqID_9250
MAKKDRVTQDNSSQVFATLEDLGGRLETVEHALQQLMMQAKLAITVVEHAAMERTELYLKVGEIRKVVAQMRLEELGKEFG

SEQ ID NO: 51030 - protein, 45 aa, Zea mays
  Coding DNA Sequence Number=SeqID_9251
MVGDMDVAGHGAAAGQASASLPSARLATGWGVSDRVVQIAYPFVV

SEQ ID NO: 51031 - protein, 43 aa, Zea mays
  Coding DNA Sequence Number=SeqID_9252
MALGGWLDRGEVALIYMPQLNPNYPRGTRINAAGSNNPRDFYF

SEQ ID NO: 51032 - protein, 144 aa, Zea mays
  Coding DNA Sequence Number=SeqID_9253
MKTCNRGVASPKITISGTSTIKEGSKCSHNATHNNKKENTSKRLTRVIKNWDDKSWMLKDVDGFGTQQQEEIPPTTLHIPIAFSPKTAHVAPHNCSLQLLDVEHCSPPKRARPPWLAGMVEARRANNIGTTRTTRVFLENAMKL

SEQ ID NO: 51033 - protein, 78 aa, Zea mays
  Coding DNA Sequence Number=SeqID_9254
MGVGRCGCLGRAGRRGRGHNGVYTPLSSQTAGNHVVVVAVLDGGVDRGIEQVPVLPLKSSVDLAEKEESSSVGEWIAG

SEQ ID NO: 51034 - protein, 75 aa, Zea mays
  Coding DNA Sequence Number=SeqID_9255
MNFISLAMVVEVMVVVATVISIIRVEGVLHTDTDLATVAELMWPTLIMQPTVARLVIRHFRCTLDSPVRPMFGQT

SEQ ID NO: 51035 - protein, 176 aa, Zea mays
  Coding DNA Sequence Number=SeqID_9256
MGPNPSEHVLDLFDMAYGIEPGHAQGRVQDFHMSQQGRCSEDASVDLDLIDGTDDVRPGLVQGRVWGRHMSKRVRRLRAAPLGLDPIDGTDDVGPNPRSGPSSRRKEEDSTEEEEDSDCSGGCNGFSDDPGGDDGGGVSGMDNGKGGGSDMGGGQGYSSSGNGGEGDHAGGKAPPP

SEQ ID NO: 51036 - protein, 143 aa, Zea mays
  Coding DNA Sequence Number=SeqID_9257
MSTTILCLSIKQIRCTTKVILTQAWRFGGLSTKLIQQFTLIEKDYDVVLQFMYVIMFKMLGKGKGKKKGEGSSRSTRSRSSREADATGDTPSSLFMGRYIENLQEKHGQDVDWKSAKFDLAMSHGRFPTSDGVMDRQSYSRQS

SEQ ID NO: 51037 - protein, 52 aa, Zea mays
  Coding DNA Sequence Number=SeqID_9258
MARLQAKSRNKPDFMGKLYTVRCCWAFENKSPTGAMVANNKQCEAEHATAHE

SEQ ID NO: 51038 - protein, 95 aa, Zea mays
  Coding DNA Sequence Number=SeqID_9259
MGAPESADRSEKSSAAAQLTPASNCAGSGAVLGELRAWESCSPRVRTLVRLENGGGAMEPQVDGGEAPTAQELLRLSWTGRNREGEGTPKGVPSS

SEQ ID NO: 51039 - protein, 79 aa, Zea mays
  Coding DNA Sequence Number=SeqID_9260
MTWQGHRTVRFALFTPPLGDFQQPREGVQGNLSRRIRHQRPRLDHAGACAGAADKRGQGASEPGRADRPGPGAETWVRG

SEQ ID NO: 51040 - protein, 99 aa, Zea mays
  Coding DNA Sequence Number=SeqID_9261
MEHNALTAVVCVEFFKWSFSDYIMERAFTKVGRVDDMEIHHDEVILSASGIFRPGSRGGTNMGEETMLTKDGMEVYNPLDEVMNVEVKDGWCKGGAWWL

SEQ ID NO: 51041 - protein, 115 aa, Zea mays
  Coding DNA Sequence Number=SeqID_9262
MLGDHAKREIMTGEKAASSWRTLSRESSNKYKEESSSSTKSHWKGDKKKKMKKVVYYETDSSSPSTSSSSDSFVASKRHERKKYSKPPNFDGEDYCMSSDKIRHHLNSLYEAYGT

SEQ ID NO: 51042 - protein, 44 aa, Zea mays
  Coding DNA Sequence Number=SeqID_9263
MEHVIGGKFKLGKKIGSGSFGELYLGVNVQSGEEVAIKLILTWF

SEQ ID NO: 51043 - protein, 117 aa, Zea mays
  Coding DNA Sequence Number=SeqID_9264
MAPEPDHSASGGYYGLSFAPQQEVAHELFHSITAAARSPSTTTTASREPAGEESPAVSAGLAASTTWPALVETPVLLKEYNYYDMGFDSVLMSRFTAWFHAFGPQLIFRFMHVCFED

SEQ ID NO: 51044 - protein, 137 aa, Zea mays
  Coding DNA Sequence Number=SeqID_9265
MPPAPTTGGAGEEPAILKAALGSGKLRIEGYCRFISAGHPQGRKKKHRNNKYAEEWKVRACAGRLGVGSMNMDDIIRNIYGPEAVNAAAAESAGLGLAEPSLAAPEAAARRTSEEVWKEISAAGGLPTPILPIPPAG

SEQ ID NO: 51045 - protein, 66 aa, Zea mays
  Coding DNA Sequence Number=SeqID_9266
  Gene Ontology: Mol. function=DNA binding; Biological process =regulation of transcription
  Homolog annotation: Hit_ID=Q9AV06; Match level="QueryCoverage=89%, HitCoverage=21%, E-value=5e-12, Identity=56%"; Hit description =Putative NAM (No apical meristem) protein
  Pfam annotation: Domain name=NAM; Domain location=5-65; Score=-54.2; E_value=0.019; Accession=PF02365.6; Description=No apical meristem (NAM) protein
MALRELVCHCLHKKVAFDFERITPGTLVEVDLHAREPWPVGAPSFRDRKYATGSRTSRATKSGYCW

SEQ ID NO: 51046 - protein, 168 aa, Zea mays
  Coding DNA Sequence Number=SeqID_9267
MTNVSESVIPRLRIGFDEQGWEERPEDPTEEPEAVREQQAYRRRKEEHVDRAWPSHLGETTKQVVAHEEVAAQRPGRLQRRVAAPWVETVPWAESGHWRQWRHGEFLEEQLRADLDELGEGPLELVERPNVLEPLIEVAEDVKGEYTIGHWLAELNKSPSGSSSCGNS

SEQ ID NO: 51047 - protein, 475 aa, Zea mays
  Coding DNA Sequence Number=SeqID_9268
  Gene Ontology: Mol. function=hydrolase activity, hydrolyzing O -glycosyl compounds; Cellular component=membrane; Biological process =carbohydrate metabolic process
  Homolog annotation: Hit_ID=Q84QV4; Match level="QueryCoverage=94%, HitCoverage=95%, E-value=1e-172, Identity=66%"; Hit description =Putative beta-1,3-glucanase
  Pfam annotation: Domain name=Glyco_hydro_17; Domain location=47-370; Score=419.7; E_value=4.2e-123; Accession=PF00332.9; Description =Glycosyl hydrolases family 17
  Pfam annotation: Domain name=X8; Domain location=388-474; Score =109.4; E_value=1e-29; Accession=PF07983.3; Description=X8 domain
  Pfam module annotation: Pfam domain module=Glyco_hydro_17::X8; Domain location=47-370::388-474
MTPSSTCHAVAVLLLLAAATLACHFSVFVVATDVECHCHGAKGCRGLGINYGTVADDLPSASRSVQLLRAAGASAVKIYDANADILRALAGTGVPVSIMVPNSAIPSLASSRAAAEAWVAANLAPHIPATRVAHLLVGNEVLSNRAIAASTWRGVVPAMANLRRALRARGLRGVKLGTTLAMDALSASYPPSAGAFRGDIAEDVVLPLLRFLNATRSYYFVDAYPYFAWAGNRDAISLDYALFQGAAGSRYVDPGNGLTYTNLLDQMLDAVVAAMGRLGYGNVRLAVSETGWPSGGDAGEAGANVRNAATYNRNLALRMSNSPGTPARPGAEVPVFLFSLYNEDRKPGPGSERHWGLYYPNGSMVYELDLTGRRSSYPPLPSADSAPAWCVLASGGGKAANETAVSAAVAYACQHGSRTCAAIQPGGACHEPDALDAHASYAFNAYWQQFRSAGGTCFFDGLAETTTEDPSEIFT

SEQ ID NO: 51048 - protein, 433 aa, Zea mays
  Coding DNA Sequence Number=SeqID_9269
  Homolog annotation: Hit_ID=Q8GUC3; Match level="QueryCoverage=80%, HitCoverage=99%, E-value=5e-62, Identity=63%"; Hit description =Barley B recombinant
  Pfam annotation: Domain name=DUF1004; Domain location=319-433; Score =320.5; E_value=3e-93; Accession=PF06217.3; Description=Protein of unknown function (DUF1004)
MDNVVFKASVDTGGEIVERILGERLHGRALGLARGSTGPCLWAPEPTEGGVHWALRAASPFYPFVDGWDCGGALVFAGDEHRQMDDDDGSLGIRNWGFYDTMKGNLGLQLMSSMPPDRDTKPLLPRAGFLQQHGHHNASHQLHAQQSQHYRDSTCGGGASGGMPTEQHSIHMDFSRNEAWLHPSHHHQHPHDQKVLHSRPTVPAGHVGHPGHGSHPVHGGHIVHHHPTGYGSISDAQHTLQMMQPQLESQLQEPPPCKGDEAPPPPIEDHSVVSTGPPVKKRQRGQQQSRQPKSPKPKKPKKVAVLPEGGALNGHAPRRRGPKKAVGMVINGIELDLANLPTPVCSCTGTPQQCYRWGAGGWQSACCTTAISTYPLPMSTKRRGARIAGRKMSQGAFKKVLEKLAGEGYNLVNPIDLKTFWAKHGTNKFVTIR

SEQ ID NO: 51049 - protein, 98 aa, Zea mays
  Coding DNA Sequence Number=SeqID_9270
MRQERMVRQQQASLSPPPPPVPPWDKHQEFMSHKPPTFASSPNPLHADDWLKVRYTVQELSHTCWTDEDKEERVSVIEDAKVPWTKTLRKATPQKKTL

SEQ ID NO: 51050 - protein, 183 aa, Zea mays
  Coding DNA Sequence Number=SeqID_9271
MTVEETSKTRKGKIIIESKGTNLTAETSLLCKIKDIEKLANSISNKLIKLVATIEDMDRSQNLFYAYTRAYNSSIVAILYNQEQDGARPVEVAEVISEEYYNSLAIVVYTGPLKVIPPTQEAADDARVEPEPEERSEDCAKIKEKKRKRSKDKKCKNEEKKRRKKHCAATLMAEENELVYFTF

SEQ ID NO: 51051 - protein, 385 aa, Zea mays
  Coding DNA Sequence Number=SeqID_9272
  Homolog annotation: Hit_ID=Q54731; Match level="QueryCoverage=41%, HitCoverage=57%, E-value=2e-09, Identity=29%"; Hit description=Orf5; Method: conceptual translation supplied by author
  Subcellular localization annotation: CTP_CleavageSite=48; ConfidenceScore=5.15e-01
MALSVSPSLSFTQNFPRFVTSHSLPLSQCHPISFQTPPPKSIHYHPPRALREWQEYEEAVKKKDLATALRFLISIEKDNSDDSVDENGSLSTQSARSQIGDLGFFGGSVRDWEVLDTCLNADDMRLVGMAYEFLKAKVLDGARDIRPSVLKSSTGLEASKFSPKKWGLSGSSSVVLAGFLGGVSYLLQQGIDIRPQLAIILGLAFTDSIFLGAYLMGCPIRGVILDPIVAMQMGIQGQAGTQFWDENMNNEMAEGQLSGSTFDRLAGSDYPMLILLRMLAYGRYCMVLFAGTAAEALVYGDAEGGENDENLFRSISVLLQPPLSVAQFGITFEKMSNQARWSVLQSYNLLKWHRHAHRAAFKAMENGASLSVIIRKIEEAMSSNR

SEQ ID NO: 51052 - protein, 37 aa, Zea mays
  Coding DNA Sequence Number=SeqID_9273
MKAQWQQGVADLGNSKEDFETLISKTNLVKIGAQKIR

SEQ ID NO: 51053 - protein, 94 aa, Zea mays
  Coding DNA Sequence Number=SeqID_9274
MLDRSLESSREVILASYRSVLFDLSYYGVSSQGWWFNISIDNFPQVKCLQPSPLNTGGGAGEKPDEDIVFESRKEKGPLRNQLSIPIVGVGNQN

SEQ ID NO: 51054 - protein, 1056 aa, Zea mays
  Coding DNA Sequence Number=SeqID_9275
  Gene Ontology: Mol. function=transcription factor activity; Cellular component=nucleus; Biological process=regulation of transcription, DNA-dependent
  Homolog annotation: Hit_ID=Q84P66; Match level="QueryCoverage=85%, HitCoverage=94%, E-value=0.0, Identity=69%"; Hit description=TF-like protein
  Pfam annotation: Domain name=zf-NF-X1; Domain location=272-290; Score= 18.9; E_value=0.018; Accession=PF01422.8; Description=NF-X1 type zinc finger
  Pfam annotation: Domain name=zf-NF-X1; Domain location=327-346; Score= 17.0; E_value=0.069; Accession=PF01422.8; Description=NF-X1 type zinc finger
  Pfam annotation: Domain name=zf-NF-X1; Domain location=391-410; Score= 26.3; E_value=0.00011; Accession=PF01422.8; Description=NF-X1 type zinc finger
  Pfam annotation: Domain name=zf-NF-X1; Domain location=449-468; Score= 26.8; E_value=7.4e-05; Accession=PF01422.8; Description=NF-X1 type zinc finger
  Pfam annotation: Domain name=zf-NF-X1; Domain location=505-517; Score= 3.7; E_value=2.8; Accession=PF01422.8; Description=NF-X1 type zinc finger
  Pfam annotation: Domain name=zf-NF-X1; Domain location=544-563; Score= 24.7; E_value=0.00032; Accession=PF01422.8; Description=NF-X1 type zinc finger
  Pfam annotation: Domain name=zf-NF-X1; Domain location=620-641; Score= 12.5; E_value=0.27; Accession=PF01422.8; Description=NF-X1 type zinc finger
  Pfam module annotation: Pfam domain module=zf-NF-X1::zf-NF-X1::zf-NF -X1::zf-NF-X1::zf-NF-X1::zf-NF-X1::zf-NF-X1; Domain location=272 -290::327-346::391-410::449-468::505-517::544-563::620-641
  Subcellular localization annotation: CTP_CleavageSite=78; ConfidenceScore=5.09e-01
MKFDLYAPIRRDALGNLILPSTDRRRGGGPVATASRVWRARPAASSPGSAAGPAAAGPILPLPSSAPEARPPRRRSRRSNHGNNQNHRPAAPQEQNDNAGHRRRGPPPERPAPAPPAPAREHAPAPAAVETRGDGAVPQLVQEIQDKLARGAVECMICYDMVRRSAPIWSCGSCFSIFHLPCIRKWVRSPASAADASPAADPASLSWRCPGCQSVYATLARDLAYTCFCGRQRDPPNDHFLTPHSCGEPCSKPLERAEPLCAKGEDVDATRCPHVCVLQCHPGPCPPCKAFAPNRPCPCGKEIIGRRCADRSTPVTCGRPCEQLLPCKRHRCEKVCHTGSCGDCAVPISARCFCGKKNETLQCGDMMVKGKLSEEDGVFSCNEVCGRTLACGNHACKDMCHPGPCGECELMPGKVRTCHCGKTRLQERRASCLDAIPTCDKICDKKLPCGVHRCKVNCHEGECPPCLVLVEQKCRCGSSGQMVECYKVSMEEFRCNKPCGRKKKCGRHRCSELCCPLSRNVAQLEGGNWDPHLCQIPCGKKLRCGQHLCQLLCHSGHCPPCLETIFTDLTNERMHWGTCDAEEYPLRIEGYQTPANGDASSSSGGKASCGQVCGAVRRECKHTCTASCHPSSPCPDLRCEFSVPITCSCGRITATVPCGAGGSSMGDNMFKVSIIQKLPMPLQSVESNGRVPLGQRKLSCDEECAKMEKKRVLAEAFDITPPNLDALHFGENSSSSDLVSDLFRREPKWVLAIEDRCKFLVLGKVRGSSSSNLKLHVFCPMMKDKRDAISLIAGRWKLSVQSACREPRCFVTIHVTSKSKPPARILGSKAGVPATAAHPYFDPLVDMDPRLVVAMLDLPRDADVNALVLRFGGECELVWLNDKNAIAVFNDPARAATALRRLDYGSAYQGAAMFMPSSAQASSGNVWIGEQKDGGFAARNNPWKKPASAEPDLPSGDWSGVAGHAPAPGWRGVNTASQVMGTTNRWNVLESDAAASSGSGNERKPAPGTDVHSTVSNTGNAGPSVTKLQPDVERRMCRQMNLCKTAAYFGRPSVEF

SEQ ID NO: 51055 - protein, 219 aa, Zea mays
  Coding DNA Sequence Number=SeqID_9276
MVALSSLTEAGGRQQGLNRSDSCPSARLRRSSDGHDITPAGCQNLSGCHIGMKDQGPLREGWPRGDEDGTGALLGPLTSLSRVDACNPLLQAHPTWARDEHEGRGIPTSLTSVSGRLASPPFALALALDPSGLGHAATLTRRPEGPPGLETPTVGAPGRGLLRVDEQLPVKLQMGSLQQPLTTGIQGFAECCNLCRVLFVGHSAKRALPSVKRVTLGKV

SEQ ID NO: 51056 - protein, 61 aa, Zea mays
  Coding DNA Sequence Number=SeqID_9277
MEEEKAKVHKASPYPYTTDYPMLVFMYYTRSKFVIEVNFSKEQVNYHGVILLGGTLELKSF

SEQ ID NO: 51057 - protein, 45 aa, Zea mays
  Coding DNA Sequence Number=SeqID_9278
MPQMAGKGMFEYVKDSPFQSLLSMNVLIALVSFASWISNPALRVG

SEQ ID NO: 51058 - protein, 209 aa, Zea mays
  Coding DNA Sequence Number=SeqID_9279
MVFKWFEIFLTEYVVHRVSGTDSLTKNPWHQHQRERRRLSRSKLKKITDWKSSGILRPRVDETLGVTIFLRIDSMRYWVPTYFSLANETLGVNYCFELSDEALAAILVDRSQKSRFSIQTNPDFSITLVMLVIYLRIIFKLLGISGKYMGASYIDARRREFLNLTQRDRSVAEFLRLSHYARGMVVAEYERCVCFEDGIRDSLRVLIAP

SEQ ID NO: 51059 - protein, 122 aa, Zea mays
  Coding DNA Sequence Number=SeqID_9280
MESDTKHSVQEIDSPSKIAPTTTRNKKAKEQNFTAGPPFNVDELDISSLGLSSKRSLGRDSSKYEKKKWDSATSDGSDYLSKLHDLAATKFEHNLVKKEKREIEQDKEREIELKRLDIEAEK

SEQ ID NO: 51060 - protein, 137 aa, Zea mays
  Coding DNA Sequence Number=SeqID_9281
  Gene Ontology: Mol. function=ubiquitin-protein ligase activity; Cellular component=ubiquitin ligase complex; Biological process =protein ubiquitination
MTGGAALALSRSPIESLAGALVIAHAALERLCQADGDRDGVVAGAGGGPAAVTAMVRAMSGRGAEHAAGALVAVVVGSEALQVEAVRAGAMGQLLMMVQGGCSERAKRKAQHLLKLLRSAWPTTDCTANSDDFLQHY

SEQ ID NO: 51061 - protein, 274 aa, Zea mays
  Coding DNA Sequence Number=SeqID_9282
  Gene Ontology: Mol. function=ubiquitin-protein ligase activity; Cellular component=ubiquitin ligase complex; Biological process =protein ubiquitination
  Homolog annotation: Hit_ID=Q10PB1; Match level="QueryCoverage=33%, HitCoverage=20%, E-value=4e-29, Identity=64%"; Hit description=U-box domain containing protein, expressed
  Pfam annotation: Domain name=U-box; Domain location=17-91; Score =91.0; E_value=3.5e-24; Accession=PF04564.6; Description=U-box domain
MPASVPLCLGLDTAGVQVPWYFRCPISLELMRDPVTVSTGQTYDRSSIESWVATGNTSCPVTRAPLADFTLIPNHTLRRLIQEWCVAHRSMGVERIPTPKQPADPDLVRSLVAQGPGLPALRRLRALARESDKNRLVMATHETRAALLEAAFGSGSGAASEELEAEAMAVLALVGLREEEAVESGREGGEGGQARQVTRRLVHRLFLALNLFPSLIMCSLWLILLEASSNQGTMDERIPGCLDKHGYEEMVIAWSIVALYVKTVYEPDVNWGDG

SEQ ID NO: 51062 - protein, 80 aa, Zea mays
  Coding DNA Sequence Number=SeqID_9283
MAKAWKTNGMSDDGNMMPLRESVSGLVSDEYREEAHAPTASAENGVARRWRHEGREKRSRMTNEVVATEARTVIIVRRYR

SEQ ID NO: 51063 - protein, 211 aa, Zea mays
  Coding DNA Sequence Number=SeqID_9284
MPLHSSSGSIDTFFGVLVAVLPLTLVSYVFSRVCAGHAEGPKERFRIRFAGQECDEPFRRAVHKGSTQTNKRLKKGFKNKGAKKPRVPWSCAPDCPVCHRTVFGAPGPYSLKLATLGFLRARSAIIHQTVRCDSGVTAIQRNGRLQRTPANATVREQCTQKSEQSSEAHRTVNSACPVPLVDKASNGQKLQNPNSWVTWLAHRTVRCAHRQ

SEQ ID NO: 51064 - protein, 72 aa, Zea mays
  Coding DNA Sequence Number=SeqID_9285
  Gene Ontology: Mol. function=kinase activity; Cellular component =intracellular; Biological process=intracellular protein transport
  Homolog annotation: Hit_ID=Q6YUH7; Match level="QueryCoverage=99%, HitCoverage=20%, E-value=9e-22, Identity=77%"; Hit description =Putative target of myb1
MTAGMSSMSFKMKLFKGQTLADKIVVDATSENLDGPDWNSNLEICYLMNTKKVDSVELIRGVKGPVPLLGPA

SEQ ID NO: 51065 - protein, 880 aa, Zea mays
  Coding DNA Sequence Number=SeqID_9286
  Gene Ontology: Mol. function=protein serine/threonine kinase activity; Biological process=protein amino acid phosphorylation
  Homolog annotation: Hit_ID=Q9FGC1; Match level="QueryCoverage=69%, HitCoverage=91%, E-value=3e-66, Identity=45%"; Hit description =Protein kinase-like
  Pfam annotation: Domain name=Pkinase; Domain location=213-465; Score =55.2; E_value=2.1e-13; Accession=PF00069.15; Description=Protein kinase domain
  Pfam annotation: Domain name=Pkinase_Tyr; Domain location=213-464; Score=-134.6; E_value=0.00033; Accession=PF07714.7; Description =Protein tyrosine kinase
  Pfam module annotation: Pfam domain module=Pkinase::Pkinase_Tyr; Domain location=213-465::213-464
MLVASGTDDGELVLLPVRLLSGPSIPELLDMAAQRYENGQLGVLRVPCDMGHFRQVLEGAMHRCGISFTWLGVAARVHWIFCCVLGRGRGGPRLRSPLHAMTVEKVSAFLPCRYRGPYNSNKQNRSNGCDGRRGRVSAFLLNALTFVARLTAGIIQTYLECDPEFKYSEVLNPKRFLTNPSTPAHNDGLDNANWDLILYVNLELVNKMSNRRFIVKEMLGQGTFGQVVKCWDTETNDYVAVKVIKNQPAFYHQAIMEVSLLRTLNQKFDPDDQHNIVRMLDYLSFQNHLCIAFEMLGQNLYELLKRNHLRGLKLKYVQAFSKQILDAMVVMREAGIIHCDLKPENILGQPPDELLREAKNTVRFFKHVGSIYAGNAAPIGLSSAYRILSEEEVEARDSKRQKMGKWYFPHLKLDRLICTYPWNNSELAETEKTDRLGLVDFLKGLLEFDPNKRWSPLQALHHPFITGESFTGPYEPIPETARIPVARAAAIDHNPGGGHWLHSGLSPQVGSVNRYLPLNNVYPPKVPFSYGSSYGSFGSHGSYTGNAGFGNSYGSIGDANAINMYYSPLGSSGLTQIGPSPDVRLRMRLSHDRGIRLSPGSLGPMSVGASPSQFTPPNYHMQIPANSTGTHGSGSPASGVIHGSPLGKAAAVGPYNMRRNLPMPPHDYVSQHGQGRFRDGVSFSHSDACAQGHTGHSHNAAVPSSYHSGWRPKIGSRSGISLEASSSHVPSKAPSQSFDFSASSTLDPANWDPNYSDESLLQEDNSLSADLSSNLHFGDATGQDHIFATSNPVPTNQRGDQLFHVSSQGVSAHSSVLINYGGYNPQNYPQQNARPRHGQPILHQRYNQATSSPMRPMGSHHNGQPAWPSSFGMGDGVPWG

SEQ ID NO: 51066 - protein, 327 aa, Zea mays
  Coding DNA Sequence Number=SeqID_9287
  Gene Ontology: Mol. function=zinc ion binding
  Homolog annotation: Hit_ID=Q6Z3M2; Match level="QueryCoverage=98%, HitCoverage=99%, E-value=3e-51, Identity=38%"; Hit description=DNA binding zinc finger protein-like
  Pfam annotation: Domain name=zf-C3HC4; Domain location=287-319; Score= 21.3; E_value=0.00099; Accession=PF00097.15; Description=Zinc finger, C3HC4 type (RING finger)
MEEHMGRRTVGGLLLTKGGSILLFREDGSRPRAKNCCSRHGCSGHHSVGKAKGKEVHRAAVANESTPATPRRPKICRNPDRMPPHGTSAPGSISKDAGGSCSETGNRSRDTPGPGRDLLARLKERVNTSRKRSLNRENSPQSPSGFTASSPSNSRSVSLSRPSHRAASRVRRADEGANAGADSVHRNGAGGARRSSQRGDAGLLLVEQQVARNHVPSEGFLSGFMARYRSGLQEGLSSLDDSVEDSNGYLRFDTGGIEELQNYLIFSDRHRGMRMDIDGMSYEEEYLSGEDVGKMACKHYYHLSCIEHWLRQKNRCPICKSVALKTK

SEQ ID NO: 51067 - protein, 100 aa, Zea mays
  Coding DNA Sequence Number=SeqID_9288
MAWWRKKVVSPARRAWAAVSTRVRARNAGSSGSILKLHEDVQTCGYRDVQVMFDILTSELEASTQRPAVKHQHQQQQRKRRPPPPPWPSHRSSSVIAAAQ

SEQ ID NO: 51068 - protein, 99 aa, Zea mays
  Coding DNA Sequence Number=SeqID_9289
MDPYPYPPGIRRRGSGLLPAGVLGEGAGLGPGHRGAAWEPGRGRAVGAWGLAAAAPPGSLDGDCRSAACPAWPRGALGPGLLASTSREGWDEDDWDSGL

SEQ ID NO: 51069 - protein, 165 aa, Zea mays
  Coding DNA Sequence Number=SeqID_9290
  Homolog annotation: Hit_ID=Q6QP51; Match level="QueryCoverage=30%, HitCoverage=23%, E-value=2e-12, Identity=70%"; Hit description =Putative growth-regulating factor 1
  Subcellular localization annotation: CTP_CleavageSite=21; ConfidenceScore=5.13e-01
MAVAGGQEQRPRRQPSSRPIQGQRGSPLSRREDNALVLRPSNGSRTHNGRPANHSPRRINSAAGQAAPLGPGKGDTPKRILPREGTRLRASLLIRCSKAGPSEGFDNRLRSRGPYTHYWSEVRRPAPRKGSTTASGYSGSAPTTDQGFEGWPPKGSQPPQTSSEG

SEQ ID NO: 51070 - protein, 116 aa, Zea mays
  Coding DNA Sequence Number=SeqID_9291
  Gene Ontology: Mol. function=transcription regulator activity; Cellular component=nucleus; Biological process=regulation of transcription
  Homolog annotation: Hit_ID=Q84LH4; Match level="QueryCoverage=67%, HitCoverage=24%, E-value=1e-23, Identity=64%"; Hit description =Putative Helix-loop-helix DNA-binding domain containing protein
EPGSSGLTGPFNQGIMQPELMCTIANPVDVLHGAIHDASTMNHIPSMWEGLQNMPQMNFNPGVAADSGTNNSGSMKIEQPNHSCRFPSVASILCDTLFMKLVGTRDQVLNADGPTY

SEQ ID NO: 51071 - protein, 296 aa, Zea mays
  Coding DNA Sequence Number=SeqID_9292
  Gene Ontology: Mol. function=transcription regulator activity; Cellular component=nucleus; Biological process=regulation of transcription
  Homolog annotation: Hit_ID=Q84LH4; Match level="QueryCoverage=94%, HitCoverage=88%, E-value=3e-85, Identity=57%"; Hit description =Putative Helix-loop-helix DNA-binding domain containing protein
  Pfam annotation: Domain name=HLH; Domain location=113-170; Score =17.0; E_value=0.0023; Accession=PF00010.16; Description=Helix-loop -helix DNA-binding domain
MAYNGQYGFGSYGMGLEDKLGLYPSSSGTLSQDIQMSEEHSGVVKKRKGVEDCVTLLHDAGDQQTKGSPQPERNSVEEGNRKISPKMQSKEDSSDGDGTKEDYVHIRAKRGQATNSHSLAERLKLMKLQLRRKKISERMKLLQDLVPGCSKITGKAVMLDEIINYVQSLQRQVEMLLSQDRHLAFYGVEPGSSGLTGPFNQGIMQPELMCTIANPVDVLHGAIHDASTMNHVHIYYLIEEVMGLCEPLMQIPSMWEGLQNMPQMNFNPGVAADSGTNNSGIYMILSILFPEKYKCP

SEQ ID NO: 51072 - protein, 429 aa, Zea mays
  Coding DNA Sequence Number=SeqID_9293
MTKKFDAAGEGACLKRYTDPSFFSAHSAKVDEQGMLKQHRRQAEAAAANRCRPIYVPADAANSCSQGRTFTSTAQHGTEAARSSHVVTTSNAAALSSSATVKAVRLNSASEVKGCESNTTRSRYKGKIASRVSSLPRKLFMNTTKHHNDRSRSYRAGSSSLRVTQATGIGDCSPELEAIAIPAPAADSKNLLLLLPGSGPVLEPPDNSSSSAAEDAKVDTPLAPIPPMQWLSEKGTPPASPKHRTPCFQQQFGSSGQSDEKPSQEHEASDDNSNLLQESVFFSAAQELAKMSPPPPWVPRPKYPLLDVKAVKAVFQAETSFWSELSCDWDWESYQRHHSEQSRWHSAASEWSYKIDLIIDESKQQMAPPIYSVKKRSKHTAVLLTTDSPPPASEVTPPPNPTPVTLDFQVAGCATPWMKPRRSKSAAAG

SEQ ID NO: 51073 - protein, 170 aa, Zea mays
  Coding DNA Sequence Number=SeqID_9294
  Subcellular localization annotation: CTP_CleavageSite=85; ConfidenceScore=5.44e-01
MKKKKRKELAVYSQKAASVWSTGLSGGAPDSVRCSASSASHSRKIAASVSLRTRWARDNMQGRGTGAASCLAPEQSRRPNTTSISSEAGGVLELDAPLASPPVLGVGTDPPAGISSATAMPPDASAADARPPAGAWEAASAALAAAGGGPSAPLSRFLLLRARPVGGPGI

SEQ ID NO: 51074 - protein, 71 aa, Zea mays
  Coding DNA Sequence Number=SeqID_9295
MRHPHLHQTGTKGSCEHTAEYKGDKGQKDHKGDNDVMGNYQQAAAPAVWKQLIPRLHHQDWLLSFVYILEC

SEQ ID NO: 51075 - protein, 137 aa, Zea mays
  Coding DNA Sequence Number=SeqID_9296
  Subcellular localization annotation: CTP_CleavageSite=40; ConfidenceScore=5.31e-01
MKSWRRTSRSSKSTMSSRRGCDSGPSPAKPQNPTLGARNRSEERKPLQMWSEICGVIIPEYFVTVERVNGRGFLGVGLNSGEQTLAHQSPITPRKEWHTVHVVPCGAMAELRTLSALVDERRRWRHTFTPGGVNLCG

SEQ ID NO: 51076 - protein, 139 aa, Zea mays
  Coding DNA Sequence Number=SeqID_9297
MVATDVKADLDVDCVSAGILGALFEGSKRIEESALFPSSRWSTDARVSLPLGPRKNQVITMRDPAPGLAGPTVRSRTGQSVSDLGSAVEAGAGNDSDVGCGAGSVGAGAVTDTVTAAVTSATEYLSIGPALLPDEPTAE

SEQ ID NO: 51077 - protein, 171 aa, Zea mays
  Coding DNA Sequence Number=SeqID_9298
MQALGKEDKQWAMVPPGRVCEQELRDLPTSETKRAQRDLAAAPLFSTRTHESFFRAQLLAQIALRAHWLLDLPLFLSAVGSESEGHLSYLPAPEDPVPALDPVADIRAEDESIRQFEAQGAMADSSSDDDEDLGIPPPPPVPPRSHDHEADSSSAAPAATPAIDPALAAIL

SEQ ID NO: 51078 - protein, 203 aa, Zea mays
  Coding DNA Sequence Number=SeqID_9299
MAIGDASAAGSLLAFYHPQLRCAWMGLGAAGAADSSPASGGRRLAAEGCTSTGATMSVAAHSAPAVSSGCRCSSSCGGGGHRHCCCVNVYVNNNVQGVTNSVLVGSKVVVRMRDAGTRVARRQRQPRRDGRREGKPSSRQQRKAKTTEVWIIVAVVSSLFVAAAATAAAVLCTPICSFEFARNLAMAKLICAIVVRKGEPTAI

SEQ ID NO: 51079 - protein, 66 aa, Zea mays
  Coding DNA Sequence Number=SeqID_9300
MTSHQTSFGRLDKAIGQIHDPLSYQFLKEAQLTWLQRSNLQEAKFRATRVAGKEAIEPSSGLGLYS

SEQ ID NO: 51080 - protein, 412 aa, Zea mays
  Coding DNA Sequence Number=SeqID_9301
  Pfam annotation: Domain name=F-box; Domain location=19-67; Score =36.3; E_value=1e-07; Accession=PF00646.23; Description=F-box domain
  Pfam annotation: Domain name=FBA_3; Domain location=236-378; Score= -29.9; E_value=0.092; Accession=PF08268.2; Description=F-box associated
  Pfam module annotation: Pfam domain module=F-box::FBA_3; Domain location=19-67::236-378
MASSFKPHAAPKRRALATFNIGALPLDLLVYEILLRLPAKLLCRLRTVCRLWRSILSDPHFAAAHAMRHPGPLIIAAIDERPDVHVNIMDLSGQILKQVRGVPGQRVVSTALDLVFVKKTDSSSSSYRFCNPFSGDVHYLPDQLLNPATGAVYQIPNSFAEEHIDFTSSFISQSRYLFGQVSSTGEYKVFRKLYHLSVQFGGRQLLEICTVNGSNHTGWRAVTPLEKNIQFGVFTSVVINGIIYSQCFDPHHSITYDCRATEEDLIITFDIETEKWGPFMRGPPISFSDAAAQVFNDLRLPPIKQLTLANLNGSLAVVHGPAPSMDIWILMDSGKGLWVKQYIIQFKEYASFQYVHPLVVLRDGRVVLYKEDMQLLQIYDPRTNTLTDSVEVYCSGFYWSICNFINTCYFFH

SEQ ID NO: 51081 - protein, 62 aa, Zea mays
  Coding DNA Sequence Number=SeqID_9302
MALGEPPGGGGGQSRARAARGRGGGGALCGVGAGSSCRPIYHRYRGKREAVRRRPESTTILW

SEQ ID NO: 51082 - protein, 48 aa, Zea mays
  Coding DNA Sequence Number=SeqID_9303
MAAILHCFLPQDLPLRSKDREEEEHVELKRKRGSRRWWIMGIKGLEVV

SEQ ID NO: 51083 - protein, 177 aa, Zea mays
  Coding DNA Sequence Number=SeqID_9304
  Subcellular localization annotation: CTP_CleavageSite=44; ConfidenceScore=5.80e-01
LSESRDSSLSRSSFSFFLSTPLSVAPTPRRSLSAAASPSQPARRAAAPPRRRPAAPPRPALSAPALSKPARSPRRRDARSLAAASPPRRRCPPARRCPLAAVRPLAAVPPRPLAAVRCPPARRAAALQAVSPIAAVRAFVLASAVLASEVFLAVAGLPRVATAPTRHSPTSLTPPPP

SEQ ID NO: 51084 - protein, 167 aa, Zea mays
  Coding DNA Sequence Number=SeqID_9305
  Subcellular localization annotation: CTP_CleavageSite=65; ConfidenceScore=5.03e-01
MCSCSTRRPTEILTSHQETRTPLSRGSHTTAVPASSAISKQKPRDSGQPRSPGLDSNKPRCIPWRFDLVSSIQALRTHSSMGLYNLEHPLAVFITEIALGDFDLELAGMNAALASPFAAALGYQGEDADAPSDQDRVAGIGLRVYLFGHLILATESLVNGQDKITTE

SEQ ID NO: 51085 - protein, 74 aa, Zea mays
  Coding DNA Sequence Number=SeqID_9306
  Subcellular localization annotation: CTP_CleavageSite=53; ConfidenceScore=5.01e-01
MARALHGAILGMDPYTLLAKSSFTRSSVQFRFGARERPIGCLAGVLHHEQATVESEVHQVEVAEQELIEGKLCP

SEQ ID NO: 51086 - protein, 111 aa, Zea mays
  Coding DNA Sequence Number=SeqID_9307
MAYEFEMAKVALEEVKSLTFFIGTGKLCPIDGPQGKIEASRDQAKVFHSGGSAWEFSAALQFLVVDLRSAADPPSPWPDALRAETTAMFRRWPLAAPPSNGEGIGENRVRR

SEQ ID NO: 51087 - protein, 1009 aa, Zea mays
  Coding DNA Sequence Number=SeqID_9308
  Gene Ontology: Mol. function=protein binding
  Homolog annotation: Hit_ID=Q42484; Match level="QueryCoverage=17%, HitCoverage=19%, E-value=1e-07, Identity=28%"; Hit description =Disease resistance protein RPS2
  Pfam annotation: Domain name=LRR_1; Domain location=339-363; Score =0.9; E_value=1.9e+02; Accession=PF00560.23; Description=Leucine Rich Repeat
  Pfam annotation: Domain name=LRR_1; Domain location=468-490; Score =8.7; E_value=6.8; Accession=PF00560.23; Description=Leucine Rich Repeat
  Pfam annotation: Domain name=LRR_1; Domain location=492-517; Score =8.9; E_value=6.2; Accession=PF00560.23; Description=Leucine Rich Repeat
  Pfam annotation: Domain name=LRR_1; Domain location=574-593; Score =6.3; E_value=19; Accession=PF00560.23; Description=Leucine Rich Repeat
  Pfam annotation: Domain name=LRR_1; Domain location=840-863; Score =7.6; E_value=11; Accession=PF00560.23; Description=Leucine Rich Repeat
  Pfam module annotation: Pfam domain module=LRR_1::LRR_1::LRR_1::LRR _1::LRR_1; Domain location=339-363::468-490::492-517::574-593::840-863
MDAPHELRFDKVLYIDCSEWKSRREMQRAIAEELKLDHGTMAMFDNQDEEDDYDGKDKESRDVIRSIAMDIYRRLADCKFMMIFLNGSDNEIDVTRFGIPHITEFGKNTIIWTFKRKLLTINSRHDEIAEKLRYSHLFLYGSIVAGPNLVSEQDFCALVHGEATTIVARHQCMLDMDATMVTECCLFELSLHYNFHNITRLGWDAHSSNYWICAGIIAGNKKMEIANALHGEIRWECDAPLLQRLLEELSPTFSVKKITKPLVVSMRCLVKDRHWISITSQEHGLDGVQDIPAGASAVFLAFQRTGQLEPYARSGHPTSLEGQYSPPILPPGIFKYSRSIAVLVLSYCAFSFASPPFLMCNSLRFLGLDKCKHKPSEQYCDTDAEWTFLLSLWVLEIRYTEWDEILSKEKIDLMSNLKELNIEGVWSWQCINQLRKLIPHLYRLRITNARIYQAETVDVDDSFMDKGKLQLLDLSGNREMKVVPGSLSKASSLEVLLLDGCLGLEYVGALPPSLNSFSLDGYGVASHWTPSINNLLPPENLRPASIDVRDAKISRICLEGCTGLENLFLRGLPNLVELDLSGTGIKILDFTTMVIQVPCLKRLFLLGCERLVAIILEEKWPYDIDTQLELLCIDTRAETGYSRPCIDHTKKSFKLQIHAILSDSRLARSLFSIIDYHICNNIVDIYFNILVTDVPTVYSGEDVQPEAAHRVVALAQYGDVPATAGDVPMQDFPPAPTRDLDRHVGIAKVSRCLDWVQFIELSNSLHLHDNDISTGVNITLAGEFYYLRQCRVERCPKLDTVFPRTDDFRALETIWASDLLMARCIWGKGRPSYMSNLFDALRHLNLRACPRLQFVLPVWVSSFPRLEMLHIADCTDLRHVFVLDEEHREERIAFPNLKAMHLHNLPSLWQICEASMLMLAPALMTIKIRGCWSLRRLPSMEGRGVHMEKPTVEIEKYVWDALEWDGVEAGHHPSLFQQPRHSRYYRKKSLRGSVLRYSFPASILCPDAR

SEQ ID NO: 51088 - protein, 391 aa, Zea mays
  Coding DNA Sequence Number=SeqID_9309
  Homolog annotation: Hit_ID=Q6L7J8; Match level="QueryCoverage=32%, HitCoverage=57%, E-value=3e-19, Identity=37%"; Hit description =Harpin inducing protein 1-like 9
  Pfam annotation: Domain name=Hin1; Domain location=230-367; Score =171.4; E_value=2.2e-48; Accession=PF07320.4; Description=Harpin -induced protein 1 (Hin1)
  Subcellular localization annotation: CTP_CleavageSite=63; ConfidenceScore=5.22e-01
MALSSPFAASTTSGALVSPISQRYSGYLDSGMAGVQSVRRERVEVEMTCKWSNQSGHPPKAQRANGYNSPTSVRRPLVCLCPPPPLVHDGRQPFRRGFHFVFVPPIASPPSNSTRFNPTTASPSRSPPLPSLSLPYKKPSPGASIETQSSPIRRLEPRSAGRSTRGWDRIGSEQRGTDQNPPATTMGSASRAVSCLCCPCKCLACGLLSCLCSILVSLAVVLGVVALILYFIFKPHMIAATVDSASLSQFALSASSTLSYDLNVTMTVRNPNTRVGLYYDDVQALALFSDQRFGYAPLDAFYQGTQASTQLSPGFRGTQLLQGDVTAAEFRQEQSAGNFAVDVDLNAKLRVKVWAFKVRGPKAKVTCKLSVPAPGAANASPFQPTVCKVWF

SEQ ID NO: 51089 - protein, 36 aa, Zea mays
  Coding DNA Sequence Number=SeqID_9310
MARLAVATRAFSASASVGDTGGGVGDNMGRKTTATR

SEQ ID NO: 51090 - protein, 345 aa, Zea mays
  Coding DNA Sequence Number=SeqID_9311
  Gene Ontology: Mol. function=bis(5'-nucleosyl)-tetraphosphatase (asymmetrical) activity
  Homolog annotation: Hit_ID=O24005; Match level="QueryCoverage=55%, HitCoverage=70%, E-value=8e-67, Identity=70%"; Hit description =Diadenosine 5',5'''-P1,P4-tetraphosphate hydrolase
  Pfam annotation: Domain name=NUDIX; Domain location=86-248; Score =64.5; E_value=3.5e-16; Accession=PF00293.18; Description=NUDIX domain
  Subcellular localization annotation: CTP_CleavageSite=57; ConfidenceScore=5.56e-01
MVVVAAAAARGRAVKPLFLVLVHHSRPAPRLPRRTARARPLRFLSCSTSAPPLFAAVASMDSPPQGYRTNVGICLADPSLTKASAPPPSSTILLLSPTRLRWIFSASRIDIPSAWQMPQGGIDAGEEPRAAAFRELREETGVTSAEIVAEAPVWLTYDFPPDVRTKLNARWGTDWKGQAQKWLAPLNFFSWELYEVKFLFRLTGNDDEINLNGDGSEKPEFGEWTWMTPKEVIEKLLCSVFAAESRSNVVVVVLLLLATRMWIAAFVVLECLPRKMGWHYMFPSWRRGYRGLFLVTSMRHQPQSLPLPTGTNPADGGPLVHQVDHDHTVGWPADLQVYVPVFILA

SEQ ID NO: 51091 - protein, 59 aa, Zea mays
  Coding DNA Sequence Number=SeqID_9312
MKQFKTELDRRKAETVERTGFHLQSSGALSSAAPTAKQWWGGFASVLPPATQCFADVRQ

SEQ ID NO: 51092 - protein, 257 aa, Zea mays
  Coding DNA Sequence Number=SeqID_9313
  Homolog annotation: Hit_ID=Q9FMC8; Match level="QueryCoverage=23%, HitCoverage=24%, E-value=8e-17, Identity=69%"; Hit description =Genomic DNA, chromosome 5, P1 clone:MUK11
  Pfam annotation: Domain name=DUF623; Domain location=167-226; Score =93.8; E_value=5.1e-25; Accession=PF04844.4; Description=Protein of unknown function, DUF623
  Subcellular localization annotation: CTP_CleavageSite=69; ConfidenceScore=5.90e-01
MVRKLALASLFFFNASSEGSQRLSSTSSTSAASFSSAVSWQWPSCTQARTRSFRGDTSPEIVSMRHDTSSSKREEQEEGPYNYNNNYKTSMNPAYVHDDYSAADADCYSAATQSLTLSNEDEAIIHGLRSSTTRRILFEPESTSSIMKKTKKKAAAFDGATALSIESADPYGDFRRSMEEMVLSHGADDWVWLEKMLGWYLRANGEKTHGLIVGAFVDLLVALASSSGPSPAVCSSSFKLKQSRRHLQLSVRTGEHH

SEQ ID NO: 51093 - protein, 214 aa, Zea mays
  Coding DNA Sequence Number=SeqID_9314
  Gene Ontology: Mol. function=hydrolase activity; Cellular component =intracellular; Biological process=protein kinase C activation
  Homolog annotation: Hit_ID=Q1T411; Match level="QueryCoverage=97%, HitCoverage=43%, E-value=1e-43, Identity=39%"; Hit description =Pentatricopeptide repeat
  Pfam annotation: Domain name=PPR; Domain location=181-214; Score=1.9; E_value=4.4; Accession=PF01535.11; Description=PPR repeat
  Pfam annotation: Domain name=PPR; Domain location=65-99; Score=18.4; E_value=0.025; Accession=PF01535.11; Description=PPR repeat
  Pfam module annotation: Pfam domain module=PPR::PPR; Domain location =181-214::65-99
MVGAAIACARLGRLRPGREVHCVFLRHFEDDNLLVWTALIDMYGKCRRAGVARKLFDRLRMWNLVCWNAMIIGHCVYGEPGDGIKLFQHMITPGNVQPDGVTFIGVLCACARLGLLQDRRAYFNQMSTVYNLKPTFAHYWCMAIFMGALGRLLGLCRFRRDWRLGERIALRLMELEPSNNVHYALLCNVYAAVGRWEEVYRVKAIMKERDERPC

SEQ ID NO: 51094 - protein, 620 aa, Zea mays
  Coding DNA Sequence Number=SeqID_9315
  Homolog annotation: Hit_ID=Q53M54; Match level="QueryCoverage=93%, HitCoverage=92%, E-value=1e-174, Identity=61%"; Hit description =Expressed protein
  Subcellular localization annotation: CTP_CleavageSite=75; ConfidenceScore=5.88e-01
MPSAATAMDRPSSRPSCSTSKPRKTSPSPSPSPVTAPKPKTVGSSRRRSPLSDINSRDALAARERLGCFRFFLPSASASGSRARSASTPRTPKRPDSKPRPGTRRPNQLPDKESRTRGQKCPGKEPTICGREPIGARINKIGPAAGNKQWLAKDEQLDQFQALTPEKKADSEATPSTGATPPVHASISPEVAAACGSATPACFAAGHHVVPGVGDRRKCRPRGILAIAGEGLTSQDLDEEPSRASIHWLSSPSGAVAWTSSTKCGNEEASVNWLVSPRDEGGVDLLEDEIFVPRCSSEDAFWRFSPDCTGLLGSPLLSGLLDSGTPSSEMSGATPSSGFLPVQKTPSSGDSISPFSLIVKRASESSARFRTLCAQQGLGSSYRYDSVADPTPISGESWPESVSNCTRSGLTRTGSRPLKMMDPVMECLEMMSLSPRPGDDDYDGNGTLPAPLPQHSFQFAGDPTPLESIDLTSFKRSPRDIELKAKDTSFRKSVMEDTRISWREGLVSRMFDMGDLDCCKWLSDDEDSPVFLHTDKALADGTNFEPCNGCCLHEGGDRQEACGFGSVELSCIGDELNNDSIKASPNPVTVAESMNAEGFELVTSDDSDWTLFYKNYLFES

SEQ ID NO: 51095 - protein, 38 aa, Zea mays
  Coding DNA Sequence Number=SeqID_9316
MIGWAKVTHCGVVKAPRHVAQGLERGLEALDDKRLRPR

SEQ ID NO: 51096 - protein, 161 aa, Zea mays
  Coding DNA Sequence Number=SeqID_9317
  Gene Ontology: Mol. function=glutathione transferase activity; Cellular component=cytoplasm; Biological process=metabolic process
  Homolog annotation: Hit_ID=Q9ZP61; Match level="QueryCoverage=60%, HitCoverage=44%, E-value=8e-45, Identity=100%"; Hit description=GST6 protein
  Pfam annotation: Domain name=GST_N; Domain location=58-131; Score =73.4; E_value=7.3e-19; Accession=PF02798.10; Description=Glutathione S-transferase, N-terminal domain
MVSIVHVATKTVAGRTVEGEKDQPNPLIHFGISNAFALPATSLRGRSTEQLVAMAAAAEVVLLDFWVSPFGQRCRIALAEKGVAYEYREQDLLDKGELLLRSNPIHKKIPVLLHAGRPVCESLVILQYIDEAWPDVAPLLPQGRPLRPRAGAFLGRLHRQE

SEQ ID NO: 51097 - protein, 764 aa, Zea mays
  Coding DNA Sequence Number=SeqID_9318
  Gene Ontology: Mol. function=signal transducer activity; Cellular component=membrane; Biological process=signal transduction
  Homolog annotation: Hit_ID=Q8S8J6; Match level="QueryCoverage=26%, HitCoverage=26%, E-value=1e-58, Identity=57%"; Hit description =Putative myosin heavy chain
  Pfam annotation: Domain name=M; Domain location=197-217; Score=0.4; E_ value=1.1e+02; Accession=PF02370.7; Description=M protein repeat
  Pfam annotation: Domain name=M; Domain location=270-290; Score=7.7; E_ value=12; Accession=PF02370.7; Description=M protein repeat
  Pfam annotation: Domain name=M; Domain location=396-416; Score=8.4; E_ value=9.6; Accession=PF02370.7; Description=M protein repeat
  Pfam annotation: Domain name=M; Domain location=445-465; Score=6.8; E_ value=16; Accession=PF02370.7; Description=M protein repeat
  Pfam annotation: Domain name=M; Domain location=550-570; Score=1.2; E_ value=87; Accession=PF02370.7; Description=M protein repeat
  Pfam annotation: Domain name=M; Domain location=718-738; Score=2.9; E_ value=52; Accession=PF02370.7; Description=M protein repeat
  Pfam annotation: Domain name=Tropomyosin; Domain location=375-596; Score=-108.2; E_value=0.018; Accession=PF00261.10; Description =Tropomyosin
  Pfam module annotation: Pfam domain module=M::M::M::M::M::M::Tropomyos in; Domain location=197-217::270-290::396-416::445-465::550-570::718 -738::375-596
MEGENLASTEIPVKEALKDTENIAEPVNVGKEGNKDEEETALDGEFIKVEKEALDMKDGSNVAKPSPNQGDESTTIERSLSNPGRELLEAQEKMKELELELERVTGALKDFESENSRLKDEALLAKEKLDEVGKQYDELDLSNKKLQEQIIEAEQRYSLELANLKEAFQAQEAKQKELAEVKEAFDGLNIEIENSRKRMQELEQDLRSSVEEARKLEELQKQSGLHAESEMQRALESERLLETAKLGAKEMEDQMASLKEEIEGLYEKVAENQKVNAALQSTTAELSAAQEELAISKSLVLDLEQRLASKEALISELANELDLKKASESKVRENISTLENIFAATKEDLQVKVSELEDIKLKLEEEVKAREFVENEMKDQEIQLSVVKEELSKVLKEKEALEIDMSDLSSNAARLKESCSELEEKLKLSNENFCKTDSLLSQALSNNQELEQKLKSLEELHSESGVAAATATEKNLELEDIIKASNETEEVAKSKLRELEARFIAAEQRNVELEQQLNLVELKGFEAEKELKEFSGKISELTTKLGEAEEEKELLNKQMQEYQEKVNLLESALNQSTIKNTELLKELKVSAERSAQHEDRANMSHQRSLELEDLFQNSHSKLEGADKKVNELELLLEAEKYRIQELEEQISKLEKECGDTEAESSRYSDKASELTHELEAFQARASSLEIAVHMANEKEKELTECLNLATDEKKKLEEASRGSSEKLAEAENLVEILRDDLNMTQRKLESIENDLKAAGLRESE

SEQ ID NO: 51098 - protein, 193 aa, Zea mays
  Coding DNA Sequence Number=SeqID_9319
MELLDDDDVKTMVTRYCPPRKVNTEPIRLFVELVDAEPVENITPLSQQHRVENPCEDFSDPDLNDVTDDINDERAGDGNDHASSVGNPSRGIVIRNDLVAHMSIVYLDMAHVSKFLEYSNIILAHLMLVVLESKELFMGQRFTSKDECAGAIKCYSMKVSVNYRVVDSKLTIFVDECWKLKERCRWRVQAAFI

SEQ ID NO: 51099 - protein, 822 aa, Zea mays
  Coding DNA Sequence Number=SeqID_9320
  Gene Ontology: Mol. function=zinc ion binding; Cellular component =nucleus; Biological process=transcription
  Homolog annotation: Hit_ID=Q9SWG3; Match level="QueryCoverage=99%, HitCoverage=98%, E-value=0.0, Identity=66%"; Hit description=Far-red impaired response protein
  Pfam annotation: Domain name=FAR1; Domain location=59-268; Score =372.3; E_value=7.6e-109; Accession=PF03101.5; Description=FAR1 family
  Pfam annotation: Domain name=SWIM; Domain location=546-582; Score =37.3; E_value=5.3e-08; Accession=PF04434.8; Description=SWIM zinc finger
  Pfam module annotation: Pfam domain module=FAR1::SWIM; Domain location=59-268::546-582
MPCNDGVNENMVDIVDETARSRDSGIVDTSKRAVVGFEGDAEFEPHNGIEFESHEAAYSFYQEYAKSMGFTTSIKNSRRSKKSKEFIDAKFACSRYGVTPESDVGSSRRSSVKKTDCKASMHVKRRPDGKWIIHEFVKEHNHELLPALAYHFRIYRNVKLAEKNNIDILNAVSERTRKMYVEMSRQSGGYQNVNMLQSDVKNQFDKGRHLVVDEGDAQIMLEYFKRIKKENPDFFYAIDLNEEQRLRNLFWVDAKSRNDYPSFNDVVSFDTTYVKFNEKLPFAPFVGVNHHFQSMLLGCALLADETKPTFVWLMKTWLRAMGGQAPKVIITDQDKELKAAVEEVFPNTRHCFALWHILEKIPKSLAHVIGPHENFLPKFNKCIFKSWTDEEFDMRWSKMITRFELQDDEWVQSLYEDRKRWVPAFMDNVFLAGMATSQRSESMNSFFDKYIHKKITLKEFVKQYGAILQNRYEEEAVADFDTWQKQPALRSPSPWEKQMSIVYTHAIFKRFQVEVLGVVGCHPKRENENQGTIPFRVQDCEKNENFMVIWNEEMSEVSCSCRLFEYKGFLCRHAMIVLQMCGRTSIPPRYILKRWTKDAKSGQSTTEGTDRVQTRVQRYNDLCKHAIELSEEGSLSEESYNIAFCVLVEALKNCVNVNNSCISAVESTGHAQGLREAEEKNQGSLASKSSKKKSTNRKRKGQSEPALMFVDTQDSLQPMENLSSDGITLNGYYGAQQNVQGLVQLNLMEPPHDGYYVNQQSMQGLGQLNSMAPGHDSFFGTQQSMHGLGQLDYRPSASFTYALQDESQLRSTQLHGGVSRHP

SEQ ID NO: 51100 - protein, 101 aa, Zea mays
  Coding DNA Sequence Number=SeqID_9321
SGQHSASARAIGAIAPATIHGGQKILKRCKWRWDGGRCGATVAVAEAKSQQIRRCQEAKVFKANRANKYLCIMVDLLSCPRNLGEDKIENLKPEINKKNKT

SEQ ID NO: 51101 - protein, 430 aa, Zea mays
  Coding DNA Sequence Number=SeqID_9322
  Gene Ontology: Mol. function=4-aminobutyrate transaminase activity; Cellular component=cytosol; Biological process=amino acid metabolic process
  Homolog annotation: Hit_ID=Q84P54; Match level="QueryCoverage=96%, HitCoverage=91%, E-value=0.0, Identity=73%"; Hit description=Gamma -aminobutyrate transaminase subunit isozyme 1
  Pfam annotation: Domain name=Aminotran_3; Domain location=55-397; Score=261.5; E_value=1.7e-75; Accession=PF00202.11; Description =Aminotransferase class-III
MDHPLKGALLARLYSTEPSLQRDDSDLKDGNGFKGHDMLAPFTAGWQTTDLHPLVIEKSEGSYVYDANGKKYLDSLAGLWCTALGGNEPRLVEAATAQLNKLPFYHSFWNRTTKPSLDLAKDLLETFTATKMAKVFFTNSGSEANDTQVKLVWYYNNALGRPNKKKFIARAKSLPALHQKFDLPAPFVLHTDCPHYWRYHLEGETEEEFSTRLANNLENLILKEGPETIAAFIAEPVMGAGGVIPPPATYFEKIQAVVKKYDILFIADEVICAFGRLGTMFGCDKYNIKPDLVSLAKALSSAYMPIGAVMVSPEVSEVIYSQSNKLGSFSHGFTYSGHPVSCAVAIEALKLYKERNIVEKVKTISPRFQDGLKSFSDSPIVGEIRGDNIMMSPPFIITPQEVDELISKYGKALKATEERVKELKSQQKKH

SEQ ID NO: 51102 - protein, 349 aa, Zea mays
  Coding DNA Sequence Number=SeqID_9323
  Gene Ontology: Mol. function=protein serine/threonine kinase activity; Cellular component=membrane; Biological process=protein amino acid phosphorylation
  Homolog annotation: Hit_ID=Q9SCZ4; Match level="QueryCoverage=90%, HitCoverage=36%, E-value=2e-70, Identity=44%"; Hit description =Receptor-protein kinase-like protein
  Pfam annotation: Domain name=Pkinase; Domain location=49-316; Score= -17.7; E_value=1.7e-07; Accession=PF00069.15; Description=Protein kinase domain
  Pfam annotation: Domain name=Pkinase_Tyr; Domain location=49-316; Score=8.3; E_value=5.6e-13; Accession=PF07714.7; Description=Protein tyrosine kinase
  Pfam module annotation: Pfam domain module=Pkinase::Pkinase_Tyr; Domain location=49-316::49-316
MSLLHLFQVSKKAFGFVSRQESQPNSTLPEELCIRQFSLAEIKASTANFDEGFIIGISNFGSVYKGVIDDGTFTVAIRRMKFSLSAFRTEVVFLSQLNHLNVESLIGFCNEKGETILVYEYLSNGSLFDCLHGNGISCNPIAWEKRLQICIGAARGLHYLHTGVKYIVLHRNVTSNTILLDHELVPKLSGFFLSRLGPHSMSNASSKKQSLDVMATFGYLYSENLLGKNDVYAFGVVLLEVICGKTPVFEANGQERSLAAWANWCFKNGTIYHNIDPYLKGRVAPECFNKYVEIAMSCISYSADERPSMGEVESTLQDALELQKKADSEMKSIIPHSEVMYEDEQFCAP

SEQ ID NO: 51103 - protein, 40 aa, Zea mays
  Coding DNA Sequence Number=SeqID_9324
  Homolog annotation: Hit_ID=Q94FS9; Match level="QueryCoverage=95%, HitCoverage=7%, E-value=1e-10, Identity=79%"; Hit description=Gamma -aminobutyrate transaminase subunit precursor
MSPPLIITPQEVDELISIYGKALKAMEERVKEIKSQQKKQ

SEQ ID NO: 51104 - protein, 179 aa, Zea mays
  Coding DNA Sequence Number=SeqID_9325
MSKRMEAASTMNRTAYVPVENITSAIASQHQQNPASLTIPYERNSNPIGWPNFCPGSNLGTYTHQGSSQPSVDGVITNSAPSQSSAYSQAVPQSSLNQDTNQLQNQNQPAAIHAFSDYDLNWVNNIGVSNQQSSVDHVQLQAPGSTNEKEPSMELISIIVHSREVNMVLVTYNVKEKFD

SEQ ID NO: 51105 - protein, 1523 aa, Zea mays
  Coding DNA Sequence Number=SeqID_9326
  Gene Ontology: Mol. function=motor activity; Cellular component =myosin complex; Biological process=signal transduction
  Homolog annotation: Hit_ID=Q1SXC2; Match level="QueryCoverage=99%, HitCoverage=100%, E-value=0.0, Identity=72%"; Hit description=IQ calmodulin-binding region; Myosin head, motor region; Dilute; AAA ATPase; Myosin, N-terminal, SH3-like
  Pfam annotation: Domain name=DIL; Domain location=1350-1451; Score =158.6; E_value=1.6e-44; Accession=PF01843.9; Description=DIL domain
  Pfam annotation: Domain name=IQ; Domain location=787-807; Score=22.8; E_value=0.0012; Accession=PF00612.17; Description=IQ calmodulin -binding motif
  Pfam annotation: Domain name=IQ; Domain location=810-830; Score=29.3; E_value=1.3e-05; Accession=PF00612.17; Description=IQ calmodulin -binding motif
  Pfam annotation: Domain name=IQ; Domain location=835-855; Score=25.4; E_value=0.0002; Accession=PF00612.17; Description=IQ calmodulin -binding motif
  Pfam annotation: Domain name=IQ; Domain location=858-878; Score=14.8; E_value=0.32; Accession=PF00612.17; Description=IQ calmodulin-binding motif
  Pfam annotation: Domain name=IQ; Domain location=883-903; Score=30.0; E_value=8.3e-06; Accession=PF00612.17; Description=IQ calmodulin -binding motif
  Pfam annotation: Domain name=IQ; Domain location=906-926; Score=25.2; E_value=0.00024; Accession=PF00612.17; Description=IQ calmodulin -binding motif
  Pfam annotation: Domain name=Myosin_N; Domain location=10-51; Score =46.3; E_value=1e-10; Accession=PF02736.9; Description=Myosin N -terminal SH3-like domain
  Pfam annotation: Domain name=Myosin_head; Domain location=64-771; Score=1012.2; E_value=1.8e-301; Accession=PF00063.11; Description =Myosin head (motor domain)
  Pfam module annotation: Pfam domain module=DIL::IQ::IQ::IQ::IQ::IQ::IQ ::Myosin_N::Myosin_head; Domain location=1350-1451::787-807::810 -830::835-855::858-878::883-903::906-926::10-51::64-771
MAATTSLVVGSLVWVEDPDDAWIDGEVVEVKGEDIKVLCTSGKTVVVKASNVYPKDAEAPPCGVDDMTKLAYLHEPGVLQNLRSRYDMNEIYLFIIFQNLLTRGGNCPESYFQTYTGNILIAVNPFRRLPHLYDSHMMAQYKGAAFGELSPHPFAVADAAYRLMMNEGISQSILVSGESGAGKTESTKLLMRYLAYMGGRAAAEGRTVEQQVLESNPVLEAFGNAKTVRNNNSSRFGKFVEIQFDWSGRISGAAIRTYLLERSRVCQVSDPERNYHCFYMLCAAPPEDIQRFKLGNPRSFHYLNQSNCYELDGVDESKEYAATRRAMDVVGISSDEQDAIFRVVAAILHLGNIEFAKGKEIDSSVPKDEKSRFHLRTAAELFDLSEENIESMFNGQFCFRCDEKLLEDSLCKRVIVTRDETITKWLDPVSAALSRDALAKIVYSRLFDWIVDKINSSIGQDPDSKYLIGVLDIYGFESFKTNSFEQFCINLTNEKLQQHFNQHVFKMEQEEYTKEEINWSYIEFVDNQDVLDLIEKKPGGIIALLDEACMFPRSTHETFAQKLYQTFKNHKRFSKPKLSRSDFTICHYAGDVTYQTELFLDKNKDYVVAEHQALLNASKCSFVSGLFPPLAEESSKSSKFSSIGSRFKTNGSWALSLCISQQQLQALLETLSSTEPHYIRCVKPNNLLKPSIFENKNVLQQLRCGGVMEAIRISCAGYPTRKQFDEFVDRFGLLAPEVLDGSSDEVAACKKLLEKVGLQGYQIGKTKVFLRAGQMADLDTRRIEVLGRSASIIQRKVRSYLARRSFIVLRRSALQIQSVCRGQLARKVFEGMRREAASLRIQRDLRMHLARKAYKELFSSAVSIQTGMRGMAARNELRFRRQTRAAIIIQSQCRKFLARLHYLKLKKAAIATQCAWRGRVARKELRKLKMAARETGALQAAKNKLEKQVEELTWRLQLEKRMRVDLEEAKTQENAKLQSALQDIQLQFKETKELLAKEREDAKKAAEVVPIIQEVSVVDPVMLEKLTNENEKLKALVTSLEKKIDETEKKFEETNKISEERLKQALDAESKIVQLKTVMHSLEEKISDIESENQVLRQQTLLNSPVKKVSQLPPIPVFPNLENGHHMDELNKSNEPQSVTPVKKAGAESDGRLRRSNLERQHENVDALINCVSKDIGFSQGKPVAAFTIYKCLLHWKSFEAERTSVFDRLIQMIGSAIENEENNGHMAYWLSNTSTLLFLLQKSLKAAGSSGATPSRKPTAATSLFGRMTMGFRSSPSSNNLAAAAALAVVRQVEAKYPALLFKQQLAAYVEKIYGIIRDNLKKELSSLLALCIQVCFVDVLCGFNSNGLLILAILSFSSLLLRRECCTFSNGEYVKAGLAELELWCCQAKEEFAGSSWDELKHIRQAVGFLVIHQKYRISYDEITNDLCPILSVQQLYRICTLYWDDNYNTRSVAPNVISSMRVLMTEDSNDAASSSFLLDDNSSIPFSVDDLSNSLQEKDFLEVNPAEELLENPAFQFLHE

SEQ ID NO: 51106 - protein, 185 aa, Zea mays
  Coding DNA Sequence Number=SeqID_9327
MGIEDDTTKKEAFYWFEDKLKPWEKLELGRQGITELTIAITEAESFVELGPRKDKFETSKPKETENGGGDHEEERDKNDNGDNEEDDPNKEIMRLGSIMSGVEVKKVFLFPFFDCIHIFDYPQQRCVVPVNQDMRVRTKLAWKKHKGPFRVLKRFFFVFELLPLYVKCLTRISIENSHFGRVRQT

SEQ ID NO: 51107 - protein, 174 aa, Zea mays
  Coding DNA Sequence Number=SeqID_9328
  Gene Ontology: Mol. function=zinc ion binding
  Homolog annotation: Hit_ID=Q2HSJ5; Match level="QueryCoverage=44%, HitCoverage=16%, E-value=4e-11, Identity=43%"; Hit description=Zinc finger, CCHC-type; Zinc finger, SWIM-type
  Pfam annotation: Domain name=SWIM; Domain location=30-62; Score=42.2; E_value=1.7e-09; Accession=PF04434.8; Description=SWIM zinc finger
MHTVCHDRDSLWFRVAEFDRPHQGVIGGQYRVHLQNRTCDCGMFDALRYPCAHVIAACQNLRLDSMSYVDEVYKLENMYNFWRHVFPPVLDERDLVVGVGTMTHLDRIVNVEVFASPTTKVFETHTVMAFGKKKSSPTASLAIPPVTMAYTSAVQSALSKIEMNRAIDSNLPWD

SEQ ID NO: 51108 - protein, 46 aa, Zea mays
  Coding DNA Sequence Number=SeqID_9329
MAPLKAPRVDGLNAQNFQSQWAFIGASIASIVKEVFHGALEWLDDG

SEQ ID NO: 51109 - protein, 490 aa, Zea mays
  Coding DNA Sequence Number=SeqID_9330
  Gene Ontology: Mol. function=ammonium transporter activity; Cellular component=membrane; Biological process=transport
  Homolog annotation: Hit_ID=Q70KK9; Match level="QueryCoverage=96%, HitCoverage=94%, E-value=0.0, Identity=70%"; Hit description=High affinity ammonium transporter
  Pfam annotation: Domain name=Ammonium_transp; Domain location=48-476; Score=593.1; E_value=2.6e-175; Accession=PF00909.11; Description =Ammonium Transporter Family
MAGFTCSAADLRPLLGTAANATAAAEYICNAFDTVSNKLVAATYAIDNTYLLFSAYLVFSMQLGFAMLCAGSVRAKNTMNIMLTNVLDAATGSLFYYLFGFALAFGSPSNGFVGRHFFGLEKYPSPSGDYSFFLYQWSFAIAAAGITSGSIAERTQFVAYLIYSSFLTGLVYPIVSHWFWSTDGWASPVREGHLLFGSGVIDFAGSGVVHMVGGIAGLWGALVEGPRMGRFDGDGKPVLLRGHSGTLVVLGTFLLWFGWYGFNPGSFLSILKTYEHTNYSSYYGQWSAIGRTAVTTTISGSSAALTTLFGKRLLTGHWNVTDVCNGLLGGFAAITGGCSVVDPWAAIICGFIAAWVLIGCNKLAEMLKYDDPLEAAQLHGGCGAWGIIFTALFAKKDYVNEIYPGKPGRPHGLLMGGGARLLAAHLIQILVVIGWVSVTMGSVFWLLKVFGLLRISADEEMAGLDEPYNGKLEMAYNGMLIGAVVCPQHM

SEQ ID NO: 51110 - protein, 402 aa, Zea mays
  Coding DNA Sequence Number=SeqID_9331
  Gene Ontology: Mol. function=hydrolase activity; Cellular component =membrane; Biological process=intracellular signaling cascade
  Homolog annotation: Hit_ID=Q9SK32; Match level="QueryCoverage=51%, HitCoverage=39%, E-value=7e-23, Identity=33%"; Hit description =Expressed protein
MGWLCDTFPDPDEDSTEIERIRYAQAYILQLIGGYLMPDMSPSRVHLRWLLKLVDFRAAGELSWGSAVLATLYREMYGATRLRRAKIRGCLSLLQSWAQFRFPFLRPRLDHPYTFPLITRWNHPASHARFPSSLEDIRLLLDQRSKAQFQWTPYEDPVIRAIIPEEFLQNSNVWHVRVVLINYATVEPHQSDRVLRQFGCRQPIPVDPEDLWQAVFTDARREAATNTCRKGNARASKSKTTRRRQPLNEAQTFTRLIISGHAITRPNESTDTVTRRSSSTDDTHATAFSDDASPMAGWSQMPGSAPFPVMSSGPPMYRPAVHEGLQEGLSGSSPFYQSPATYGFQTSSPFVMQTPPHTLFFEGGSSSQARQPDTIPEEPESPPEEQQPPLEVRERRNPARNR

SEQ ID NO: 51111 - protein, 58 aa, Zea mays
  Coding DNA Sequence Number=SeqID_9332
MRVEKKARRKKQKTWILGKTEAGMGRVTLVAERNRGRGSGGAEEDRCAICADDVTTMA

SEQ ID NO: 51112 - protein, 260 aa, Zea mays
  Coding DNA Sequence Number=SeqID_9333
MNEWFIEFVQTNPMAQRPPPPHVPQLVPVVPQGFQPIRVSKASVDKIRKYGAEEFRGVEYLNFSCSERSGRLGVPPNRISKELVIRAKIGENNIDFLERSDKEQAQTVRSSNTTARSRPPRNTGNARNIRSGTKDSAVRFEARMPARTYVIRAREEALAPDVITSTFSIFNTDVIALINSRMDSESNLISAMSTHKYVRKACEAYLAYIFDSRVSELKLESVPVVWNSSCHMVSLLDNLNGAYTRLPSSISCHNLNVFHS

SEQ ID NO: 51113 - protein, 484 aa, Zea mays
  Coding DNA Sequence Number=SeqID_9334
  Gene Ontology: Mol. function=sequence-specific DNA binding; Cellular component=nucleus; Biological process=regulation of transcription, DNA-dependent
  Homolog annotation: Hit_ID=Q8S555; Match level="QueryCoverage=86%, HitCoverage=58%, E-value=6e-56, Identity=34%"; Hit description =Homeodomain protein HB2
  Pfam annotation: Domain name=Homeobox; Domain location=42-96; Score =57.7; E_value=3.7e-14; Accession=PF00046.19; Description=Homeobox domain
  Pfam annotation: Domain name=START; Domain location=207-454; Score =83.9; E_value=4.8e-22; Accession=PF01852.10; Description=START domain
  Pfam module annotation: Pfam domain module=Homeobox::START; Domain location=42-96::207-454
MEKEEQQANDYTDEDTDYTDDEEEDYNDDEDYTPEPETASKRQKRHTLEQIRELRAAYQRCDHPDAPTRRALGAKIGLEGRQVQYWFQNQRSQTQAKALAQNNRVVQQENAALMAENASLRHAILTGSCLACGGATTAAAPAELPPESRRLVAENARLRGEYARATALLNQILLSAPAPPGPAAAAVVVSSSSVARPVADRAARLRGHAEAAMDQFLLLATKGEPLWLPTTPDGEALNYQLGYKHKKALPVHHGLCPDEFVMEASRATGVVRASATYLVATLTDARRWSEMFPSVVASVTARRDAAISGGVFGSHIQLHSQMNAELQVHSPRLLNRSINFLRYTKRVAEGRWAVMDVSVDGILGPPGSRVADAAAAAAAANGVTLVPAWYTGCRLLPSGCLVEDMRNGYCKVTWVVHAEYDETTVPTMFRPLFRSGKALGAHRWLASLQRQCEFLAVLHSSQVSRGGDNTGQSLKIVFLGLAPI

SEQ ID NO: 51114 - protein, 118 aa, Zea mays
  Coding DNA Sequence Number=SeqID_9335
  Subcellular localization annotation: CTP_CleavageSite=27; ConfidenceScore=5.07e-01
MARIGRHVPPENSGNIALSRTSPWSIRTATAKGRMNCRRVPLDVHPCRNPLEGSGVHASQLKLGLGGIALLTNGVPCWNGSFAMLSRMPWAASLASFLSPWEKEDGAWAIDPIRDGLD

SEQ ID NO: 51115 - protein, 1116 aa, Zea mays
  Coding DNA Sequence Number=SeqID_9336
  Gene Ontology: Mol. function=protein serine/threonine kinase activity; Cellular component=integral to membrane; Biological process=protein amino acid phosphorylation
  Homolog annotation: Hit_ID=Q5VQM7; Match level="QueryCoverage=96%, HitCoverage=95%, E-value=0.0, Identity=79%"; Hit description =Putative receptor-like protein kinase INRPK1
  Pfam annotation: Domain name=APH; Domain location=786-967; Score= -10.8; E_value=0.033; Accession=PF01636.13; Description =Phosphotransferase enzyme family
  Pfam annotation: Domain name=LRRNT_2; Domain location=33-74; Score =47.3; E_value=5.2e-11; Accession=PF08263.3; Description=Leucine rich repeat N-terminal domain
  Pfam annotation: Domain name=LRR_1; Domain location=105-127; Score =9.7; E_value=4.4; Accession=PF00560.23; Description=Leucine Rich Repeat
  Pfam annotation: Domain name=LRR_1; Domain location=129-148; Score =11.1; E_value=2.4; Accession=PF00560.23; Description=Leucine Rich Repeat
  Pfam annotation: Domain name=LRR_1; Domain location=154-176; Score =15.1; E_value=0.25; Accession=PF00560.23; Description=Leucine Rich Repeat
  Pfam annotation: Domain name=LRR_1; Domain location=178-200; Score =12.0; E_value=1.6; Accession=PF00560.23; Description=Leucine Rich Repeat
  Pfam annotation: Domain name=LRR_1; Domain location=202-225; Score =10.2; E_value=3.6; Accession=PF00560.23; Description=Leucine Rich Repeat
  Pfam annotation: Domain name=LRR_1; Domain location=227-249; Score =8.6; E_value=6.9; Accession=PF00560.23; Description=Leucine Rich Repeat
  Pfam annotation: Domain name=LRR_1; Domain location=251-273; Score =0.7; E_value=2.1e+02; Accession=PF00560.23; Description=Leucine Rich Repeat
  Pfam annotation: Domain name=LRR_1; Domain location=275-297; Score =11.3; E_value=2.2; Accession=PF00560.23; Description=Leucine Rich Repeat
  Pfam annotation: Domain name=LRR_1; Domain location=299-321; Score =11.9; E_value=1.7; Accession=PF00560.23; Description=Leucine Rich Repeat
  Pfam annotation: Domain name=LRR_1; Domain location=323-345; Score =13.3; E_value=0.91; Accession=PF00560.23; Description=Leucine Rich Repeat
  Pfam annotation: Domain name=LRR_1; Domain location=347-369; Score =15.0; E_value=0.28; Accession=PF00560.23; Description=Leucine Rich Repeat
  Pfam annotation: Domain name=LRR_1; Domain location=371-393; Score =16.9; E_value=0.075; Accession=PF00560.23; Description=Leucine Rich Repeat
  Pfam annotation: Domain name=LRR_1; Domain location=395-417; Score =11.7; E_value=1.9; Accession=PF00560.23; Description=Leucine Rich Repeat
  Pfam annotation: Domain name=LRR_1; Domain location=419-441; Score =18.0; E_value=0.034; Accession=PF00560.23; Description=Leucine Rich Repeat
  Pfam annotation: Domain name=LRR_1; Domain location=443-465; Score =9.5; E_value=4.8; Accession=PF00560.23; Description=Leucine Rich Repeat
  Pfam annotation: Domain name=LRR_1; Domain location=467-489; Score =7.8; E_value=9.9; Accession=PF00560.23; Description=Leucine Rich Repeat
  Pfam annotation: Domain name=LRR_1; Domain location=491-513; Score =13.4; E_value=0.85; Accession=PF00560.23; Description=Leucine Rich Repeat
  Pfam annotation: Domain name=LRR_1; Domain location=515-538; Score =12.2; E_value=1.5; Accession=PF00560.23; Description=Leucine Rich Repeat
  Pfam annotation: Domain name=LRR_1; Domain location=540-562; Score =17.5; E_value=0.048; Accession=PF00560.23; Description=Leucine Rich Repeat
  Pfam annotation: Domain name=LRR_1; Domain location=564-586; Score =15.7; E_value=0.17; Accession=PF00560.23; Description=Leucine Rich Repeat
  Pfam annotation: Domain name=LRR_1; Domain location=588-610; Score =13.1; E_value=1; Accession=PF00560.23; Description=Leucine Rich Repeat
  Pfam annotation: Domain name=LRR_1; Domain location=612-635; Score =1.0; E_value=1.9e+02; Accession=PF00560.23; Description=Leucine Rich Repeat
  Pfam annotation: Domain name=LRR_1; Domain location=637-658; Score =12.0; E_value=1.6; Accession=PF00560.23; Description=Leucine Rich Repeat
  Pfam annotation: Domain name=LRR_1; Domain location=660-684; Score =7.2; E_value=13; Accession=PF00560.23; Description=Leucine Rich Repeat
  Pfam annotation: Domain name=LRR_1; Domain location=78-100; Score =0.7; E_value=2.1e+02; Accession=PF00560.23; Description=Leucine Rich Repeat
  Pfam annotation: Domain name=Pkinase; Domain location=784-1061; Score= 125.1; E_value=1.9e-34; Accession=PF00069.15; Description=Protein kinase domain
  Pfam annotation: Domain name=Pkinase_Tyr; Domain location=784-1061; Score=70.9; E_value=4.1e-18; Accession=PF07714.7; Description =Protein tyrosine kinase
  Pfam module annotation: Pfam domain module=APH::LRRNT_2::LRR_1::LRR _1::LRR_1::LRR_1::LRR_1::LRR_1::LRR_1::LRR_1::LRR_1::LRR_1::LRR _1::LRR_1::LRR_1::LRR_1::LRR_1::LRR_1::LRR_1::LRR_1::LRR_1::LRR
  Pfam module annotation: Pfam domain module=LRR_1::LRR_1::Pkinase::Pkin ase_Tyr; Domain location=786-967::33-74::105-127::129-148::154 -176::178-200::202-225::227-249::251-273::275-297::299-321::323
  Pfam module annotation: Domain location=395-417::419-441::443 -465::467-489::491-513::515-538::540-562::564-586::588-610::612 -635::637-658::660-684::78-100::784-1061::784-1061
MNGRWRSACAAAAAPLLLWCALVLACMGSALAVDAQGAALLAWKRTLRGGAEEALGDWRDSDASPCRWTGVSCNAAGRVTELSLQFVGLHGGVPADLHSSAVGATLARLVLTGANLTGPIPPQLGDLPALAHLDLSSNALTGPIPAALCRPGSRLESLYVNSNRLEGAIPDAIGNLTALRELVVYDNQLEGPIPASIGQMASLEVLRAGGNKNLQGALPPEIGSCSNLTMLGLAETSISGPLPATLGQLKSLDTIAIYTAMLSGPIPPELGQCTSLVNVYLYENALSGSIPPQLGRLSNLKTLLLWQNSLVGVIPPELGACAGLAVLDLSMNGLTGHIPASLGNLTSLQELQLSGNKVSGPVPAELARCANLTDLELDNNQISGAIPAGIGKLTALRMLYLWANQLTGSIPPEIGGCASLESLDLSQNALTGPIPRSLFRLPRLSKLLLIDNALSGEIPPEIGNCTSLVRFRASGNHLAGAIPPEVGRLGNLSFFDLSSNRLSGAIPAEIAGCRNLTFVDLHGNAIAGVLPPRLFHDMLSLQYLDLSYNSIGGAIPPDIGKLSSLTKLVLGGNRLTGQIPPEIGSCSRLQLLDLGGNTLSGGIPASIGKIPGLEIALNLSCNGLSGAIPKEFGGLVRLGVLDVSHNQLSGDLQPLTALQNLVALNISFNGFTGRAPATAFFAKLPASDVEGNPGLCLSRCPGDASERERAARRAARVATAVLVSALVALLAAAAFLLVGRRGRSSVFGGARSDADGKDADMLPPWDVTLYQKLDITVGDVARSLTPANVIGQGWSGSVYRASVPSTGAAIAVKRFRSCDEASAEAFACEVGVLPRVRHRNIVRLLGWAANRRTRLLFYDYLPNGTLGGLLHSAGGGSAGAAVVEWEVRLSIAVGVAEGLAYLHHDCVPAILHRDVKADNILLGERYEACLADFGLARVAEDGANSSPPPFAGSYGYIAPEYGCMTKITTKSDVYSFGVVLLEAITGRRPVEAAFGEGRSVVQWVREHLHQKRDPADVVDQRLQGRADAQVQEMLQALGIALLCASARPEDRPTMKDAAALLRGLRSDDGSAEARKVSGSRPPPLDSARWAAASSPAKPTALPRPSPSASSSLAYSM

SEQ ID NO: 51116 - protein, 452 aa, Zea mays
  Coding DNA Sequence Number=SeqID_9337
  Gene Ontology: Mol. function=ubiquitin thiolesterase activity; Cellular component=intracellular; Biological process=ubiquitin -dependent protein catabolic process
  Homolog annotation: Hit_ID=Q5VQM6; Match level="QueryCoverage=86%, HitCoverage=88%, E-value=1e-165, Identity=73%"; Hit description =Putative ZmEBE-1 protein
  Pfam annotation: Domain name=DUF239; Domain location=208-412; Score =381.5; E_value=1.3e-111; Accession=PF03080.5; Description =Arabidopsis proteins of unknown function
MSSSSGCNRGRAVLPVTASLVPFLLLLVVVSCQAALVVSATHTHGHGGGKHAGAARAAFRAGDEQEAYARIMARMARMDKDSNMTIQSPDGDVIHCVPAHLQPAFDHPRLRGQEPEDEPVERPMSKGGAAEEEAGVFPQAWSDGGSKRCPAGTVPIRRTAARDVLRASSARRFGMKARGGGSSSSNARRDSTSSGHEHAVGYVTGDQFYGAKASLNVWPAKVASAAEFSLSQIWVISGSFGNDLNTIEAGWQVSPELYGDSSPRFFTYWTTDAYQETGCYNLHCSGFVQTNSRIAIGAAISPTSVYNGRQFDISLLIWKTDVRARAQDPHRGNWWLQLGSGPLVGYWPSLLFTHLGAHADMVQFGGEVVNSRPAGAHTPTQMGSGHFPREGSNRAAYFRNLQVVDADNSLVAAAALRLVADRPGCYDIQGGYNTAWGNYFYYGGPGRNVHCP

SEQ ID NO: 51117 - protein, 63 aa, Zea mays
  Coding DNA Sequence Number=SeqID_9338
MRNSSPTGIQGSTVDLSDSRCFLEVLVAGSEEINHGADRSSSPDVGARRGLWAECCIALITLR

SEQ ID NO: 51118 - protein, 150 aa, Zea mays
  Coding DNA Sequence Number=SeqID_9339
MNASQFMDKQILGLAASASPSGGGAGGGGGVDLSDLMIPIPQEDAENRLGRRRSSTSVNGTADDMLPSYDFQPIRTSGGAAAAAAPQASWGSLDSKAPSASYNLKPTFHPLLVSHHHQLSSRILEYVVNSVFKATPKRPGARRNLAPLPA

SEQ ID NO: 51119 - protein, 98 aa, Zea mays
  Coding DNA Sequence Number=SeqID_9340
MEKKSNHRKNYRATNTGETRGEKDANWAPAGSESRPGIWAVRVEHDTVGVESACLVRSACREGRQEACGIWLGGSRRDWAGSLARRGRRSGVCRERSG

SEQ ID NO: 51120 - protein, 60 aa, Zea mays
  Coding DNA Sequence Number=SeqID_9341
MAHGALARPARLEQLGTATRAIARRTGGDEEDGYDYAYGNGKEGVEADLQEFQDVDEFED

SEQ ID NO: 51121 - protein, 154 aa, Zea mays
  Coding DNA Sequence Number=SeqID_9342
  Subcellular localization annotation: CTP_CleavageSite=56; ConfidenceScore=5.48e-01
MAVGRLLSHVAPDSPVRHRTLSGVPATSASHWGSTVGALTCGASGLSGGAPDRSCRLSAVVVVALDARSLRGEGRRRFRWPVTSHASPIITVLAVAAPLSSTIAETAVPVTGNVTGELDRRNEGIHGGGCGDDLILDDCDGGYGGVGCSWESRA

SEQ ID NO: 51122 - protein, 121 aa, Zea mays
  Coding DNA Sequence Number=SeqID_9343
  Gene Ontology: Mol. function=ATP-dependent helicase activity; Cellular component=cytoplasm; Biological process=regulation of translation
  Homolog annotation: Hit_ID=Q53RP3; Match level="QueryCoverage=86%, HitCoverage=22%, E-value=7e-27, Identity=59%"; Hit description =DEAD/DEAH box helicase, putative
MASNSPGCHRNNDFEDYFLKCELLMEIYEKGFERPSPIQEESIPIALTGSDILARAKNGTGKTAAFCILALEKIYLEKMLFKVLDMDVSVLNYLNFEMTAPTAKVLFEDPALHLRFLANVR

SEQ ID NO: 51123 - protein, 168 aa, Zea mays
  Coding DNA Sequence Number=SeqID_9344
MARPLVDDQLVVASPLRIWSSSITVDDACGIEVRQLQSWAMFEGVKSLVDGCIPTVGHSPAADISQLSALPSPRRRTPSRRPAPKPSAFPDLQQPPDMDPVSTALQDSPPASSALVVALATIQAAVATSQERQRAASLALEQEYHRHCPNCLDGHRATPSPRSPADRP

SEQ ID NO: 51124 - protein, 67 aa, Zea mays
  Coding DNA Sequence Number=SeqID_9345
  Homolog annotation: Hit_ID=Q5NBF4; Match level="QueryCoverage=50%, HitCoverage=7%, E-value=2e-09, Identity=76%"; Hit description =Putative UBA3
MDSCRRKNVTTYNGLEGTHIKVTEFVRDKDCLVCGPGTLVELDTSSTLSDIDSCILVHAMDEVVKGT

SEQ ID NO: 51125 - protein, 409 aa, Zea mays
  Coding DNA Sequence Number=SeqID_9346
  Gene Ontology: Mol. function=small protein activating enzyme activity; Cellular component=nucleus; Biological process=protein modification process
  Homolog annotation: Hit_ID=Q5NBF4; Match level="QueryCoverage=68%, HitCoverage=61%, E-value=1e-134, Identity=85%"; Hit description =Putative UBA3
  Pfam annotation: Domain name=ThiF; Domain location=47-193; Score =170.9; E_value=3.3e-48; Accession=PF00899.11; Description=ThiF family
  Pfam annotation: Domain name=UBACT; Domain location=246-313; Score =17.8; E_value=8.4e-05; Accession=PF02134.11; Description=Repeat in ubiquitin-activating (UBA) protein
  Pfam module annotation: Pfam domain module=ThiF::UBACT; Domain location=47-193::246-313
MASPDAEQPAPTELERWRDLDMLLSRPGNLVEATFDPSPGLRDLLGSLVEVLVVGAGGLGCELLKDLALSGFKKLHVIDMDTIDVSNLNRQFLFRVQDVGKSKAEVAAKRVMERVNGVNIVPHFCRIEDKEIEFYSQFHIIVLGLDSIEARSYINSVACGFLDYDSSDNPLQETVKPMVDGGTEGFKGHARVIIPGTTPCFECNIWLFPPQVKFPLCTLAETPRTAAHCIEYAHLIKWDEVHPGKPFDGDDAEHMQWIYSEALKRAELFGISGVTYSLTQCHCQSSGAGAGKMTSTLLCRLLFSSVVAQQSSEAPLKRRPRRAQYCSRSGRLLACSAAEQTTEEDRSTLEGGGALQTTTAARWRGATAARAEGCLSTTGRQERRATAMEKGSRRWGRAHAQQCVPYWYM

SEQ ID NO: 51126 - protein, 43 aa, Zea mays
  Coding DNA Sequence Number=SeqID_9347
MELNQHRTLLWRYQSFDSEIGALIEVVPLLYGSKQDGKGDFEM

SEQ ID NO: 51127 - protein, 178 aa, Zea mays
  Coding DNA Sequence Number=SeqID_9348
  Gene Ontology: Mol. function=protein dimerization activity
  Homolog annotation: Hit_ID=Q2QNH1; Match level="QueryCoverage=90%, HitCoverage=19%, E-value=1e-67, Identity=75%"; Hit description=HAT family dimerisation domain containing protein, expressed
MSLLIQCVNMSTRKVEEYFLGFMKVDDTSGDGLFNSLLDSIMSFGLNIEDVRGQGYDNGSNMKGKHKGVQRRLFDINPRALFMPCACHSLNLTLCDMAKSCGKAISFFGIVQRVNTLFSSSTKRCDVLKDHVESLTVNSWCNTRWESRIKTAKAIRFQAPQISEREIGSNLFLNDFGG

SEQ ID NO: 51128 - protein, 97 aa, Zea mays
  Coding DNA Sequence Number=SeqID_9349
MVASPIYGGPWYGIGEMGSGYRDFIIPYAGPKLGDQIWRENSGQVLVSAGELRAFSCGTERRTGTLLTDEAHSTTTEEGRGVRGNRKTGPRARVVND

SEQ ID NO: 51129 - protein, 54 aa, Zea mays
  Coding DNA Sequence Number=SeqID_9350
MVANESQADSVLFGNAGAVPVLSAGTSVILSSIVSPGFVIHLNRRLEDNDFRDR

SEQ ID NO: 51130 - protein, 71 aa, Zea mays
  Coding DNA Sequence Number=SeqID_9351
MAVMGSTSDKMYLCQVPNFGILNDKVETGVIPERPTCIGSGEMARVVCTLRGKRLDIGVSMLSVGVNPVWS

SEQ ID NO: 51131 - protein, 97 aa, Zea mays
  Coding DNA Sequence Number=SeqID_9352
MVASPVYGGPWYDIGEMGSGYRDFIIPYACPKLGDRIWRENPGRILVSAGELRAFSCRTERRIGTLLTDEAHSTATEEGRGVHGNRETGARARVVNG

SEQ ID NO: 51132 - protein, 106 aa, Zea mays
  Coding DNA Sequence Number=SeqID_9353
MAATVVATAPPLGLRWGAWAEVKQPYVNDEYVFVTKSMTLINITNMIVNVTKHGTTHCHMDDDVAQSYDEYVCHEIDDVAYDMAVDVAELLDILFCHKCGDMAINL

SEQ ID NO: 51133 - protein, 56 aa, Zea mays
  Coding DNA Sequence Number=SeqID_9354
MAAVDCPWTVSSALVFLWLQLAVDFPCRACLGPSSPMSSSLGVPPMPALAQGVAYR

SEQ ID NO: 51134 - protein, 33 aa, Zea mays
  Coding DNA Sequence Number=SeqID_9355
MACEISLIDSLIIVSINQVEHNLVEVYIFVTDS

SEQ ID NO: 51135 - protein, 105 aa, Zea mays
  Coding DNA Sequence Number=SeqID_9356
MRSPELGRVQAIGAPRSPELVRTGGKGPTNSLGLETGPIWPDTTRGGERPRSSSGKDELAMAKAELKEIENGSEFLTSGRRSGWLGAASGGLDGWHGERRLKGGG

SEQ ID NO: 51136 - protein, 152 aa, Zea mays
  Coding DNA Sequence Number=SeqID_9357
  Gene Ontology: Mol. function=cysteine-type peptidase activity; Biological process=ubiquitin cycle
  Homolog annotation: Hit_ID=Q2QTR5; Match level="QueryCoverage=84%, HitCoverage=23%, E-value=3e-21, Identity=41%"; Hit description =Expressed protein
MDAFVAGSRGRPALSFLCPKISLFSPPSHSWFRWLVDEIRGLLPRGFDIIGVLLVGGEGSDADVTRALEQARALRELLFGVAASHGLVGGHMDAATGEIRFVVSESGWTNSVEGSVVTWEDEPGRLLWEKGCLLRCELLLKLPLYLRPDVNS

SEQ ID NO: 51137 - protein, 79 aa, Zea mays
  Coding DNA Sequence Number=SeqID_9358
  Subcellular localization annotation: CTP_CleavageSite=61; ConfidenceScore=5.75e-01
MPSAATCSIFPFLSLSLPLGSLSPAPTRQKPSSPGAGDRPTPSRPCTRDFGLPAPRPCSLRANRPTAPCPCPAPRAAPR

SEQ ID NO: 51138 - protein, 558 aa, Zea mays
  Coding DNA Sequence Number=SeqID_9359
  Gene Ontology: Mol. function=transcription factor activity; Cellular component=nucleus; Biological process=regulation of transcription, DNA-dependent
  Homolog annotation: Hit_ID=Q1WBS8; Match level="QueryCoverage=99%, HitCoverage=100%, E-value=0.0, Identity=74%"; Hit description =Putative chitin-inducible gibberellin-responsive protein
  Pfam annotation: Domain name=GRAS; Domain location=162-468; Score =467.2; E_value=2e-137; Accession=PF03514.5; Description=GRAS family transcription factor
MADPPTSRMVQHPFGDIPSQTPKQFLYSGSSQHLCHPYQSASDAHVAPQRHYTVRSQSQSQSPDAGSEDFETHSRQYTLDSSSASGCSGHGSPSCQSVHAGSRSPVSHSHDDSHSGSTNGNGSPASASCVTEDPTDLKQKLKDLEAVMLGTDTDPETVDSLEIAIADRLSVEPEEWKNNMVSVPRGDLKELLIACARAVEQNNGYSIDLMVPELRKMVSVSGEPLERLGAYMVEGLVARLAASGSSIYKALRCKEPRSSDLLSYMHFLYEACPYFKFGYMSANGAIAEAVKGEDRIHIIDFHIAQGAQWVSLLQALAARPGGPPFVRVTGIDDPVSAYARGGGLELVGKRLSHIAGLYKVPFQFDAVAISGSEVEEGHLGVVPGEAVAVNFTLELHHIPDETVSTANHRDRVLRLVKGLSPRVLTLVEQESNTNTAPFAQRFAETLDYYAAIFESIDLALPRGDRERINIEQHCLAREIVNLVACEGEERVERHEVFGKWKARLMMAGFRPSPLSALVNATIKTLLQSYSPDYKLAEREGVLYLGWKNRPLIVSSAWH

SEQ ID NO: 51139 - protein, 308 aa, Zea mays
  Coding DNA Sequence Number=SeqID_9360
  Gene Ontology: Mol. function=protein kinase activity; Cellular component=cytoplasm; Biological process=protein amino acid phosphorylation
  Homolog annotation: Hit_ID=Q1SS77; Match level="QueryCoverage=83%, HitCoverage=89%, E-value=1e-92, Identity=63%"; Hit description =Protein kinase
  Pfam annotation: Domain name=Pkinase; Domain location=22-265; Score =104.5; E_value=3.1e-28; Accession=PF00069.15; Description=Protein kinase domain
  Pfam annotation: Domain name=Pkinase_Tyr; Domain location=23-263; Score=-26.8; E_value=8e-11; Accession=PF07714.7; Description=Protein tyrosine kinase
  Pfam module annotation: Pfam domain module=Pkinase::Pkinase_Tyr; Domain location=22-265::23-263
MAVDRVDGEEAFEEVDPTGRFGRYADVLGLGSVKKVYRGFDQEEGIEVAWNRVRLRSLADRDPGMVERLHAEVRLLRSLSHDHIIGFHKVWLDRDAGVLNFITEVCTSGSLREYRHRHRHVSVKALKKWARQILEGLNHLHTHDPCIIHRDLNCSNVFINGNNGQVKIGDLGLAAIVDKTHVAHTILGTPEFMAPELYTETWSRGRCPTPSAAASCRSSTTSPGASRPAALKRLKDAELRGFIERCIGQPRNRPSAADLLQDPFFNGVRGGDDDDDAAALADASSVVAAAPVPRPRSYVDDLAGLRLD

SEQ ID NO: 51140 - protein, 164 aa, Zea mays
  Coding DNA Sequence Number=SeqID_9361
MTYPLWHGRSELEAETSPGAEAEAKAEAWGWARRSSLLRPRLNPGEVPSRGRTPFYFNDDSGGVSVNALITSTDRDTLLHLNYRVTELITTDVSPNSSPPTPDTAPTAPSMEAADLCCPTPTARSPTRPSLPTPSSWSQLKQPIGMYNTTCKEVIDAKQQTKGM

SEQ ID NO: 51141 - protein, 695 aa, Zea mays
  Coding DNA Sequence Number=SeqID_9362
  Gene Ontology: Mol. function=signal transducer activity; Cellular component=membrane; Biological process=response to light stimulus
  Homolog annotation: Hit_ID=Q9LUB9; Match level="QueryCoverage=93%, HitCoverage=96%, E-value=1e-106, Identity=36%"; Hit description =Similarity to bZIP transcription factor
  Pfam annotation: Domain name=NPH3; Domain location=238-489; Score =90.4; E_value=5.5e-24; Accession=PF03000.5; Description=NPH3 family
MKLVTGVDLETEVELSPIAKAEEAAVFSPYSSPSTALLLQRRVVSWSTETGSPATVRVRLGDRSFDLHKINRFVSPVQDPLVSKCKYFSEASLQSGGDVVELPASSPGVREAFEAVALFCYGDAVALDPFNVAAVRCAAELLGVGGLGARCDLYISQVVLQSWDDALIVLQRCLPLLPAAEELLVVSRCVEALAFMACMEILDPEQRRNQLPGAGGAASRALVGRRWDAELVKELAARDLWVKDLLALPFQFFDRIVRALRRQGMKEKYVGPVVLFYANKWVLSKKTHRFWATTDDEAIDGETDANRRAAAILEGVVGLLPAESPAVAANGAIPVAFYFALLSRSLTLELSDESRTKLRGHVASNLRFARVDDLPLPEEEADGRSIADSREVRAMESIVSNHASVQRKGVEAVSELWDRYLLQFAGDPKLRPERLAELIGAIPASDRKTHDHLYEAINTYLVEHRGLSGEEKATLCGHLDCRKLSHEACVQAVQNERMPLRLIVQALFVQQMHTHRAFTECSDSFRCTRSGELVPGAGGYTPSPGCPAIPTSQPLSGSSPYDSHHHAPRDAKLRARDDASSDYETASFRIQALEQEIISLKRTLQQHNTLRGSASARGEGKEPSFRVAVDAGAPATIKRRATVSGSCIGSMRWGSQRRCASRILRVFARLAVFGRGRSRGKQSKCSASTEQQNCM

SEQ ID NO: 51142 - protein, 380 aa, Zea mays
  Coding DNA Sequence Number=SeqID_9363
  Gene Ontology: Mol. function=nucleic acid binding; Cellular component= spliceosome; Biological process=mRNA processing
  Homolog annotation: Hit_ID=Q6ZK57; Match level="QueryCoverage=59%, HitCoverage=41%, E-value=5e-30, Identity=39%"; Hit description =Putative RNA recognition motif (RRM)-containing protein
  Pfam annotation: Domain name=zf-CCCH; Domain location=157-181; Score =12.1; E_value=0.033; Accession=PF00642.15; Description=Zinc finger C- x8-C-x5-C-x3-H type (and similar)
MDIEECRTRLQDKVRLLHPKNAEGIVDYMIANTPLENIRSYLLTATDNVLMNLFEGANRLQNILNLSEENEPLFGLFTPFDQIGPQKQHQFSSRNHSQVLQAPLYPIGPSRAFQNPYSKLTGFRDHFQSLSILDGDTPSHYKCASINVGGYPSNGKVQTKTCRFYLSIRKCKYGENCHFSLVCGYPEINDMRQVDHLGSLQMLEMEIDLLLLQPSSQVPVDHLEKKFLEIYTKLLEIDGFHTEDQRNRKTGYGLTDLFMQLNATRETERRGRYYVVLVKDAPKYVTHGFQPAVPLAGSDFNKICVTFKSESIFTHTDVQNYFSQYGTVSEERFSEERHMHGHVSFVDLETAKRIISESGPHFICGNEVRAKAYREKHELK

SEQ ID NO: 51143 - protein, 87 aa, Zea mays
  Coding DNA Sequence Number=SeqID_9364
  Gene Ontology: Mol. function=sequence-specific DNA binding; Cellular component=nucleus; Biological process=regulation of transcription
  Homolog annotation: Hit_ID=Q5HZ67; Match level="QueryCoverage=92%, HitCoverage=13%, E-value=6e-30, Identity=80%"; Hit description=WRKY transcription factor 78
  Subcellular localization annotation: CTP_CleavageSite=31; ConfidenceScore=5.09e-01
MADSPNPSSGDLPAGAGCSPEKPVLADRRVSALAGAGARYKAMSPARLPISREPCLTIPTGFSPGALLESPVLLNNFKISPVVLINL

SEQ ID NO: 51144 - protein, 90 aa, Zea mays
  Coding DNA Sequence Number=SeqID_9365
  Homolog annotation: Hit_ID=Q10LS1; Match level="QueryCoverage=50%, HitCoverage=51%, E-value=5e-08, Identity=56%"; Hit description =Expressed protein
MAASRRAAAAMLCLAVAVAAVLAAEKSGAEAERPGCFCDCMKNRCMTLGASAADKFDCAAACTEGCAQIGQPGQPRADDFCDSEPDCTTD

SEQ ID NO: 51145 - protein, 101 aa, Zea mays
  Coding DNA Sequence Number=SeqID_9366
MTRGRRACARYMFCAEQSGSWPREHGCNLLVLAYLRSFSVVVVSLASRTGYGPTSIAYTRESWVFGGRHSCMPQCPRGGWAVTQCSPFCMPPTPGVEPDPD

SEQ ID NO: 51146 - protein, 349 aa, Zea mays
  Coding DNA Sequence Number=SeqID_9367
  Gene Ontology: Mol. function=DNA binding; Cellular component=nucleus; Biological process=regulation of transcription
  Homolog annotation: Hit_ID=Q6K539; Match level="QueryCoverage=99%, HitCoverage=95%, E-value=1e-104, Identity=60%"; Hit description =Putative OsNAC7 protein
  Pfam annotation: Domain name=NAM; Domain location=10-142; Score =290.4; E_value=3.4e-84; Accession=PF02365.6; Description=No apical meristem (NAM) protein
MHPSCSPLAVPPGFRFHPTDEELLYYYLRKKVAYEPIDLDVIREVDLNKLEPWDLKDRCRIGTAEPQDEWYFFSHKDRKYPTGTRTNRATTAGFWKATGRDKAIFLGNAGRRIGLRKTLVFYTGRAPHGKKTDWIMHEYRLNDDNVEVPPITEDGWVVCRVFKKKSIQRGFDQLGTASAGDDDELQSFHSPGGVMTTLAEQKHGLLHQLTHGGVVVPAFDPCMNLPHLTSAEGQLAATAAFTSGTSAVAMNLLDMGRCSRHNHNHNMLKMTTTPCGSASDMPLNSGERFGAAADWSILDKLLASHQNLDQLFHCKFGGTTFAVPHHYQQEMQQQHMEISASSLHRLPLH

SEQ ID NO: 51147 - protein, 53 aa, Zea mays
  Coding DNA Sequence Number=SeqID_9368
MALLCFGKKRRSSSCPYGSGSFSVFPGGSCFCIEWILGLARLHTEKKKRNPFP

SEQ ID NO: 51148 - protein, 58 aa, Zea mays
  Coding DNA Sequence Number=SeqID_9369
MATSFYSNSKQQTSVAPIAEEAARAPMDDHSKTQAVKDRLKDKTAKVAAKAVRVLFGN

SEQ ID NO: 51149 - protein, 156 aa, Zea mays
  Coding DNA Sequence Number=SeqID_9370
  Homolog annotation: Hit_ID=O49677; Match level="QueryCoverage=60%, HitCoverage=9%, E-value=3e-29, Identity=59%"; Hit description =Putatative protein
MEEEVTGSGGGIGRKMAAGEVDLKEKSGTAWSHSYLNQKPWHPLSYPNLRRKWIAEQVHANHARRQEEVQREFAQEQEFFRQTALFSKKDKEKIMPQVVRTPGTGANVNRAHAQHGTCLVHCLCFGVLLMSKLMVVGVREAVAVGQRVGMREEAGE

SEQ ID NO: 51150 - protein, 327 aa, Zea mays
  Coding DNA Sequence Number=SeqID_9371
  Homolog annotation: Hit_ID=Q8W0A7; Match level="QueryCoverage=47%, HitCoverage=70%, E-value=5e-72, Identity=82%"; Hit description=MpV17 transgene-like
  Pfam annotation: Domain name=Mpv17_PMP22; Domain location=80-150; Score=60.3; E_value=6.2e-15; Accession=PF04117.3; Description=Mpv17 PMP22 family
  Pfam annotation: Domain name=Pollen_Ole_e_I; Domain location=192-313; Score=161.4; E_value=2.3e-45; Accession=PF01190.8; Description=Pollen proteins Ole e I family
  Pfam module annotation: Pfam domain module=Mpv17_PMP22::Pollen_Ole_e _I; Domain location=80-150::192-313
MEDKDNKDNKEFKVDWKRVGITSSFGFAFVGPVGHYWYEYLDRIIRRRFQPNTFKFVASKVAADGFLFGPLDLLLFFSYVGLGQGRSIEQVKEDVKRDFIPALVLGGTIWPAVQIANFRFVPVRYQLLYVNLFCLLDSCFLSWIEQQGDASWKRWFTSFQKIEDQKGKFWAVAAASSLAGVASAEKAGGFVVTGRVYCDPCRAGFETNVSRSVAGATVEVVCRHFGASKETLKAEATTDDSGWYKLEIDQDHQEEICEVVLARSPDPGCAEIEEFRDRARVPLTSNNGIKQQGVRYANPIAFFRKDPLKECGALLEKYDLKDASETP

SEQ ID NO: 51151 - protein, 153 aa, Zea mays
  Coding DNA Sequence Number=SeqID_9372
MWLVIRARAVSFRSRAGDADLWGLAEGEPGVTASVPNGEVFPGLTGGSRRGQGLGATGVTAGDLHLRRRSGRDGRLGASPFRGGEYSWSPLAESVGEGKGISHRHATVPPYRVDNLFLVTTDGENASGTTSAECKTGILAELTVMSSSGFSHD

SEQ ID NO: 51152 - protein, 728 aa, Zea mays
  Coding DNA Sequence Number=SeqID_9373
  Subcellular localization annotation: CTP_CleavageSite=27; ConfidenceScore=5.28e-01
MHQDSFRSVVCRSLSKSLPPRSKDGSCSETVQCTVPCIVTLQPSVCRSCQGRDVQSASQSYREDERSMSFHGDYLMVPSLSKHFAEDLLIRGAMDLQESLAMLERFQAASLSMRLLSSKKIRPETGEQSPAIDTIVREVLLRPSNAKQVQVNGLKQQLSDSTSELKNIVKDSFYKKNHSLVSNNEQASLTLSQSARHLPNSYLMPKPAAHQKKSVPMSSPSCAAVRPEKSKTPSLVAKLMGLDGLPSPKAKSTMKDDKNKAASSPRALFDTERPRSKRLLPQLLKQEAGFGSEMPRSEKLPPLQSNVQKNSTSSKKGIVGTSYTTGAVHDTASIKPIQRAAYVEQARPKSPKEIKIVSSPTGRKQRANEINRRSTEKQRPYSGERSRERMNAAKSRAGSASRSAEAVAKQCDRRSVASRSNRTCDSVVKPNSPKPQSNSRARRVPRRNVKSSTVDELVAYEIEKEILHALDQTDGPSTEHSATPSDEACPSADWDEASSVGDILKDPGEASETSQSAVRDCRISSAGADADAIHSPTHRAPTREAEIKDEIGLLLLSDKPFLSRAAELIGVDVYGDLSNQCDRISKARTRNRRLYLDAAGEQLELKHRQQNILWPYARPLGRRWRSSSSAYLSLEELLRDVSDGVRNLEDGYCSGDARRGSKDSLDVKLERDLTSSADALISSVWDMGWQGLACVEAECFVRDAGEEILSLLVEEAALDMCLHCHSAM

SEQ ID NO: 51153 - protein, 485 aa, Zea mays
  Coding DNA Sequence Number=SeqID_9374
  Gene Ontology: Mol. function=oxidoreductase activity, acting on the CH-OH group of donors, NAD or NADP as acceptor; Cellular component =cellular_component; Biological process=metabolic process
  Homolog annotation: Hit_ID=Q5N7Y9; Match level="QueryCoverage=99%, HitCoverage=100%, E-value=1e-103, Identity=63%"; Hit description =Putative D-isomer specific 2-hydroxyacid dehydrogenase
  Pfam annotation: Domain name=2-Hacid_dh; Domain location=6-485; Score= 116.4; E_value=7.9e-32; Accession=PF00389.20; Description=D-isomer specific 2-hydroxyacid dehydr
  Pfam annotation: Domain name=2-Hacid_dh_C; Domain location=108-281; Score=258.6; E_value=1.3e-74; Accession=PF02826.9; Description=D -isomer specific 2-hydroxyacid dehydr
  Pfam annotation: Domain name=2-Hacid_dh_C; Domain location=287-453; Score=206.5; E_value=6.3e-59; Accession=PF02826.9; Description=D -isomer specific 2-hydroxyacid dehydr
  Pfam annotation: Domain name=ADH_zinc_N; Domain location=143-297; Score=-15.7; E_value=0.093; Accession=PF00107.16; Description=Zinc -binding dehydrogenase
  Pfam annotation: Domain name=F420_oxidored; Domain location=146-307; Score=-37.3; E_value=0.0071; Accession=PF03807.7; Description=NADP oxidoreductase coenzyme F420-dependent
  Pfam annotation: Domain name=NAD_binding_2; Domain location=314-454; Score=-83.2; E_value=0.058; Accession=PF03446.5; Description=NAD binding domain of 6-phosphogluconate dehydrogenase
  Pfam module annotation: Pfam domain module=2-Hacid_dh::2-Hacid_dh _C::2-Hacid_dh_C::ADH_zinc_N::F420_oxidored::NAD_binding_2; Domain location=6-485::108-281::287-453::143-297::146-307::314-454
MESLGVLLLHPFNAYLEQELDRRFRLYRFWETPREEFLRAHAGAVRAVVGNASYGADAALIDALPALEIVASFSVGIDRVDLAKCRDRGIRVTNTPDVLTDDVADLAVGLAIAVLRRIPQADRYVRAGLWKSRGDYTLTTRLSGKRVGILGLGRIGSAIAKRAEAFGCSISYSSRSEKPFPDYKFHVSAVDLAANCDVLIVTCSLTAETHHVVSREVIDALGPEGVLVNVGRGAHVDEPELVAALLEGRLGGAGLDVYEHEPLAPEQLLGLDNVVLVPHVGSDTEETCRAMADLVLANLEAHASDEPLLTPFSGKRVGIIGLGRIGQAVAKRVEAFDCPVSYHQRTEQRATYPSYTYYPSVVELAANSDVLVVACPLNAQTRHIVSREVMEALGPSGVLINVGRGPHVDEREMVAALADGRLGGAGLDVFEDEPNVPEALLGMDNVVLLPHVGSGTNETRKAMADLVLGNLEAHVLSKPLLTPVV

SEQ ID NO: 51154 - protein, 60 aa, Zea mays
  Coding DNA Sequence Number=SeqID_9375
  Homolog annotation: Hit_ID=Q8LQ70; Match level="QueryCoverage=60%, HitCoverage=11%, E-value=6e-07, Identity=78%"; Hit description =Putative D-threonine dehydrogenase
MGKFVVRQLAKLGNQITIASTMVGLVECKVYAYKVGLDVIKLLERMQIRQEVCLQLETLG

SEQ ID NO: 51155 - protein, 178 aa, Zea mays
  Coding DNA Sequence Number=SeqID_9376
  Gene Ontology: Mol. function=monooxygenase activity; Cellular component=integral to membrane; Biological process=electron transport
  Homolog annotation: Hit_ID=P24465; Match level="QueryCoverage=55%, HitCoverage=20%, E-value=3e-29, Identity=61%"; Hit description =Cytochrome P450 71A1
  Subcellular localization annotation: CTP_CleavageSite=14; ConfidenceScore=5.01e-01
MLAHRTSNSTCPVCTGHPGGPTSQKLQRSESNGSDDVAGGTGLSGVHRTVRCAIEQTASQRPLLVEPAADTEILGYHVPARTRVLVNAWAIGRDPATWERAEEFVPERFLGGGAAPNVGFKGQYFELLPFGAGRRMCPGIAFAEGSAEIALASLLFRFDWDATRGMNRIGTPSDVMSR

SEQ ID NO: 51156 - protein, 56 aa, Zea mays
  Coding DNA Sequence Number=SeqID_9377
MAFYRTYGWVRYSLVVALRRGEEDADDADQMAPHGSGWDTKTLLKLRHMGYIMHIR

SEQ ID NO: 51157 - protein, 149 aa, Zea mays
  Coding DNA Sequence Number=SeqID_9378
  Subcellular localization annotation: CTP_CleavageSite=99; ConfidenceScore=5.13e-01
MGLIKTNRTLAVLLTNQSPAAVWRYVTTSGTSLARSHHHGRRRRPIDQPACTSGDGNRGSVPRHKGPCSGRRKTKRRGEPTHERKAQLVRRLRKRYMPFCAASQSTEPRRYGKADGDKHGTIALLPKDYKRKRNIIMKIQMCHVCLFAE

SEQ ID NO: 51158 - protein, 80 aa, Zea mays
  Coding DNA Sequence Number=SeqID_9379
MSMMQREEIKIRAGTEAYVLWHQPTGPGELQELDDDVHFSYASARFKHALNWGGLSPFRSPKELKFCASCWAASAAAVEP

SEQ ID NO: 51159 - protein, 377 aa, Zea mays
  Coding DNA Sequence Number=SeqID_9380
  Gene Ontology: Mol. function=sequence-specific DNA binding; Cellular component=nucleus; Biological process=regulation of transcription, DNA-dependent
  Homolog annotation: Hit_ID=Q6H635; Match level="QueryCoverage=94%, HitCoverage=86%, E-value=3e-62, Identity=45%"; Hit description =Putative AG-motif binding protein-4
  Pfam annotation: Domain name=GATA; Domain location=297-332; Score =74.0; E_value=4.7e-19; Accession=PF00320.17; Description=GATA zinc finger
MDALKCNNSVLPEETTADAAGAFVEKDGFSVEDLLDLEEFAEPDKDVAEREDDDAPPAAAAAAERSKADSQPSSVVKYDLPPLLPPPPEMVDLPSHDVEELEWVSRIMDDSLSELQPQAQPKPAAAVVASSAARPPLAQQRRPFAHDGTYRAVAAAPPQAGPQRTPTICALSTEAMIPVKAKRSKRSRGPGWSRPGASFLPDSASSSSTTTTSSCSSSGSISPFLRLDSSPFGGGLELGEGLFSYGHLLPRPPSKKSKHGGKGSKHRPKKRGRKPKHLPPPHPSAAASQPGPSDRRCSHCGVQKTPQWRAGPEGAKTLCNACGVRYKSGRLLPEYRPACSPTFVSSIHSNSHRKVLEMRRKKEGGMVATAAPAVASF

SEQ ID NO: 51160 - protein, 111 aa, Zea mays
  Coding DNA Sequence Number=SeqID_9381
  Homolog annotation: Hit_ID=Q110L9; Match level="QueryCoverage=41%, HitCoverage=40%, E-value=3e-07, Identity=53%"; Hit description=NADH dehydrogenase I subunit M
  Subcellular localization annotation: CTP_CleavageSite=34; ConfidenceScore=5.31e-01
MATTAFLSPPKLSLPGRRFASARTAGRVRVPPARAQEQQQQVVVVVEEEDAEGAELSEYTLRLIGSDLEHYIRKLLYDRVIKYNMRSRVLIFSMGKPRIKFNSSQVPDATK

SEQ ID NO: 51161 - protein, 314 aa, Zea mays
  Coding DNA Sequence Number=SeqID_9382
MSINRILVGGGGVGFNLEITPLSPSMIIPDYVGSPAAEPMRTFPASLTEATGSGFPPSYEQQRPHSWASPAFWPHTPAHQARFSPPPVFYASPTPSPPHFPPGLMRWESAPMPIPQVSERRSPAHLQNMLPPPSPRRADTGAAGALEFPSESGRLIGRMEELRLADLHATSSPRHKGKDNKDESGRFSALSSCDSPRQDDLDDVDYHFDVDDVDTPVSQPRSTSGKETGDQVGSLPHKSQDAQVGYLVNLLRNARPLRNPSNPSQTPRAQSTRVTSASSVTTSDALEVLQSFKETRERLLSRSSAKHQEPPGKP

SEQ ID NO: 51162 - protein, 400 aa, Zea mays
  Coding DNA Sequence Number=SeqID_9383
  Gene Ontology: Mol. function=calcium-dependent phospholipid binding; Cellular component=plasma membrane; Biological process=cell differentiation
  Homolog annotation: Hit_ID=Q6L4C5; Match level="QueryCoverage=91%, HitCoverage=97%, E-value=1e-114, Identity=67%"; Hit description =Putative annexin
  Pfam annotation: Domain name=Annexin; Domain location=162-226; Score =24.3; E_value=0.00024; Accession=PF00191.10; Description=Annexin
  Pfam annotation: Domain name=Annexin; Domain location=256-321; Score =12.3; E_value=0.0031; Accession=PF00191.10; Description=Annexin
  Pfam annotation: Domain name=Annexin; Domain location=331-396; Score =80.4; E_value=5.6e-21; Accession=PF00191.10; Description=Annexin
  Pfam annotation: Domain name=Annexin; Domain location=89-155; Score =76.9; E_value=6.5e-20; Accession=PF00191.10; Description=Annexin
  Pfam module annotation: Pfam domain module=Annexin::Annexin::Annexin:: Annexin; Domain location=162-226::256-321::331-396::89-155
  Subcellular localization annotation: CTP_CleavageSite=64; ConfidenceScore=5.47e-01
MRKLAALMLILGGALGVSARVPCAGAAAAAACRSASITSLPSTFSSSTSSPTHQQLSQVAEYVAAPAEASAPLSMASISVPDPVPSATEDAENIRKAAVQGWGPDKKALMEILGHRTAAQRAEIAAAYAGRYNESLLDRLHSVLSGDFRSAMMLWTADPAARDAKLAHKAMKKKGERYVWVLIEVACASTPDHLVAVRKAYRESYPASLEEDVAACPLYKDPRVKQARPPPAPACRLSSSYRYSGDLVDDELARAEAAELHDAVVARKQLLHGQVVRIVSSRSKQQLQATFERYRQDRGKAFDEVLEERRSDQLAAMLKTAVWCLTSPEKHFAEVIRRSIVGLGTDEESLTRVIVSRAEIDMKKVKEEYKVRYRTTVTSDVNGDTSGYYNSILLTLVGRE

SEQ ID NO: 51163 - protein, 211 aa, Zea mays
  Coding DNA Sequence Number=SeqID_9384
  Homolog annotation: Hit_ID=Q10L85; Match level="QueryCoverage=89%, HitCoverage=78%, E-value=9e-34, Identity=46%"; Hit description =Expressed protein
MGNGLSPCLCPGYARGAAARLVFWGGSSRMADERPSITAGDVMAELPDQHLVCAADSFFIGLPVPALSPCERLVAGRTYFVLPAARFSCSQALTAATLSKLSPSSAANVPLAGAAASPFEYVTGSDGAPLIRILPEFIEKVITSCGGGKCGAVAAEQLCSTPELRKHYMQLVRARAERPWSPGLETISEADKRRRMPSPVRLVGLAKASSR

SEQ ID NO: 51164 - protein, 189 aa, Zea mays
  Coding DNA Sequence Number=SeqID_9385
MRKSLGGYSLAINRVKAHACGEWRHYHNPWISDEQFRLAPPSIQPRETSIASGKFMRLQLPPQRWSAGVNHGSLAQQCEPMANAEGDGVPARTPATDKGRAQGKPSFYPPAHGALGFDSPGNARLLRNFCGGEKVARATGQFCYEVEERADKAVPHGSDRLRRAWQGGGKRLSCGSHITVDGTCARARE

SEQ ID NO: 51165 - protein, 209 aa, Zea mays
  Coding DNA Sequence Number=SeqID_9386
  Gene Ontology: Mol. function=nucleic acid binding; Biological process= DNA integration
  Homolog annotation: Hit_ID=Q3LRV2; Match level="QueryCoverage=72%, HitCoverage=75%, E-value=4e-46, Identity=56%"; Hit description=Gag
MSEVRNGQRQSGSTGLSDESQGQTDPTIDCYKLQWSANVAGQQAMNNACPADDKHKEHKDGSASSINSHKKGDKKKKKTKKVVYYEIDSSTPSTSGAESTSSKRQDRKKYSKPPYYDGEDYCMWSDKMRHHLTSLHESIWDIVEFGAQAPQVGDEDYDSDEATQVRHFNSQSTSILLASLCGEEYNKVQWLKSAKEIWDVLKTAHEGTK

SEQ ID NO: 51166 - protein, 188 aa, Zea mays
  Coding DNA Sequence Number=SeqID_9387
MEPPFAHPKGETHRSECGEDDAGEEEDGAAAAADTTATALPDAAGAEDDEDEDEDAAATRSDRMWIHDEDGGEDAAVGEEEDDGEDEGGGKKDFEVLKARKKDKRIEVPKAKEKKRFLQAVKVNRVEKRHGTLKNTTYGHDLKPTRGLIPTLEYYNFDILFKLSWDWGMSLRGPYGAKGIGCSIGYVP

SEQ ID NO: 51167 - protein, 107 aa, Zea mays
  Coding DNA Sequence Number=SeqID_9388
  Gene Ontology: Mol. function=Rab GTPase activator activity; Cellular component=intracellular; Biological process=regulation of Rab GTPase activity
  Homolog annotation: Hit_ID=Q69NG6; Match level="QueryCoverage=63%, HitCoverage=11%, E-value=4e-27, Identity=84%"; Hit description =Putative GTPase activating protein
MWLYFSISDTSREGGIKSPWSRRKRKRALSREQWESLFSANGKLRDGGKKFLKKVRSGGIEPSIRSEVWPFLLGVFFFLETLNCLKLTVKYYPFEKYNLGLVRLGVD

SEQ ID NO: 51168 - protein, 238 aa, Zea mays
  Coding DNA Sequence Number=SeqID_9389
MTYKTLKKYVSYCVKIISTGLSSPKGALLGLASYDSDDDDDADTDSKDKMPISNLSSKDNAGAINTEGDKSTLGKRNGNHNEQNSSLGSAPSGEDLKSNNQNFQRSANAEPEQMHIRDTENGEFCFKAKTCTEPKGAFDRMDEEANTYAEHNDLESSHRHSEKSSTEDFVNEVKADHTKELKYSRAEKYNNDDKYSMYGNINKRGSCKEGKGSGRAAKHESDTREPHYRGNSKLDGAK

SEQ ID NO: 51169 - protein, 150 aa, Zea mays
  Coding DNA Sequence Number=SeqID_9390
  Gene Ontology: Mol. function=ATPase activity, coupled to transmembrane movement of ions, phosphorylative mechanism; Cellular component=membrane; Biological process=metabolic process
  Homolog annotation: Hit_ID=Q94IM4; Match level="QueryCoverage=78%, HitCoverage=20%, E-value=1e-46, Identity=81%"; Hit description=P -type ATPase
MGRSSPNDKLLLVKALRARGHVVAVTGDGTNDAPALHETDIGLSMGIQGTEVAKESSDIIILDDNFASVVRVVRWGRLVYANIQKFIQFQLTVNVAALIINVVAAVSSGNVPLNAVQVLLNSVHGSESDYMKYKDPKQPINSRTVILLVE

SEQ ID NO: 51170 - protein, 585 aa, Zea mays
  Coding DNA Sequence Number=SeqID_9391
  Gene Ontology: Mol. function=protein dimerization activity; Cellular component=nucleus; Biological process=regulation of transcription, DNA-dependent
  Homolog annotation: Hit_ID=Q2R149; Match level="QueryCoverage=96%, HitCoverage=60%, E-value=1e-158, Identity=47%"; Hit description=HAT family dimerisation domain containing protein
  Pfam annotation: Domain name=zf-BED; Domain location=34-81; Score =29.0; E_value=1.7e-05; Accession=PF02892.5; Description=BED zinc finger
VLNATKESAPTAGNTTEEKKEDNAKKRKEIAPRSEVWSHFVKICVDGHLKKGKCKYCSHEIKCDPNLNCTSALRAHFNICKCNPHKNRDPNQSNLQLSHGENVAIYKFDPEAIRKAFCEMVIEDEQPFACAEKAGFRKFMSIACPRWNVPSRRTLTRDTVSTYFEEKAKLKTFFKQQCERVCLTINAWTSQQQDSYMAVTAHFIYSDWKLHKKVISFFLVKGHKGDDIGKNIMRCLVEWGITKIMTITVDNASSNDSGVDYVRRQMNNKKTSIAMGKFLHMRCAAHILNLFVSDGLKEMDDSVKRVRAAVMFIKNSPSRLAKFKKIAEEENVQTNAFLKLGVCTRWNSTYLMLHSAISYEKAFAKYEEEDPTYTIELCGDKGHGIPLEDDWENEKKMAEFLGHFYDITLCVSTQLTVTTNEYFHEIGEVKMLLRQWADSDDYLRQTMATRMKDKYNKYWGNWHDNENDNENANEGREKGKLKEKENMNLLIFVATTLDPRYKLSNYTKLAIGEMFGEEKGEKVWNAVRQCFYDLFEEYRSIYSPNDDSMAEVNEDQTQKRGGRMMRLLIAKKMKGWQWFHRHYQI

SEQ ID NO: 51171 - protein, 71 aa, Zea mays
  Coding DNA Sequence Number=SeqID_9392
MALVSRGGFLSHPVLEGKPNANHVRARIRNSRTQRLHNWTSSHIAQNNSGKGPYGEILRKQPESPKAFVIS

SEQ ID NO: 51172 - protein, 312 aa, Zea mays
  Coding DNA Sequence Number=SeqID_9393
  Gene Ontology: Mol. function=metal ion binding
  Homolog annotation: Hit_ID=Q2R8Q9; Match level="QueryCoverage=48%, HitCoverage=68%, E-value=7e-62, Identity=76%"; Hit description =Expressed protein
  Pfam annotation: Domain name=TLD; Domain location=60-176; Score= -29.3; E_value=0.0063; Accession=PF07534.6; Description=TLD
MKASSRPTFVTPRSFFNWGKSARETETPPPQLQFSYHDVEPPFPMSLVAKTHLRDRELRCCYKATVDGFSATDFHRRCDFKGPCVVVGYTDGGFRFGGFSPEGYRSTDDYYDTLDAFLFYWAESTEVSAPPVVLPKVGGSGAALFDYSRGGPQFGADGLLIGPPLTAVMGVFTGPDSSAGVGDLRSARSRLGLSYARRPDGKESLFGDEGRAQLVEPPPLAPPLSAKPRPTPELEPRAAQPTHAERPDALLPSKPDRAQDPSQPRAAAERTESVPHANLAPTLRAQPKPSAQDAATESPAHDRSSSSLMELQ

SEQ ID NO: 51173 - protein, 107 aa, Zea mays
  Coding DNA Sequence Number=SeqID_9394
  Subcellular localization annotation: CTP_CleavageSite=23; ConfidenceScore=5.11e-01
MDGGGGYGSTSAGALGHAQDVPRAAGRGRSGRWAVYGRRRPDARGPRHSGTSVGGADRLGWHALGKPSARWADQVRERGRGGMAWWATQARAQGEQETDFYAVYRNA

SEQ ID NO: 51174 - protein, 85 aa, Zea mays
  Coding DNA Sequence Number=SeqID_9395
MALPAPLELRLPPPPLFPHLSSTLCTGVEHPIPSSCSPSRATQPALGQAVPYPLGAWRDRDCLAIWLCKHAVGGLRLPKVLKNRI

SEQ ID NO: 51175 - protein, 107 aa, Zea mays
  Coding DNA Sequence Number=SeqID_9396
MEGRNHSNEPAALLARRAGDKAAPTTDYSITIVAGSKQAAGAHVRARQGAVAAAVAGQLPRGSCKVEATVQGPRHGGNGSGGAGVLLMRRNGPSRVLPYSVARAVVV

SEQ ID NO: 51176 - protein, 121 aa, Zea mays
  Coding DNA Sequence Number=SeqID_9397
MSWGPAQAPLVGGALLHPGVSDLLAIRILSTLCGSLTTVGAWAHQKLRGGVAIGAVRGSSSNREPCSNLCFAWLPTMAPPRNFARSAVDPVWGRRRLGRWIHSGRTRLDVGGVLASGIVDR

SEQ ID NO: 51177 - protein, 127 aa, Zea mays
  Coding DNA Sequence Number=SeqID_9398
MGKNNKRKREPTPPSEDFGDSKYSKEEFSSESEGSPAPIPLRESSDDSDDSQGLAAEVWTYIRAVERSGLEGSDDSEYSSDEEDSSEEDGGGDGEDDDDDNDDDRGGGGGDGSGRGGSSGGSNRASG

SEQ ID NO: 51178 - protein, 51 aa, Zea mays
  Coding DNA Sequence Number=SeqID_9399
MAQDLKKRKKKVTTTRIKVPKIHARSTPQALEEIPENNLFFDLTCCTRSQG

SEQ ID NO: 51179 - protein, 139 aa, Zea mays
  Coding DNA Sequence Number=SeqID_9400
MPTRYLLAIKAGHFSPCDHNRDWRKLEVPGACYSGEGFPNCSSELSSIVDPSSYVAVVNRYTNHGTKLTIFYLMASASRIPFRSRESGAWALGLCSPVVWGQPWYTPPCLGVQRKETTPGTADLTTNGRDWRTYRFGRN

SEQ ID NO: 51180 - protein, 241 aa, Zea mays
  Coding DNA Sequence Number=SeqID_9401
MGPISNHQAEHQGDSEVGRQSDTTEMKVVHCSLGIERELEPGHVRTQEQRRPSAREPSRARAGKNGSRAQGRAEAGAPSRGGKSTAHRDFTAQGRARRGNRMGARQELDAAATADTARQSDGQGHCEGALSRGRPTVRPSREKARGWAGAGTRRNVARGEGGLGTAAMEASCTAGSVQGSGGRWGRGTMASREMEEGPLGKNLGWLGERAKEPRIKTQGAGHRNWREMGEGERKPRPWTRK

SEQ ID NO: 51181 - protein, 175 aa, Zea mays
  Coding DNA Sequence Number=SeqID_9402
  Gene Ontology: Mol. function=RNA-directed DNA polymerase activity; Cellular component=intracellular; Biological process=RNA-dependent DNA replication
  Homolog annotation: Hit_ID=Q9ZTP2; Match level="QueryCoverage=98%, HitCoverage=13%, E-value=1e-78, Identity=83%"; Hit description=Prpol
  Pfam annotation: Domain name=RVT_1; Domain location=18-175; Score =35.0; E_value=2.6e-07; Accession=PF00078.17; Description=Reverse transcriptase (RNA-dependent
MKLKRLLSARVIKEVTYLEWLANTVMVKKTNGKWRMCIDFTCLNKACSKDKFPLLRIDYLVDATATSELMSLLDCYSGYHQIWMNKEDKPKTSFITPSGTYCYLQMPEGLKNAEGSFSGMTSKVLNSQIGRNVLTYVDDIIVKSTKQENHIADLQETFANFRKVGLKLVTPKILF

SEQ ID NO: 51182 - protein, 158 aa, Zea mays
  Coding DNA Sequence Number=SeqID_9403
  Subcellular localization annotation: CTP_CleavageSite=49; ConfidenceScore=5.53e-01
MTTAVLSPLRKQGDVSKDPTAPTAVLLQGSSAPPTTTTSHEQGSSTSPTATMAWPSYEMVAAREDGLTDWLSLSLANASTIYSSVQGPPGVETPTREQNYPSGELIRYRRTNMEKEGASDEGAPDAEAEQADIEEGDAASLSGLSEAKEWSRLLRPSV

SEQ ID NO: 51183 - protein, 133 aa, Zea mays
  Coding DNA Sequence Number=SeqID_9404
MDNGSAALMNFVSIKEIEGRIPFNPHTSKQVGVFGCLHFEGIEVYSISENIAYKYVPHMGNGAEDRRIDAVHLGVVFPAGLRSGGNLANPWGVPRRHGTAATLVLSYDGGVFRIMSCVTSPLVTMRRRRSERF

SEQ ID NO: 51184 - protein, 558 aa, Zea mays
  Coding DNA Sequence Number=SeqID_9405
  Gene Ontology: Mol. function=phosphoglycerate mutase activity; Cellular component=cytoplasm; Biological process=glucose catabolic process
  Homolog annotation: Hit_ID=P30792; Match level="QueryCoverage=99%, HitCoverage=98%, E-value=0.0, Identity=89%"; Hit description=2,3 -bisphosphoglycerate-independent phosphoglycerate mutase
  Pfam annotation: Domain name=Metalloenzyme; Domain location=399-526; Score=184.3; E_value=2.9e-52; Accession=PF01676.8; Description =Metalloenzyme superfamily
  Pfam annotation: Domain name=iPGM_N; Domain location=15-389; Score =517.2; E_value=1.8e-152; Accession=PF06415.4; Description=BPG -independent PGAM N-terminus (iPGM
  Pfam module annotation: Pfam domain module=Metalloenzyme::iPGM_N; Domain location=399-526::15-389
MASSWTLPDHPKLPKGKPVAVVVLDGWGEANPDQYNCIHVAQTPVMDSLKNGAPEKWRLVKAHGTAVGLPSDDDMGNSEVGHNALGAGRIFAQGAKLVDQALASGKIYDGDGFNYIKESFENGTLHLIGLLSDGGVHSRLDQLQLSYKRTTRFTFICSIQLLLKGVSERGAKKIRVHILTDGRDVLDGSSVGFVETLENDLLELRGKGIDAQIASGGGRMYVTMDRYENDWDVVKRGWDAQVLGEAPYKFKSALEAVKTLRAQPNANDQYLPPFVIVDDSGKAVGPVLDGDAVVTINFRADRMVMLAKALEYADFNNFDRVRVPKIRYAGMLQYDGTLGLWKDNVASYLHYLILHSETVKFGHVTFFWNGNRSGYFDETKEEYVEVPSDSGITFNVAPKMKALQIAEKARDALLSGKFDQVRVNLPNGDMVGHTGDIEATVVACKAADEAVKIILNAVEQVGGIYLVTADHGNAEDMVKRNKSGKPLLDKNGGIQILTSHTLQPVPVAIGGPGLHPGVKFRNDIQIPGLANVAATVMNLHGFEAPADYEQTLIEVADN

SEQ ID NO: 51185 - protein, 155 aa, Zea mays
  Coding DNA Sequence Number=SeqID_9406
MGKNNKRKREPTPPSEEFGDSEYSEEEFSSESEGSPAPIPLRESSDDSDDSQGLAAEVWTYIRAVERSGLEGSDESEFSSDEEDSDGGEDEDDDDDDGDDDDGGDGDGDGGNGGGGSGGKGSTRGGSSTGSTRGGSSKGSTKGGGGKGSSGKASG

SEQ ID NO: 51186 - protein, 88 aa, Zea mays
  Coding DNA Sequence Number=SeqID_9407
MGVPTSARAGCNKCSDTDVGALINPRPASTPEMTGWNLMEPPVDIFPRLAIFQARVPLVAEDTVRPTLDSPVNYSTPAPTLPEDDQEA

SEQ ID NO: 51187 - protein, 40 aa, Zea mays
  Coding DNA Sequence Number=SeqID_9408
MGWWLNLRMQNGVPCFMQSAEGAPSGDVLPCWCRIPRRHA

SEQ ID NO: 51188 - protein, 940 aa, Zea mays
  Coding DNA Sequence Number=SeqID_9409
  Gene Ontology: Mol. function=magnesium chelatase activity; Biological process=chlorophyll biosynthetic process
  Homolog annotation: Hit_ID=Q10M50; Match level="QueryCoverage=56%, HitCoverage=41%, E-value=0.0, Identity=77%"; Hit description =Magnesium-chelatase subunit H family protein, expressed
  Pfam annotation: Domain name=DUF689; Domain location=115-353; Score =228.5; E_value=1.5e-65; Accession=PF05093.4; Description=Protein of unknown function (DUF689)
MLSGSPVKRLLRRASKGRREKAEMAVLAVVAAALLLLWAGGVSIAAAGSGDEEECDLFDGDWVWAGGGDGVPRHRLPMRRERPPREDDGRLTVPIWRGFELHNTKLAKFDSMSAALAVTDEVALPIRAVGDLAAAAEVSREEVAVITQCAALVIKNVESLREQLVAEIRRVLKAGGRVLVQSPAPSSSQKPNTDIERKLLMGGFAEVQSSAASSQDSVQSVTVKAKKASWSMGSSFPLKKTTKALPKIQIDDDSDLIDEDSLLTEEDLKKPQLPVGRATKPVNLVQLPKKACKNCTCGRAEAEEKVGKLELTAEQINNPQSACGSCGLGDAFRCGTCPYRGLPPFKPGEKPGCLFLIETKDVDTDNLYIFPPPALPCSLLLLSLLCFRGTAAAKNNCPATSQEQAPYSSAMSSSLVSTPFAAAAQKQLLAAPVPLHSFLLSSRRQQPRRAGAIRCAVAGGNGLFTQTKPEVRRVVPADPRGLPRVKVVYVVLEAHSSTLTRAAPRRSRSWATFRADLADVNVFIGSLIFVEELALKVKAAAEKERDRMDAVLVFPSMPEVMRLNKLGSFSMSQLGQSKSPFFQLFKRSKSNSSNFADSMLKLVRTLPKVLKYLPSDKAQDAWLYILSLQFWLGGSADNLQNFLKMIAGSYLPVLRGAGIKYDDPVLYLDSGIWHPLAPTMYEDVKEYLNWLKDPNAPVIGLVLQRSHIVTGDDGHYVAVIMELEARGHIVWGAKVIPIFAGGLDFSGPTQRYLVDPITGKPFVNAVVSLTGFALVGGPARQDHPKAIAALQKLDVPYIVALPLVFQTTEEWLNSTLGLHPIQVALQVALPELDGKSHALHRRVEQLCTRAIRWAELKRKTKEDKKLAITVFSFPPDKGNVGTAAYLNVFSSIYSVLSDLKKDGYNVEGLPDTPEALIEEVIHDKEAQFNSPNLNVAYRMN

SEQ ID NO: 51189 - protein, 1720 aa, Zea mays
  Coding DNA Sequence Number=SeqID_9410
  Gene Ontology: Mol. function=zinc ion binding
  Homolog annotation: Hit_ID=Q9FN44; Match level="QueryCoverage=99%, HitCoverage=37%, E-value=0.0, Identity=44%"; Hit description=Genomic DNA, chromosome 5, P1 clone:MYJ24
  Pfam annotation: Domain name=zf-C3HC4; Domain location=1674-1707; Score=23.8; E_value=0.00055; Accession=PF00097.15; Description=Zinc finger, C3HC4 type (RING finger)
MRVTQDASLCTANSTIIRMPLSSKCLKELEAGCNIVQRVFDRFTQNPSSTLLFLRSIIQVSLSTWEDGASQSTLNYSVLVDPSVASLRNPFSEKKWRKFQISRIFSSTSAAIKMQAIDVHVIESGCSYIDKWFVALSLGSGQTRNMALDRRYLAYNLTPVAGVAAHIARNGVSTNIHPSSCILSPLPLSGFISMPVTTLGHFIVRHSGGRYIFDSPRDASLPELKEDRVRLVEAWNKELMLCVRDSYVEMVLEFQKLKTDPLSSAIEPRSAQSVSAILQTYGDRVYSFWPRSKQNPTSFTGRVSTGTNMDSPRASKADWQSLIEQVIKPFYVRLADLPVWQLYHGNLVKVDEGMFLAHSGNGDDDNLPSDSVCSFIKERYPVFSVPWELVSEIQAVGVTIREIRPKMVRGLLKASPSILLRSIETYIDVLEYCFSDMDPYRFSDDLPDESRVNSQHVGTTNSSISHSMPSSSSSLSYQSSTQMAGTSGGDALEIMTYFGKALYDFGRGVVEDISKTNSPAFHRTQAAETNVLSSIISELKGVPFPTSTMRLTKLGMAELWIANEQQQLLMSPLLDQFIHYKCLEKPFLALLLSTQVIHRPLKLRSFSPHLLAGYLKRILDERWIRIVLENKSSWIPWDNNAESSTTPTPKWIRSFWKIFSSLNGDLSLLSDWPLVPAYLDKPVLCRVKERHLIFVPPISDSPDPPGDDVAGQLDTPDSPREDTRAEQNAVLDTAFRSMNSEFPWLTSLLNQLNVPIFDPSFPECGAMCNLFPPNGRTLGQTIVYKLVAAKNAAHLPSLISLSSEDCDKLFGLFVSEFILTNNHLYQREELDVLRTLPMYKTVTGTYTSLLGSDHCILSPTAFFHPSDARCLSCSSNAHLFLQALGVEQLNDHEILVKFALPGFGNKTAQEQEDILTYLYASWKDLQLNSAVVETLKETNFVANANEFCKEFFKPEELLDPSDALLTSVFSGERNKFPAERFMSDGWLVILRKAGLRTSTEADMIIQCARKIETMGHDIMSSLEDADDFEADFTDSKNEIPFEICSLAESVVNVLFANFATLYDSAFCEKIGKIAFVPAEKGFPSIGGKRGGRRVLASYNGAILLKDWPLAWSSAPILTKQTIVPPEYSWGAFRLRSPPAFSTVFRHLQIVGRGNGADTLAHWPTSAEIMTVEDAFLQVLQYLDKIWGTISSSEKKELEKLAFIPVANGTRLVPVKSLFARLTINMSPFAFELPSRYLPFVSLLREIGMQESLTNSYARELLLDIQKACGYQRLNPNELRAVMEILEFMCNGINQSITDGSDGPFDSVIPDDGCRLVTAASCVYVDPYGSRLLSNIITSRLRFTHPDLPQNICKALSIKKLSDVIVEELDGKEEIKVVNSIHSVTLDRIKEKLRSKSLQDALRIVMISVTNHFPSFEALALVQIERTLEDISQKLQLVQRLHTRFLLLPNLQDVTRTIQRPSIHEWSSNGMHRSICFVNKATGYILIAEPPSFLTIYDVIAIIVSHRLGAPMILPIASVFACPDGSEKEVLQILHLGSDFGVSKREGRYDASLGAELLSQDARQVQFLPLRPFYSGEIVAWKTGKEGEKLRYGRVPEDDAGLEYGKVSSTELVQAVHDMLSAAGVRMDAEKETLFEATLSLQDQLKESQVALLVEQEKAEAAVKEADVAKAAWACRICLNAEVNMTIIPCGHVLCNRCSSSVSRCPFCRTQVARMMKIFRP

SEQ ID NO: 51190 - protein, 2856 aa, Zea mays
  Coding DNA Sequence Number=SeqID_9411
  Gene Ontology: Mol. function=zinc ion binding; Cellular component =cellular_component; Biological process=protein modification process
  Homolog annotation: Hit_ID=Q9FN44; Match level="QueryCoverage=89%, HitCoverage=65%, E-value=0.0, Identity=40%"; Hit description=Genomic DNA, chromosome 5, P1 clone:MYJ24
MASLSERVEDTVLRQGQAFCFLPLPVRTGLSVHVNGYFEVSSNRRDIWYGADMDRGGKLRSDWNRLLLEDVVAPLFRELLMKLRTLSDSTISYYSLWPTGLYEDPWSILVEQIYKVIYTSPVLHSEIEGGTWISPADALLHDEGFSGSNNLNEALVLVGMPIVRVSNAIGDMFSKFYMQSMLKIVSPAIVRHFLKDYAKLATLGKSHKLILLEYCLTDVYNTDIGKCMNGLPLIPLANMRYGTFSASSQEDYYYVCDNIEYELLAEVGDRIVDRSIPPVLLDKLYQIASDSQANIRFIDGPIFCQLLPRLFPPGWKLKDQVPWNPGLGGSSPTAAWFKLFWQYIGGRSYDLHLFSDWPILPSTFGHLHRACTSSKLIKTESLSSLMNELLAKFGCKILDAEYLSDHKQLSFYVYDGDATGVLQSIFEVISLEGVDLQSLFQRITPGEKNELYQFLLDPKWYLGACLSVVSINQCKKLPIFRVFDGGSPSTYGFSDLFSSRKYLPPLGVPDHLLNDDFIFSICPSDEDIIMRYYGIERMPKSNFYQRYVLNRLDKLQTELRDSVLLTILQDLPQLSLEDPMFKETLKILRFVPTINGTLKSPQSLYDPRVEELYVLLQESGCFPHGLFQNPDVLDMLLCLGLRTSVSTDTILESARQIDSLVNIDQQKAHSRAKVLLSYLEVHAHKWYVNKLFDGRKKVNMLAKVTTALRPRDKSWEFDLEKFWSDLRLICWCPVLATAPSPALPWPSVSSMIAPPKQVRMQEDMWIVSASSRILDGECTSSALSYSLGWLSPPSGSVIAAQLLELGKNNEIVTDQVLRQELALVMPKIYSLLTNLIGSDEMDIVKVVLEGCRWIWVGDGFAKTDEVVLSGHLHLAPYIRVVPIDLAVFKDLFLELGIKEHLYPVDYASILGRMAIRKASASLEAEELRTAILVVQHLSEFRFQDQQTQIYLPDSSSRLCLSSELVFNDAPWLLDFGHDISGSASSIALSSKKYVHNFVHGNISNDVAERLGVRSLRRLLLAESSDSMNLSLSGVAEAFGQHEDLTTRLKHIVEMYADGPGILFELVQNAEDAKASEVVFLLDKTQYGTSSILSPEMAEWQGPALYCFNDSVFSPQDLYAISRIGQDSKLEKPFAIGRFGLGFNCVYHFTDIPGFVSGENIVMFDPHACYLPGISPSHPGLRIQFVGRRILDQFPDQFAPFLHFGCNLQQPFPGTLFRFPLRNAAAASRSQIKREQYAPQDVEMLFSSFSEVVSEALLFLRNVKKVTLYVKENNSKEMRLVHRVSRHNSSQIGKEPHALGAMLAFIHGSQPSGMDRNQFFSKLNKTKDSDLPWSCQKVTILEENPSSHLLHSWILAECIGGGHARKLSTASVSKSHFFVPWASVAAYLHSVSVDDTKGLSAEAEVNHDNSVFTNPDLGSSKFRKNFEARAFCFLPLPINTSIPVHVNAYFELSSNRRDIWIGNDMAGGGRVRSEWNLALLEDVVAPAYGHLLAAVAEELGPSDLFLSFWPSAAGVEPWSSMVRKLYVSIAELGIHVLYTKARGGHWLSTRQAIFPDFSFSKAMELAEVLSQAGLPVVSVTKPIIDSFINAYPSVHLLNPHLLRNLLIRRKRGFRSREEAILVLEYCLSDMGDPSFCDKLQGLALLPVANGSFTTFNKRGEGERVFLTSQIEFELLKDSIPHLVIDNSLPDGVSKKLYDIAYSACMNIYIFTSNLLIELLPRILPPEWQHAKQLSWFPEQQGQPSMEWMVSLWNFLRHSCDDISVFAKWPIIPLVDGKVVQLGNAANVIRDYGWSENMHSLLQKLGCLFLRSDLQIEHPQLANFVQESTAAGVLNAVQSVASNLQDIKELFMSTSLAEAHELRSFIFQSKWFSGNQISSSHMNTIRNLPIFESYKSRELVSLTNPRKWLKPEGVHEDLLDASFIRTESVKERSILVSYFDIKEPQKVEFYKDHVLPRMSEFLLQPAIISAVIRDVKLLIDNDDSARAALCETPFVLAANGAWVQPFRLYDPRVPELLKLLHQDTFFPSEKFMMTEVIELLGSFGLKRNFGFSTLLDMARSVSLVQNSGQGDAFDYGQKLLAYLNILESKTSKMEGGETFLEDGNLEASEISETLEPNNHGDVCDPSDQTSVSLFSNFDYDMPEDLFWSELKNISWCPVHVAPLLKGLPWFISEDIIAPPVITRPKSQMWLVSSKMRILSADSCSMYLQRKLGWCDPPNVSTLSSQLVELSKSHDELKMFSADTDIDAILQKEVQVMYSKLQDIIGTPSGNALKKYLDGFQWVYVGDRFVAPQALAFDSPVKYHPYLYTVPSELSEFKKLLSELGVRQTFDGMDYLNALRRLEGDVKGEPLSTDQLSFVHCVLEAFVDCYPDSQAPDVLLNSLAIPDSLGVLTPARNLVYNDAPWMNANPTSKNFIHLSIGNELANRLGVRSLRGSSLLDDELMRNLPCMEYAKISELLALYGESDFLLFDLIELADYCNAKKVHLIYDKREHPKQSLLQQSLGDLQGSSLTVVFEGTIMNREEVCSFQLPPPWKLRGNILNYGLGLLSSYFVCDALTILSGGYFYIFDPLGLTGVLSFVDRSGVVSGNFTDLQSTVNVKERAHHDHPVFLFCVEIVVMGQWAQIQGDCAKVIEIPQVHAVQVVPRKEEVKGQLATLLTEFQDLFSQPTTLPPKRVFDHYIPLLPGSVPVNARPYRYSPLHKDEIERQVAELLKIGLIVPSVSSFASPVLLVQKKDGTWRFCIDYRKLNDMTVKNRFPMPLVDEILDELAGTQYFSSLDMTAGYHQIRMGEEDEHKTSFKTYHGHYQFRVMPFGLTNAPATFQCAMNSILEPFLRKFVLIFIDDILIYNPTLQDHVQHL

SEQ ID NO: 51191 - protein, 217 aa, Zea mays
  Coding DNA Sequence Number=SeqID_9412
  Gene Ontology: Mol. function=ribonuclease H activity; Cellular component=intracellular; Biological process=DNA integration
  Homolog annotation: Hit_ID=Q1STR6; Match level="QueryCoverage=99%, HitCoverage=32%, E-value=2e-62, Identity=52%"; Hit description =Integrase, catalytic region; Ribonuclease H
  Pfam annotation: Domain name=RnaseH; Domain location=63-191; Score =19.9; E_value=8.1e-07; Accession=PF00075.14; Description=RNase H
MARWQILLSEFDIVYVSQKAVKGSAIADFLASRALEDYEPLDFDFPNEDLMYVANAEEDSQKNHSWRLNFDGASNALGNGIGAVLVSLNGDYHPFTSKLDFDCTNNMAEYEACIMGIRAAIERKIKTLEVYGDSALVIYQLRGEWETRDPKLIRYRRLVLGLIEEFDDITFCYLPREENQMADALATLASMIKVNQLEDMKPIQISIYEIPAHCYSI

SEQ ID NO: 51192 - protein, 278 aa, Zea mays
  Coding DNA Sequence Number=SeqID_9413
  Gene Ontology: Mol. function=oxidoreductase activity; Cellular component=intracellular; Biological process=lignin catabolic process
  Homolog annotation: Hit_ID=Q9ZP47; Match level="QueryCoverage=97%, HitCoverage=64%, E-value=4e-84, Identity=76%"; Hit description =Laccase precursor
  Pfam annotation: Domain name=Cu-oxidase; Domain location=76-214; Score=144.8; E_value=2.3e-40; Accession=PF00394.12; Description =Multicopper oxidase
  Pfam annotation: Domain name=Cu-oxidase_3; Domain location=30-103; Score=14.5; E_value=5.8e-07; Accession=PF07732.5; Description =Multicopper oxidase
  Pfam module annotation: Pfam domain module=Cu-oxidase::Cu-oxidase_3; Domain location=76-214::30-103
MGIFNKFSFIFLVIFLALSANAEVQRHRFVIQATKVKRLCKTHNIITVNGMFPGPTLEIKNGDTLEVQVVNKARYNVTIHWEATRTGAAPNVSDAYTINAQSGDLYKCSSKETTVVPIDSGETNLLRVINAALNQPLFFKVANHKLTVVGADASYTKPFTTSVLMLGPGQTTDVLIQGDQPPSRHYMAARDYQRAQNAPFDNTATTAILEYKFASCAAKKCNGPTPIMPSLPAYNDTNTVTAFSQSFRSREKAEVPTDIDESLFFTIGLELNNCPPNL

SEQ ID NO: 51193 - protein, 1314 aa, Zea mays
  Coding DNA Sequence Number=SeqID_9414
  Gene Ontology: Mol. function=nucleic acid binding
  Homolog annotation: Hit_ID=Q1S133; Match level="QueryCoverage=30%, HitCoverage=85%, E-value=1e-165, Identity=78%"; Hit description =Multicopper oxidase, type 1; TonB box, N-terminal
  Pfam annotation: Domain name=Cu-oxidase; Domain location=46-184; Score=164.4; E_value=2.9e-46; Accession=PF00394.12; Description =Multicopper oxidase
  Pfam annotation: Domain name=Cu-oxidase_2; Domain location=293-412; Score=116.8; E_value=6.4e-32; Accession=PF07731.4; Description =Multicopper oxidase
  Pfam annotation: Domain name=Cu-oxidase_3; Domain location=1-73; Score=9.5; E_value=1.6e-06; Accession=PF07732.5; Description =Multicopper oxidase
  Pfam annotation: Domain name=Helicase_C; Domain location=1181-1260; Score=60.0; E_value=7.6e-15; Accession=PF00271.21; Description =Helicase conserved C-terminal domain
  Pfam module annotation: Pfam domain module=Cu-oxidase::Cu-oxidase _2::Cu-oxidase_3::Helicase_C; Domain location=46-184::293-412::1 -73::1181-1260
IQATKVKRLCKTHNTITVNGMFPGPTLEIKNGDTLEVQVVNKARYNVTIHWEAKRTGAAPNVSDAYTINAQPGALYKCSSKETTIVPIDSGETNLLRVINAALNQPLFFKVANHKLTVVGADASYTKPFTTSVLMLGPGQTTDVLIRGDQPPSRYYMAARAYQSAQNAPFDNTTTTAILEYKSASCAAKKCNAPTPIMPSLPAYNDTNTVTAISQSFRSREKAEVPTDIDESLFFTIGLGLNNCPPNFRKRRCQGPNGTRFTASMNNVSFVLPRNFSLLQAHQQGIPGVFTTDFPANPPLKFDYTGNVSRSLFQPVPGTKLYKLKYGSRVQIVLQDTSIVTPENHPIHLHGYDFYIIAEGFGNFDPKKDTSKFNLVDPPMRNTVGVPVNGWAVIRFVADNPAFEVFVQDSWQAVELIRIKNGFMTLHLIDGQYLIEKKPFSDLRVKSRKATLPDCTCFLRPGIDICILSRPQETESLDEETPEPVWVDAKISSIERKPHDSECSCQFYINLYDNRAPLGSEKGTLSKETEVIGINDICILQKLEKNACEDQHYRWNFSEDCSTLKRTKIFLGKFSSDISWLLVTSVLKQIAFDVRSVQNKIVYQILDQDDDSPLKYNNYFHAVNIKSDNGISVSNVVQFDPLGNNEADAVYSVDETNQWPVYDAMNLRRSKRRFVQPERFVGCDHPGGTDTSWHLTAACRTSNWREEGEVQEADMNMPLSHLLCINASPTEELTLSEKRDTMSKSKNVSKEVKSDVTTPRKPSVGNPSRSGVKYPRRPRVKNPRKDENTLAIVPVSSETGDPAFGNCHMQRTPTNLSEEIEQLSLHYYNMKRYTANKKKKIPALEYLDYGTGWKGRPQPTKAQSKSYRSSQTRMEDFDELKTYKKTTLSAGAYNKLINSYMKNIDSTSVKDESHIIDRWNQFKEATSAEMNKKTEPEEPPVEEEEEMSETEMLWREMEICMASSYFDDDENNFCEYFNTLCLARPKFVFEVLRRLDPKYKRKKRFDKARNLLENRARKLFLDKIARKIDASVGEERMEGLNMLRKITNGFIDVYEGGNFDCLPGLQIYTLMMNSTDIQHEILVKLHKIMSTYTGYPLELELLITLASIHPSLVRTSNCSAKFFSTEELLELEKIKFDFRKGSKVMFVLNLVYRIIKNEKVLIFCHNIAPIYLLAEMFERIFRWRKGREILVLTGDLELFERGRVMDKFEEPGGASRVLLASITACAEGISLTAASRVILLDSEWNPSKTKQAIARAFRPGQQKVVYVYQLLATGTLEEDKYRRTTWKEWVSSMIFSEAFVEDPSQWQAEKIEDD

SEQ ID NO: 51194 - protein, 174 aa, Zea mays
  Coding DNA Sequence Number=SeqID_9415
MNPTGGHFVNCGTCQRRLNHRLRKISALPEQGSDLDNRRKGINNYGMGFYPYRSAVTTTTVWVTTTTVWATPPLGARTTTNPSTSALALSRKSASASQQCSTPSYHSQDTKTSPFGTRQARASWHTLPRCINRAVVVLPKARRKLSSFPPSRSVLALVLVSSRDLGTTPLPLCL

SEQ ID NO: 51195 - protein, 645 aa, Zea mays
  Coding DNA Sequence Number=SeqID_9416
  Gene Ontology: Mol. function=protein serine/threonine kinase activity; Cellular component=ubiquinol-cytochrome-c reductase complex; Biological process=protein amino acid phosphorylation
  Homolog annotation: Hit_ID=Q656X4; Match level="QueryCoverage=94%, HitCoverage=93%, E-value=1e-138, Identity=67%"; Hit description =Putative receptor serine/threonine kinase PR5K
  Pfam annotation: Domain name=Kdo; Domain location=322-515; Score= -86.4; E_value=0.077; Accession=PF06293.4; Description=Lipopolysacchar ide kinase (Kdo)
  Pfam annotation: Domain name=Pkinase; Domain location=330-602; Score =159.6; E_value=8.2e-45; Accession=PF00069.15; Description=Protein kinase domain
  Pfam annotation: Domain name=Pkinase_Tyr; Domain location=331-602; Score=88.8; E_value=1.6e-23; Accession=PF07714.7; Description =Protein tyrosine kinase
  Pfam annotation: Domain name=Thaumatin; Domain location=34-224; Score= 296.9; E_value=3.8e-86; Accession=PF00314.8; Description=Thaumatin family
  Pfam module annotation: Pfam domain module=Kdo::Pkinase::Pkinase _Tyr::Thaumatin; Domain location=322-515::330-602::331-602::34-224
  Subcellular localization annotation: CTP_CleavageSite=43; ConfidenceScore=5.03e-01
MGARRSSTWPHHLPLLFFLVLVNTSHTTTINITNRCPYTVWPAATPVGGGMQLEPGKSWVLQVPGNTQSGLVWARTGCSFDGHGNMSCETGDCGGVLACASSGQPPFTRAEFSLGGLNNTDFFDMNLIGGFNVPMDFLPVPSNGSSGCSRGPRCPADITSQCPGELKVPGGCRGACQHCNGSTVNSNTVFYVRMCPDAYSYSLDQGPIMYVCPSGTDYQIIFCPPVDLVSLSPPPITPLSPPPTPTSPTANGTSSITSSSKSKNRSLFGFVLGGSLAGFIFIASLALFFILHRRRLQRRQEMQEEEEAEFGRLPGMPRRFTFEQLQDATDQFREKLGEGGFGSVFKGRFGEEAIAVKRLDRSGQGKREFLAEVQTIGSIHHINLVRVIGFCAEKTHRLLVYEYMPKGSLDQWTFHRQGDDETPRLHWQTRRKIIAHIAKGLSYLHEECMKRVAHLDVKPQNILLDDNFDAKLSDFGLCKLIDREKSQVVTRMRGTPGYLAPEWLTSHITEKADVYSFGVVVMEIVSGRKNLDTSRSEKSIHLITLLEENLKNDRLVDLIDMCSSSDSQAQEQEAIQMIKLAMWCLQIDCKRRPKMSEVVKVLEGTISAETDIDHNFVVTHRPSFDAPGIAGMSAAPLASEVSGPR

SEQ ID NO: 51196 - protein, 336 aa, Zea mays
  Coding DNA Sequence Number=SeqID_9417
MDYPNLELGLSAMTKDHLVDCLAYNNLKGKVVAPLVRKKKVEAKAKAKGPTRVARVAEPSDKFAKELADTLDAGRSPGVFEKEEEDSTVAGGPSSRDEGSSHWHDWGVKVKSYKDYGDETGAAGEVVLNLSVEDYLLEGVSELDTHTRLAVGGKVWAGGTGGPVGIVQRCHRWRQGITEAFAPMESCALVDLATHNYALRKSDWKLRSNAFRPRILRLFGTSLLPKIKAGDSWRRHEETRRSKILEDSLTTFDGGDVEEESSDSEEGLNFFVRMDEESCEEDLDFFIALDIASVAEASVVEGPLNGALLASIKGKRRRIGVSKRRVDSANTFIRGR

SEQ ID NO: 51197 - protein, 56 aa, Zea mays
  Coding DNA Sequence Number=SeqID_9418
MGRSFGDETPSIQSVEKDEEASFVITTQRDDNLKAGCEEYFEVHQLALLLWDLFSP

SEQ ID NO: 51198 - protein, 148 aa, Zea mays
  Coding DNA Sequence Number=SeqID_9419
MAPRAEHGGIHRRRTLTPGNLAPFDTPNDPRHRGRDSGCVRRRRERDRCTGAVASCEEGASARRKESRTGKGEKRSLHRLGEGDEAVRVEGMELPCRSRLSVDCRAETRAHVVADLRRVAANRLVPSSRTCLRVETGIPPSGPCGEKA

SEQ ID NO: 51199 - protein, 394 aa, Zea mays
  Coding DNA Sequence Number=SeqID_9420
  Gene Ontology: Mol. function=endopeptidase Clp activity; Biological process=proteolysis
  Homolog annotation: Hit_ID=Q9XJ35; Match level="QueryCoverage=93%, HitCoverage=93%, E-value=2e-92, Identity=51%"; Hit description=NClpP5
  Pfam annotation: Domain name=CLP_protease; Domain location=166-354; Score=90.3; E_value=5.8e-24; Accession=PF00574.13; Description=Clp protease
  Subcellular localization annotation: CTP_CleavageSite=9; ConfidenceScore=5.27e-01
MALALRCPPAATSSRSPFLPSTSPAPAGKVPRRPPASWRCLAYYGDGGFRKNYDHIPKQFREENLKDGLLRPLAVMDNYKHVPQFLYGLSDAQMEMFMNDDNPYNRQSQKVTEESVSAARSYDEFGMYTLSGMHEGPASYSMGMGMGGSMSMSMGRGGRGYRRMRSSAPDLPSLLLDSRIIFLGMPIVPAVTELIAAQFLWLDYDDRTKPIYLYINSTGTMDENNELVASETDAYAIADFINRSKSKVYTINLSMAYGQAAMLLSLGVKGKRGVLPNSITKLHLPKVHKSGGAAIDMWIKAKELDTNTDYYLELLSKGVGKPKEELAEFLRGPRYFRAQEALDYGLADTILHSLDGSFKPKDLTAQLAKAQAMRQSGKRAAAGAGRWSTPTAPR

SEQ ID NO: 51200 - protein, 148 aa, Zea mays
  Coding DNA Sequence Number=SeqID_9421
MDMSRMETLYHADKEKTEALILELAGRVASSFSSPTQKGAAITPLLCKTNNLPLILTQEDQDMLRGVKYRKFVPGISKSQEFDTKSSHSKQSSLSKSSGHSRASGSRKDLFPALNFTKGRPKRKKFFSFRRKEYFNEAPDTQLTDLLL

SEQ ID NO: 51201 - protein, 300 aa, Zea mays
  Coding DNA Sequence Number=SeqID_9422
  Gene Ontology: Mol. function=hydrolase activity
  Homolog annotation: Hit_ID=Q2HVC5; Match level="QueryCoverage=68%, HitCoverage=67%, E-value=2e-42, Identity=45%"; Hit description=Cupin, RmlC-type
  Pfam annotation: Domain name=DUF1637; Domain location=63-294; Score =279.6; E_value=6.2e-81; Accession=PF07847.3; Description=Protein of unknown function (DUF1637)
  Subcellular localization annotation: CTP_CleavageSite=42; ConfidenceScore=5.34e-01
MGVNKQALSRLQFSLLAVGGSKVADPRPARVVDLSPVGDRSRASSKKNRRRHKKADAASSISPMQRLFDTSREVFANSYPGFVPPPDAVARLSGLLNELKPRDVRVAPSMSVFKHADPTSPPPVTYLHFYGSSEFSFGIFCLPKSAIIPLHNHPGMTVFSKILFGSMHLKSYDWAKSLPAVKVVNHCSEKCFVSYPIQQQPTGAGARLAKVNTDAVFDASSETVVLYPENGGNLHCFTALTPCAVLDVMGPPYNRAQGRDCAYYSESPYSCAGDAQYSWLKEVHSTFEMEGIKMEPNFIV

SEQ ID NO: 51202 - protein, 71 aa, Zea mays
  Coding DNA Sequence Number=SeqID_9423
MAGLRERPDQCRRRRQRPQGRLRQWHRCTRQPATSSQPQARPPPASSSDSVQPYRLTMAHLSILYNLAKNV

SEQ ID NO: 51203 - protein, 107 aa, Zea mays
  Coding DNA Sequence Number=SeqID_9424
  Subcellular localization annotation: CTP_CleavageSite=71; ConfidenceScore=5.41e-01
MDASSKILLVQAPSQVLPLSPWPSFFPWPPQHLFPARWSPLPQPWCRQAARLLPPNASPTPMAAPSLFCGRSAIPSPCPSHGGFRLDPSLRALLSPWLSSPPSLGSC

SEQ ID NO: 51204 - protein, 138 aa, Zea mays
  Coding DNA Sequence Number=SeqID_9425
MSPHALLPIGSRIHGPQYDRMRIPSEPQDVDLTVTNFESRPKHPTVRSYINGPNLPAPRSNLNRTFTIQGPSALFPLLQPLPAAMSRTAAELGRSWPNPTPRRANSKINWRIILLTLSLHSTPLSMLGLYDGGAEEVD

SEQ ID NO: 51205 - protein, 55 aa, Zea mays
  Coding DNA Sequence Number=SeqID_9426
MVDVVVSFLVLGLLVVALIVRSALALLVRARWCCWFEEKTPYLEDFLKMSRKLQN

SEQ ID NO: 51206 - protein, 45 aa, Zea mays
  Coding DNA Sequence Number=SeqID_9427
MPSSKVPLLLVILCLVVSSSSSSVATHNAGEDHRLPLPLPLPVKI

SEQ ID NO: 51207 - protein, 59 aa, Zea mays
  Coding DNA Sequence Number=SeqID_9428
MERLFQSRYVLSKLGWHVGFVSRRQKGKTSSATTDHGYELRSQGSATLGPDVLDMMKDS

SEQ ID NO: 51208 - protein, 166 aa, Zea mays
  Coding DNA Sequence Number=SeqID_9429
MAEGVGNSDWSWTMSTSQPWGAGASGIILRAGEGAAWAPWLLAEQRRRGLGVPWPREGKSRGRRSLCRAPDGEEEKSSCHGDDACSHNRDPRESREPASLLEEEEGGGGKDAMGGEGAPCALPCGRNGRDAARGRRRQGGEVVAAEKKWMGGNEKFPSARKEHPYL

SEQ ID NO: 51209 - protein, 77 aa, Zea mays
  Coding DNA Sequence Number=SeqID_9430
MAIQLPFTTFPVDNRIIRFRRCYTEKIPRQILGGCLLTLGCPTSVQYCDAVEWIHAGEQFLEAQPCTLPQASSHTLY

SEQ ID NO: 51210 - protein, 87 aa, Zea mays
  Coding DNA Sequence Number=SeqID_9431
  Subcellular localization annotation: CTP_CleavageSite=27; ConfidenceScore=5.39e-01
MPPSCRTSRPRRDRRRVRSLAPRPCARASSLATVARPCALTCRRAPETAPPPRALARERSRARSRRAHTLAIALAEAAPAVPALAVP

SEQ ID NO: 51211 - protein, 145 aa, Zea mays
  Coding DNA Sequence Number=SeqID_9432
MAQGPLPSYEALSQHATQSALDDVESFKDLAPVRGKIIGLLSHPDFRGPKPGREHNHQGLTRKSPQDSRFPHKDGGLISIKFKGSFVKLSAEEMAEEFARGQSFIAQRRSPIQKPNFVPNRPKRAHINHSGDRDLRFSLLWSLIG

SEQ ID NO: 51212 - protein, 423 aa, Zea mays
  Coding DNA Sequence Number=SeqID_9433
  Gene Ontology: Mol. function=metal ion transporter activity; Cellular component=integral to membrane; Biological process=metal ion transport
  Homolog annotation: Hit_ID=Q6L8F7; Match level="QueryCoverage=86%, HitCoverage=98%, E-value=1e-106, Identity=60%"; Hit description=Zinc transporter
  Pfam annotation: Domain name=Zip; Domain location=93-420; Score =292.4; E_value=8.3e-85; Accession=PF02535.12; Description=ZIP Zinc transporter
MAPITTRASSSLDKARKVALKYKKGKAALTDNTYPLDRIRRLWPWFSPASAGTSAQFLTSSNELMAASLSAVSCADEVQKAEGAGCRDDAAALRLKKVAMAAILVAGVLGVVLPLAGRKRRALRTDSAAFLAAKAFAAGVILATGFVHMLHDAEHALSSPCLPAAPWRRFPVPGFVAMAAALATLVLDFLATRFYEAKHRDEAARVKAAAAAALVATSSGSDEDITVVTVDEDERKAPLLQTHCHGHGHSHSHSHVHEPVQVEGSEAEVSAHILEMGIVSHSVIIGLSLGVSRSPCTIRPLVAALAFHQFFEGFALGGCIAQAQFKNLSAVLMASFFAITTPAGIAAGAGMTTFYNPNSPRALVVEGILDSVSAGILIYMSLVDLIAVDFLGGKMTGTLRQQVMAYIALFLGALSMSSLAIWA

SEQ ID NO: 51213 - protein, 182 aa, Zea mays
  Coding DNA Sequence Number=SeqID_9434
  Homolog annotation: Hit_ID=Q5TKD8; Match level="QueryCoverage=31%, HitCoverage=26%, E-value=4e-26, Identity=89%"; Hit description =Putative thioredoxin
  Subcellular localization annotation: CTP_CleavageSite=79; ConfidenceScore=5.85e-01
MADALLLPCRFLAPLSVTSGASSSASSSPPCRWVLSSPGSPWRPRLAAGQRQPRPRRFTRHKVRVLGLSAEAFATGFVVCQTRVNDVEGGALLLRFFGGLRVVPKICAAERGEQPKWWEKNAGPNMIDIHSTVEFLDALRDAGDRLVIVEFYGTWCGSCRALFPRVMPLIVNITTGCLIGSV

SEQ ID NO: 51214 - protein, 131 aa, Zea mays
  Coding DNA Sequence Number=SeqID_9435
MEAAEVAALVGMVAECLDAEDYDEYEGITEESVREVMSWFEVEIMLAAGANALPLPPSLDARVSERKESCKSSLSVPASVDGRAGVPPPPLAEPWSVPEPAAAAEEEDVDDEWVLQLLTDGPPLDGQHCGQ

SEQ ID NO: 51215 - protein, 156 aa, Zea mays
  Coding DNA Sequence Number=SeqID_9436
MDSDSPLVVDSLVAMDSDSLIAVDSLVDMDSDSPLAVAKDDVSSSLDSDMALDCVAPDSESIRFVPDSEPFELVPDSEAEEVAPEAKSGELELGPFLCGSCGVVHENRASWNRVHSAFRPCSRCGVINKENLIDALLHGAQEWVCKPECDAKASQV

SEQ ID NO: 51216 - protein, 136 aa, Zea mays
  Coding DNA Sequence Number=SeqID_9437
  Subcellular localization annotation: CTP_CleavageSite=70; ConfidenceScore=5.08e-01
MPPVSLPAHRSHRISQVGLSDQDHALPAPLSPSFIVPTSLPTLRGVNGTDIIRPSDRPKRLIIRLNRFFRISAEFSDFGFEFGYYSSDIGYGYGMTDILRISDIRISSRITIRISYFGYPDIYPDILPDFRFQIFG

SEQ ID NO: 51217 - protein, 173 aa, Zea mays
  Coding DNA Sequence Number=SeqID_9438
  Gene Ontology: Mol. function=transcription regulator activity; Cellular component=nucleus; Biological process=regulation of transcription
  Homolog annotation: Hit_ID=Q5SMX4; Match level="QueryCoverage=72%, HitCoverage=28%, E-value=9e-26, Identity=54%"; Hit description=Basic helix-loop-helix protein-like
  Pfam annotation: Domain name=HLH; Domain location=71-121; Score=46.5; E_value=9.2e-11; Accession=PF00010.16; Description=Helix-loop-helix DNA-binding domain
  Subcellular localization annotation: CTP_CleavageSite=39; ConfidenceScore=5.69e-01
MRSPAPVHSGSTSGTSAPKKKLKQGGCGQRAIKTAMSVLARMHSSRLSQWQRQISSTEMAAAVPSDESKNIQLLHVRSERKRREKINDSFEALKNALPPSCCKRDKTSILMRARDYINSLKSRVSELEENGKSKLDIHVPFKFKACDDNNFVKQSVSVIQTVKCTMQSEIETP

SEQ ID NO: 51218 - protein, 266 aa, Zea mays
  Coding DNA Sequence Number=SeqID_9439
MGWSRFRRRHQRCRYLLPIRRPRCSPPLLPHASDARHARLPPLRSASLPFSPSVARAWKKVQQPQTPQRGRAWHEEPSRPPLPARRIPAVPTIACVGSDPVRSCLAAQFSHTVRGGVRLAPVSHTVPQRIQSRLLTLRCLLPSPLPSNPRFRVHSGYRELAPASMAPSSARDSPVPVGRGSQIFTRFLLHYLRAATRRPLTLEREGTALAGLADTAVHGMALVEGTTFSCRGLFWVLRIVSAVGLSRECRHKLERLMGLMLVQAYE

SEQ ID NO: 51219 - protein, 123 aa, Zea mays
  Coding DNA Sequence Number=SeqID_9440
MGGVWTLEQRQFAIAAWSAGRVRQGRTAGEGTGGQRHSGAYSSGRRTAVGQPVTGHTGGGHATQALGGWQLERSAWRLEPGWRRRLRDGRAAAGYRLCVGLDLFAVTAFTGPRPGLQPRQPRS

SEQ ID NO: 51220 - protein, 105 aa, Zea mays
  Coding DNA Sequence Number=SeqID_9441
MAAQTTGAAWEDERWWAGVDNLIYAVLATTIPPLAEEVKGAAGGTARYSRRPDSLQRRPQPHSVAEVNGRLQQANDFALRGVRGARTVWTERLSSRFIFNVDNNP

SEQ ID NO: 51221 - protein, 147 aa, Zea mays
  Coding DNA Sequence Number=SeqID_9442
  Gene Ontology: Mol. function=RNA-directed DNA polymerase activity; Cellular component=chromatin; Biological process=chromatin assembly or disassembly
  Homolog annotation: Hit_ID=UPI00004C1730; Match level="QueryCoverage =99%, HitCoverage=25%, E-value=2e-40, Identity=57%"; Hit description =UPI00004C1730 related cluster
MRIEIARYVTKCDTCQPVKDVRMMTVGPYSRYPSNLEVGRISMDFIVGLAKTSERYDSIWVIVVRLTKTSHFLPVKTYYPVLTYAQLYVSRILSLHGVPRTIVSDRGPQFISKFWEELHKSLGTKLLYSSAYHPQTSRQTKRVIQIL

SEQ ID NO: 51222 - protein, 108 aa, Zea mays
  Coding DNA Sequence Number=SeqID_9443
MEEARTGYRRDVTYPSRPGHGDAHHGGAENGDGEDVALGVANAIRLGFSSHNTKGVTSSPPKKNLVSRFKDLGVYKKLKTKENIFLKNLEIPKWPLLLYVASITHYKT

SEQ ID NO: 51223 - protein, 81 aa, Zea mays
  Coding DNA Sequence Number=SeqID_9444
MTRLARYCDMCCRKEGESSGIFTPGMLQDMVDVGLGLPPCHRVGRSSGMLLRQERSRRSSGLGLALFLAFDDIDYPLQLIL

SEQ ID NO: 51224 - protein, 124 aa, Zea mays
  Coding DNA Sequence Number=SeqID_9445
MAHRTVRWCIGQGTVHCLSTVGASDRCSFGSLDTIRCTTKPSCPHNCLPRNRIPHNLLPRYASGYARLMSSKGYAPVPLGPLWWSTERIQVMSVTLLYGNIPGITWAPEGTCVLNPRRRALRHL

SEQ ID NO: 51225 - protein, 141 aa, Zea mays
  Coding DNA Sequence Number=SeqID_9446
  Gene Ontology: Mol. function=nucleic acid binding; Biological process= DNA integration
  Homolog annotation: Hit_ID=Q3LRV2; Match level="QueryCoverage=38%, HitCoverage=21%, E-value=1e-14, Identity=69%"; Hit description=Gag
MSGHHAKREIVTNNKAKGSERTPSRESGNKYKEESASSIKSHRKGDKKKKKMKKVVYYETDSSSPSTSDAESTTSRRHECKKYSKPPYFYGEDYCMWSDKMRGSKMRHHLTSLHESIWDIVEFEAQAPQVGDEDYDSDEAV

SEQ ID NO: 51226 - protein, 42 aa, Zea mays
  Coding DNA Sequence Number=SeqID_9447
MQTENTDGVKALCGYGQSHNEVHADVFPFPCWDRQRGPKLPG

SEQ ID NO: 51227 - protein, 101 aa, Zea mays
  Coding DNA Sequence Number=SeqID_9448
MDAKRQSNKEEPSPIVIARAAKSVVSGVEEEHREVVEDLKQEAIMDHELTGMVLVEEEQRAPIPRDYCVKAKVRSTKPFRMDTIYDEEKEDSKPMQEQDES

SEQ ID NO: 51228 - protein, 512 aa, Zea mays
  Coding DNA Sequence Number=SeqID_9449
  Gene Ontology: Mol. function=nucleic acid binding; Cellular component= intracellular; Biological process=chromatin modification
  Homolog annotation: Hit_ID=Q53JG9; Match level="QueryCoverage=52%, HitCoverage=56%, E-value=3e-34, Identity=38%"; Hit description=Zinc finger, C2H2 type, putative
  Pfam annotation: Domain name=zf-C2H2; Domain location=243-266; Score =26.6; E_value=8.8e-05; Accession=PF00096.16; Description=Zinc finger, C2H2 type
MSLATLLLPSPGSMATKAGTAGDHHTDSRRHDHDHHGSKCKKKPPASPQPSSLASAPRTPPSGARSQRVMVMAASSSSPRKKSPKAPAAGKNSRAQYQQHRGQATKKKATAAASWDWEQVKSLLSCRSVTAAARVHDPAAPSALARLRGSGAGTCGASLCAMRDVVDAASSAASSAAASASASGDRDTAPLNRRRAHRGASSSSAGAGSSHHSSLRGLSGCYECRAINVEPMSRRYPRPRELCACPQCGEVFTKADTLEHHQAIRHAVSELGPEDSGRNIVEIIFSRAGTSGTAPICHIDRILKVHNAPRTVARFEAYRDAVRSRCRAVVAARAAADGNELLRFHSAPLACALGLGGATALCCAAADADADAPAPPCGVCTAIRHGFAPWLGAHPLGVRTTASSGRAHDCASDNNNPSPPPPHQTQSAASDVSNAAACRAMLVCRVIAGRVRRDGDGDTSAAAGEDQEGPFDSVAGEDAASSSVYGNLEELFVANPRAILPCFVVIYRVLDS

SEQ ID NO: 51229 - protein, 74 aa, Zea mays
  Coding DNA Sequence Number=SeqID_9450
MLSLNGWSKYKERLQKEVAMGLNTSGGKAAHTPFNASTQGGNAKSLILPGMHEGEGGRRLFCQKYGDKDHHARE

SEQ ID NO: 51230 - protein, 172 aa, Zea mays
  Coding DNA Sequence Number=SeqID_9451
MGLLSSYNLGSDPRGVVPSPYMCHSDLRPGEVRCRHMFGPLRMEPGPPQVPSKPLARGGGAPVQPVADDVCSSQGLGRASNPHVIEAETIDPLRHTWATPIMTSTILAQRQEMEIGGRDWTTPHVYSPTQVDKPIYVAAYTKSFTHTITRLSEDESGQKRPHGDKGKIPVMP

SEQ ID NO: 51231 - protein, 219 aa, Zea mays
  Coding DNA Sequence Number=SeqID_9452
  Pfam annotation: Domain name=efhand; Domain location=18-46; Score =33.8; E_value=6.1e-07; Accession=PF00036.22; Description=EF hand
MAFMRYRALPRGELTAEEFRAWLAQFDADSDGRISREELRHALRSLNVRFAWWKARGGVRAADADRDGGVQLGEDEVARLFAFAQSHLRVKIAQLGVYAAYNSIVLNFNLPPWSRTHGSAADVRDRGPGFVVAGGDEEDYGEPPACLGASAADPTTRLLGGDRGAEFGVRMYDTILGYDWLSAHNPMGNHQASFIGNRKELIQVGARSVQETGYAYLGY

SEQ ID NO: 51232 - protein, 231 aa, Zea mays
  Coding DNA Sequence Number=SeqID_9453
  Homolog annotation: Hit_ID=Q2R179; Match level="QueryCoverage=94%, HitCoverage=60%, E-value=6e-61, Identity=47%"; Hit description =Expressed protein
MWPGCGGRFYWAPESAPPGQARGVAVLFAWVWSDETQLRPFVELYSSLGWRCLVCHPDLVALYLSEKAISLATGVINELVKLLDGICEGDAIMKDYRLVRNCICGQIYDSSPVDFVSDVGAQFVQKPADGNSSQPTILHSWMAKALASVMDTLFPSRIEAQRAEYWHTLYSAAGLGPVLLFCSEADNLAPCYIICGFARRLIELGTEVKLMKWNSSQHVGMVLRPFPAVYP

SEQ ID NO: 51233 - protein, 566 aa, Zea mays
  Coding DNA Sequence Number=SeqID_9454
  Gene Ontology: Mol. function=transferase activity, transferring glycosyl groups; Cellular component=membrane; Biological process =cell wall biogenesis
  Homolog annotation: Hit_ID=Q69TV3; Match level="QueryCoverage=99%, HitCoverage=99%, E-value=0.0, Identity=66%"; Hit description =Putative galactoside 2-alpha-L-fucosyltransferase
  Pfam annotation: Domain name=XG_FTase; Domain location=52-537; Score =669.0; E_value=3.7e-198; Accession=PF03254.4; Description=Xyloglucan fucosyltransferase
MALVGVVGIGITKRPSQQCLDAVESAARRAEAEEGTVEQNTPPWMATKKVTALAAICLVALPILMVTTVSRRDVPRTPASFWPLATLARQEKLVGGLLVPGFDERSCLSRYQSAFYRKNLARSPSAHLIRRLRQHEALQRRCGPGTEAYRAAAARLRSSSHRNGSNDDNDTRGACRYLVLVPYRGLGNRILAVASAFLYAVLADRVLLLGGETSLGDVFCEPFPGTSWLLPPRFPIGDLQNLTGDVRESYGNLVQQNDSAAAAAASGLRYVFVDLDHSCTYHDKLFFCDDGERQFLRRAAWLVMRTDGYFVPALFLNPAYQDELDGMFPRKDSVFYLLAHYLFHPTNEVWGLVTRFHRSYLRGSDERLGIQVRVFDGDAPFQHILDQILACTSQEHLLPDVAVTQEPSAGRGARSKAVLMTGLSSWYYEKIRWKYWQSATATGEVVSVYQPSHEEHQLSGYTTHDMKAVAEMYLLGMTDKIVTSGWSTFGYVGHGLGGLTPWIMFRPENHTTPYPPCRRAKSMEPCMHGPPFYDCRAKHGADTGKLVPHVQHCEDMSWGLKLVHPE

SEQ ID NO: 51234 - protein, 143 aa, Zea mays
  Coding DNA Sequence Number=SeqID_9455
MEQDGHKVDRHVVHERKSKAMPEGYEQKQEMNAKNRKNYPDKPSERRHMNNPLPPLDMKEKNGQKEMKKYGKKDSDRRRELMDVEVLDINVQRRKRNPVSVRSRILRPPAHADEYAGMEEKMANQAPDGRRRHSSKRNNRFRP

SEQ ID NO: 51235 - protein, 241 aa, Zea mays
  Coding DNA Sequence Number=SeqID_9456
MVSSSSGLCLWIDQSTNYISECYEPLPPPANPTHRSASPAAEPAYTRTPPAEPLLNLPGIACRSSSQILARAPRPTLSPNCSIRIGNPHVAYGGRTSPSTPEHVPTGAPLTQLSSPTIPSVDSAPSVQASRVPNNHPAKRKPPPPPPPGRRRTSPTVAWKKEDKPRRRLEGGGQAPPPPPSHCQPLPTAPTPALQLPPRRMLPNALYNPGERSRKASDARQEGHPARPRQWRHSAPTNPQH

SEQ ID NO: 51236 - protein, 136 aa, Zea mays
  Coding DNA Sequence Number=SeqID_9457
  Gene Ontology: Mol. function=transferase activity, transferring glycosyl groups; Cellular component=membrane; Biological process =cell wall biogenesis
  Homolog annotation: Hit_ID=Q69TV8; Match level="QueryCoverage=94%, HitCoverage=22%, E-value=2e-26, Identity=51%"; Hit description =Putative galactoside 2-alpha-L-fucosyltransferase
MKGMYRENATANGEVVGGREPAAEPRAHEEYQHYGVKSHEYKAWAEIYLLSLTDMLVTTGKSTFDRLRGPGTRRAEAVGPAQTGQRHSWCSRDMSLEPCFRIAPPYDCKRRHDDSGEIVPHVRHCEDVRAHGAEAC

SEQ ID NO: 51237 - protein, 194 aa, Zea mays
  Coding DNA Sequence Number=SeqID_9458
  Gene Ontology: Mol. function=protein dimerization activity; Cellular component=nucleus; Biological process=regulation of transcription, DNA-dependent
  Homolog annotation: Hit_ID=Q69TW5; Match level="QueryCoverage=98%, HitCoverage=58%, E-value=2e-47, Identity=57%"; Hit description =Putative bZIP transcription factor
  Pfam annotation: Domain name=bZIP_1; Domain location=108-168; Score =9.8; E_value=0.013; Accession=PF00170.11; Description=bZIP transcription factor
  Pfam annotation: Domain name=bZIP_2; Domain location=110-165; Score =11.1; E_value=0.051; Accession=PF07716.5; Description=Basic region leucine zipper
  Pfam module annotation: Pfam domain module=bZIP_1::bZIP_2; Domain location=108-168::110-165
MTLEDFLVRAGVVREDMGQQTLVLQPLAQGLFSQGNAVALAPQTMQLGNGVLTGVVGQGLGGGMTVAVPTTPVVFNVMRKLEAGDLYRPLQLTMPIGTTLRVRTSRAERKVVERMKRRMIKNMESATNNSLNKHAYIIELEAEVAKLKDLNDELQKKQVEMLKKQKDEVLERINNQHGPKAKKLCLHRTLTGPW

SEQ ID NO: 51238 - protein, 87 aa, Zea mays
  Coding DNA Sequence Number=SeqID_9459
MARSSVTVRVRESKTERDEEDTSTEAPERRQRGRERRPEMEEMDERRDGGRSRSGEERSGRAVEWFKNELTDDKYSRIDVILKYTQS

SEQ ID NO: 51239 - protein, 136 aa, Zea mays
  Coding DNA Sequence Number=SeqID_9460
  Gene Ontology: Mol. function=RNA binding; Cellular component =spliceosome; Biological process=mRNA processing
  Homolog annotation: Hit_ID=Q2QUQ9; Match level="QueryCoverage=64%, HitCoverage=10%, E-value=2e-15, Identity=49%"; Hit description=Pre -mRNA splicing factor cwc22, putative, expressed
MTCEFEGRKSVNECAWSPEATRGASVRARPRRKRQQGSAKECDAVFDNLCGILHDADIDKRIQFMIEDLFANRKARFRGHPPVRSELDLIEAGDQMTHQVELFASGGELNREVHLDVFEVLNPAPSSREMRPSREP

SEQ ID NO: 51240 - protein, 448 aa, Zea mays
  Coding DNA Sequence Number=SeqID_9461
  Gene Ontology: Mol. function=calcium ion binding
  Homolog annotation: Hit_ID=Q2QXG8; Match level="QueryCoverage=99%, HitCoverage=100%, E-value=0.0, Identity=77%"; Hit description=TLD family protein, expressed
  Pfam annotation: Domain name=TLD; Domain location=267-411; Score =220.7; E_value=3.2e-63; Accession=PF07534.6; Description=TLD
  Subcellular localization annotation: CTP_CleavageSite=18; ConfidenceScore=5.26e-01
MGNSQASPASASSSRFVMASRAFPKQELDGLRELFASLAAQSRTGGRAISRPVFLEYYQVRGRLGDRLFQLVAKESGGSDGVTFEDLIISKVSARLNSIHSVVRLVVASKATYGRGTRDEVDEFIYQLCDVTGDGALTRSDLESVLASVHETVFAIKKEAVEVSNNRPFEEFLNSAVFSKDVEGVSGKSMSLSDFRNWCTLLPSLRKFLGNLLMPPDSDSTTGRPGFEVPLLHYPENICTDTLLLNKEYAWHIGGGFSQHEVQEWKLLYHSSLHGQSFNTFLGKVTNGDAQTVLIVKDTEGSIYGGYASQPWERHSDFYGDMKTFLFKCYPQASIFRPTGANKNLQWCAVNFSSENIPNGIGFGGQPHHFGLFLSANFDQGHSFTCSTFTSPPLSKTNRFRPEVIECWGIQMRGAQDEKLELVKGTVLERFKEDRNMLKMVGLANASD

SEQ ID NO: 51241 - protein, 261 aa, Zea mays
  Coding DNA Sequence Number=SeqID_9462
  Homolog annotation: Hit_ID=Q6QP54; Match level="QueryCoverage=47%, HitCoverage=43%, E-value=1e-10, Identity=44%"; Hit description =Putative kinase
  Subcellular localization annotation: CTP_CleavageSite=7; ConfidenceScore=5.09e-01
MSGTIIRGTLKTPNSQLVTPISIKLQRPDGATRQSESDRQSGLAKGATANSAPPDPRARTRAKTRKTANSAPPDPRARTRAKTRKTVNSAPPDPRARTRAKTRKTANSAPPDPRARTRAKTRKTANSAPPDPRARTRAKTRKTANSAPPDPRARTRVNTRKTTKLRFARPQGSDSALASAERLPPRPTPWLGLGHATEDRLNLGFGGTPTSPCLGHRPPRQQEAPSSSYPESTRVTENKDRRPIRAKLRRKGQMMALHKAL

SEQ ID NO: 51242 - protein, 153 aa, Zea mays
  Coding DNA Sequence Number=SeqID_9463
MGKSKKGGGSSHHSGDKRKREPTPPSEDFSDSEYSEEEFSSESEGSPAPASPPASSDDSDDSQEIAAEVWTYIRAVERAELEGLDESEYSSDEENSSDSSEEGSGGDGGDGDDDGGDGDGDNGKGGDGSDKGGSGDGGGGSKGSRKGSNKASG

SEQ ID NO: 51243 - protein, 86 aa, Zea mays
  Coding DNA Sequence Number=SeqID_9464
MATKIQSIDREAYLGVDVSWCGYFACLSIFNESYDALRVKPDSCEKMLNRHSLEQVNPRATLIDELQPLLSQEYRIREQRTQRCDG

SEQ ID NO: 51244 - protein, 142 aa, Zea mays
  Coding DNA Sequence Number=SeqID_9465
MDGVYIFRRRGIEGRDRRVRIQPKRRDPVTSLSSTFVVRPVGRLQQPTKKVAISPPPPVLLGCTLFLVAKIRYHGFFLSRGCWVGQPSRAREAVTQSQAERGVTCGPACGGFGLGRCMQRAPPRYTQRKRGQGITASPWTHL

SEQ ID NO: 51245 - protein, 186 aa, Zea mays
  Coding DNA Sequence Number=SeqID_9466
MAIRPSVWAENEGFAMGKVERRENDTEAHDELRLGHGGARRRAAGLFVLAFGLKTRGSPWRALRKQRFGHDREKGLSPGVWKDNEAKVHVWSEGQGGTEGKREEVRGRRAAWLFGLAFGLKTRVSPWRAGPKRRLGHGLGNKPSASVWKHTEANVYVLGEGHGGTDGQRHGGTRDVRQGRSAMRVG

SEQ ID NO: 51246 - protein, 52 aa, Zea mays
  Coding DNA Sequence Number=SeqID_9467
MALPLAQELPPCPIPHRLLLLDFFASRKPKEEDDPHCPPRANWKSFSVEIRI

SEQ ID NO: 51247 - protein, 47 aa, Zea mays
  Coding DNA Sequence Number=SeqID_9468
MTTPEFLLSISLFKQLATTKELGFLFDVQGCSWHGKSSNNMSRCNYR

SEQ ID NO: 51248 - protein, 248 aa, Zea mays
  Coding DNA Sequence Number=SeqID_9469
  Homolog annotation: Hit_ID=Q18DN4; Match level="QueryCoverage=55%, HitCoverage=1%, E-value=3e-09, Identity=30%"; Hit description =Halomucin precursor
MQPRKAGPLAKKCDESLQASANTPFEARGLLSGTIIRGTLKTPNSQLSESDRQLGLAKGATANSAPPDPRARTRAKTRKTANSAPPDPRARTRAKTRKTANSAPPDPRARTRAKTRKTANSAPPDPRARTRAKTRKTANSAPPDPRARTRAKTRKTANSAPPDPRARTRAKTRKTANSAPPDPRARTRAKTRKTANSAPPDPRARTQAKTRKTTKLRLARPQGSDSALASAGRLPPRPTPWLGLGHGN

SEQ ID NO: 51249 - protein, 415 aa, Zea mays
  Coding DNA Sequence Number=SeqID_9470
  Gene Ontology: Mol. function=GPI anchor binding; Cellular component =membrane; Biological process=cell adhesion
  Homolog annotation: Hit_ID=Q06I84; Match level="QueryCoverage=90%, HitCoverage=91%, E-value=1e-135, Identity=69%"; Hit description =Fasciclin-like protein FLA22
  Pfam annotation: Domain name=Fasciclin; Domain location=200-335; Score=94.7; E_value=2.8e-25; Accession=PF02469.12; Description =Fasciclin domain
  Subcellular localization annotation: CTP_CleavageSite=70; ConfidenceScore=5.33e-01
MRKQIPPVSCLVLLAAAFALLAKASAASPAQAAVAVNVTGVLSAFPDLSDFTRLLASSPVLAELAGRSPSAFAAASGADLADVLRYHVLLEYLSHADLRRLPASGKLVTTLFQTTGRATADLGAVNVTTAGASRLTVIRSPAPFPGSNATVLGAITAVPYNLSVLAVSGLIAPSGFDLAASESQPPAAVNITRVLADARAFNVAASMLEASGVAAEFEDDERGAGITVFAPTDDAFAGLPAGDRLQSLPADRKAVVLRFHVLHSYYPLGSLESIVNPVQPTLATEFSNAGRFTLNITRANGSVAIDTGVVQATITRTVFDQNPVAVFAVSKVLLPKEMFTRTAAASIVATTASASSPPPAATAPEASESARTPPTKLSSPPALRGGGQDYATAPAPARGIEWWCIALVYLLPHLV

SEQ ID NO: 51250 - protein, 504 aa, Zea mays
  Coding DNA Sequence Number=SeqID_9471
  Gene Ontology: Mol. function=sequence-specific DNA binding; Cellular component=microtubule associated complex; Biological process =microtubule-based movement
  Homolog annotation: Hit_ID=Q6L512; Match level="QueryCoverage=72%, HitCoverage=72%, E-value=1e-148, Identity=67%"; Hit description =Putative kinesin-like DNA binding protein
  Pfam annotation: Domain name=Kinesin; Domain location=124-376; Score =193.5; E_value=5.1e-55; Accession=PF00225.13; Description=Kinesin motor domain
MAAGCGLRAVGMGRARLAREIGGRIRGDGLTALPIHLIPPARLPCSKFERPPPPQRYHLPQFPTPAHPSSATRLVATKPKIRTPSRSPSPASGADRVILAPMAAASTPARSSAHLSQPVRVVLRVRPFLSSEAASATAPCVSLLGCHPGGGVTVQLKDQHTSRSEQYKLDAFFRQEDSVSQIFDQEVRAVIPSIFEGINATVFAYGATGSGKTYTMQGTEDFPGLIPLAASTILALCTGTWCSVEISYYEVYMERCYDLLEPKAKEIMALDDKDGNMQLKGLSWRRKVAHTGLNDVSSRSHAVLSLRVSSTDVVKGKLNLIDLAGSEDNKRTLNEGIRLQESSKINQSLFALSNNPAEYQESANTVSLAARSCHIENFTSSSKQETPKLKIDMEAKLRAWLESKGKTKSIQRMDGLFSPIASKTPLSVSHMKQPTSSRIPCRVKAMDQDGGKIKKILFDPVVHVPTENIPREHRQTELEDLGNIGLSSKQIRDILKKTATGIFK

SEQ ID NO: 51251 - protein, 871 aa, Zea mays
  Coding DNA Sequence Number=SeqID_9472
  Gene Ontology: Mol. function=RNA-directed DNA polymerase activity; Cellular component=chromatin; Biological process=chromatin assembly or disassembly
  Homolog annotation: Hit_ID=Q94HV4; Match level="QueryCoverage=72%, HitCoverage=43%, E-value=1e-159, Identity=47%"; Hit description =Putative retroelement
  Pfam annotation: Domain name=Retrotrans_gag; Domain location=275-365; Score=27.1; E_value=6.4e-05; Accession=PF03732.7; Description =Retrotransposon gag protein
  Subcellular localization annotation: CTP_CleavageSite=47; ConfidenceScore=5.67e-01
MSSPNPPPSPHHPQPPPSPGLSQPPGAQLQAPASQGTTAPMLGDHTAAALVPTAPPADVLAGSSRLQAFTPHEMTAAILELGQAVAGIRAFLAGPYTPPPQLPPPQQPPASAPSYQYGMPPDWAGSASSSSPQASQGLPIHMVRFPPSPSPLPAWATVTSAPVFGSAAIQPHVPFQPAAGGVPSHGGSSAAGVLYGGVDGSPFHGSSVPPPGSRGQCSSPPAAAPTAPAASDPLPPRFYKLEFATYDGAADPVNWLNQCEQFFRGQRTLASDRTWLASYHLRGTAQTWYYALEQDEGMPTWERFRELCHLCFGPPIQGSRLAELGRLPFQSTVQEFAERFQALACHVDSVSSVQRAELFVGGLPDHIRVQVQMHHPRDLQTAMYYARAFELCTATAQPAPTSRPTRHAPRPPQQPPARAQVGGQPPAAAHTLPGGHPFRRLTPAEMQERRRQGLCYNCDEPYVPGHVCQRLFYLECGDYIVDEGAPAATDDAGLQAASVQDPEAAIAFVVSLQALAGIRTESSMVLPVMVKGERLMALLDTGSTHNFLQSATMRRLGLVPAAGEHLRVTVANGDNLRCAGVARDVPISIENEHFSITCVGLDLGCFDFILGVDYLRTLGPITWDLEAMTMAFQRDDHRVLWRGIGGADPPDPRASVAAVVAASDQQPMLDRLLLQHASTFEEPRGLPPTRPYDHRIHLLPGTAPVAVRPYRYPQLQKDELERQCDAMLTQGIIRPSTSPFSAPVLLVRKADKSWRFYIDYRALNAKTAKDKFPIPVVDELLDELHGARFFTKLDLRSGYHQVRMCVNDIAKTAFRTHHGHYEFLVMSFGLSNAPATFQTLMNDVLRPYLRRFVLVFFDDILIYSSSWAEHL

SEQ ID NO: 51252 - protein, 38 aa, Zea mays
  Coding DNA Sequence Number=SeqID_9473
MARSCADDNGEHAGRDRARPEVAGGCKGLVDVTSDIML

SEQ ID NO: 51253 - protein, 141 aa, Zea mays
  Coding DNA Sequence Number=SeqID_9474
MSEVMREQSQEDDDVTLSNTILSMSASTRIPRKGALLSEKQTFVRVVIVHVIEQLKAEVAAASAIADRTMPRDIPLPVEGNEKRKRRGVLAFNFIYNILRIAVSIFFEKWRIWVSAYRVSVSPYQGNIDDEAPDGCPGGGT

SEQ ID NO: 51254 - protein, 67 aa, Zea mays
  Coding DNA Sequence Number=SeqID_9475
MDNCGGAAAGGRTQIAVATADGARAGGRGLVVVARAPEQDEAPEQNCLLGREGDGKPYTLGKDARPG

SEQ ID NO: 51255 - protein, 242 aa, Zea mays
  Coding DNA Sequence Number=SeqID_9476
MAPLRGTESTHEVQFYKIILSNDIIEKETPSIISSRHGLFLTSETYIEVATILVLVLNKSTNQGETPNVKVRLAGFILDDGSSLCCGWADDARAELLLRLQEIVHLDASVNLKLSKGGENSTKLKYTIGCCLEKMLKQHTSVTVKNCGIPPDFYCRDLDASSVSDKALSRLEDKLLKFIVLNACCKGSLNVMASALSPDDINGFNVELPVPVQNMRMLWIEEVFPVDPLEEARRLHDILENS

SEQ ID NO: 51256 - protein, 284 aa, Zea mays
  Coding DNA Sequence Number=SeqID_9477
MPGSSLYAEAVILPYVLKFIGQGEFLEHAEGFIMSHSTLLGNSEASVAKSCNIPCSLSFGSTNLCGTLVSTYASGSEGTVLNEPIVLRKEYSRILLEFEAGIFKKYQLPRINGSYILQCPSRSFTCTMGNCGCLQGGKVSIDAQDRLWSFAITIGGNINIKGSIGDQSIGVTSMKMDEIFSRNMVDDELRLVQPWNDFYRNSYFHLDFSYEAISKKMEDYNTVYIRGYSNKHFTVGIGPGATVTFHRIRFKQFAPSLLDRCSIKPLFTHLQHFSFYLDLTRNLM

SEQ ID NO: 51257 - protein, 100 aa, Zea mays
  Coding DNA Sequence Number=SeqID_9478
MSANCSVVGTLRTSNITGGDTLANEVQVDLHVLRALMLRVVVRGTRAWKGQQPAVLRPMGLGRNHEAQRRKLARLEGAANSGELRALGVGYMMLAWFLKR

SEQ ID NO: 51258 - protein, 131 aa, Zea mays
  Coding DNA Sequence Number=SeqID_9479
MEKTHNDSDQDGVVHQHEYEDDVEQARQRGLGVAKVDDGAEEAPRRISTSCFAGGGTEIGTEAAVMDLGCYRARLLPPRIQATSPLDIKCALSNLLADGVKVTQQTVCLTSLLENNARVPSSTLYSSSLLQ

SEQ ID NO: 51259 - protein, 683 aa, Zea mays
  Coding DNA Sequence Number=SeqID_9480
  Gene Ontology: Mol. function=DNA binding; Cellular component=nucleus; Biological process=regulation of transcription, DNA-dependent
  Homolog annotation: Hit_ID=Q5JMM1; Match level="QueryCoverage=96%, HitCoverage=79%, E-value=1e-137, Identity=45%"; Hit description =Putative ETTIN protein
  Pfam annotation: Domain name=Auxin_resp; Domain location=241-313; Score=81.5; E_value=2.6e-21; Accession=PF06507.4; Description=Auxin response factor
  Pfam annotation: Domain name=B3; Domain location=66-219; Score=50.4; E_value=6e-12; Accession=PF02362.12; Description=B3 DNA binding domain
  Pfam module annotation: Pfam domain module=Auxin_resp::B3; Domain location=241-313::66-219
MGIDLNAVGEDDPAGAADAATDEVYARLALVAMDTMFGRNINDGETEEKNGEEEDGDGEKKHASHMFCKTLTASDTSTHGGFSVPRRAAEDCFPPLDYEQLRPSQELIAKDLHGMKWSVCFFMVHMGSECALFSPKERNVMLGKCYVQELVDETGSATVIQDEFLKQEFIYCGQPRRHLLTTGWSSFINKKKLVSGDAVLFLRGNDGELRLGVRRAVQLKNEALLEAVNCTDSKLLMLSAVANSFGQQKVGASEFIVPYCKFLKSLNYHFSVGTRFKVGCENEDANERSFGLIIGISEVDPIHWPGSKWKSLLLAMYLNKLVMVFHFAVFFLGGSRITIKIKWDGATKYSHQNRVSPWDIEGVGSSVSVTHRLSSSVSKRTKLCFPPSDLDTPILDGNGRPDSVETERFHRVLQGQELVHSSIHGTACSHSSDSPRCQGSYGRRFSADAWNCKMNDVMSGPRHLNATGFAYQPLGFSESVKFSEVLQGQEMSQAVPSFMRSAFNSGTQNGRVRPFDYVQRSDATQGYALQQFNLPATEVHSPSSVLMFNQTMVPHAELDGATNREEVHGSRYLSSNAIGREAEPWPSMQQQRASVNGSEPLDTTEASAPARNAESGSVGRGAGRSNCKLFGFSLTEKILGTDGGGVKEGNYEVDRQTPRVLDLFGHGSTPGALHALCAAPLGI

SEQ ID NO: 51260 - protein, 330 aa, Zea mays
  Coding DNA Sequence Number=SeqID_9481
  Gene Ontology: Mol. function=O-methyltransferase activity; Biological process=lignin biosynthetic process
  Homolog annotation: Hit_ID=P47917; Match level="QueryCoverage=97%, HitCoverage=97%, E-value=1e-80, Identity=53%"; Hit description=O -methyltransferase ZRP4
  Pfam annotation: Domain name=Dimerisation; Domain location=34-83; Score=78.0; E_value=3e-20; Accession=PF08100.2; Description =Dimerisation domain
  Pfam annotation: Domain name=Methyltransf_2; Domain location=92-321; Score=206.2; E_value=7.6e-59; Accession=PF00891.8; Description=O -methyltransferase
  Pfam module annotation: Pfam domain module=Dimerisation::Methyltransf_ 2; Domain location=34-83::92-321
MAPAKAQHTSTNQQTLLDAQLQLWHHAFGYVKSMALKAALDLGIPDAIHQHGGSATLPQIVTELAALHPSKTPCLRRLMRVLTLTGVFGVVVQHSTTDGGSDLVYELTPASRLLVGSAPSNGPNVSPFLNMILGTAFVSSFLDLGEWFQHELPDPSPFKLAHGQHVWDMARHDASFAKLCDSGMVADSGFIMDVMVEECADGVFRGISSLVDVAGGLGGAAQAIAKAFPHIDCSVLDLPNVVAAAPTSTDVKYIAGDMFQSIPAADVVFLKWVLHDWGDAECVKILQNCKKAIPSEGGKPNEMRKSGRRSFSKPDLALTISYPFWVFDPS

SEQ ID NO: 51261 - protein, 79 aa, Zea mays
  Coding DNA Sequence Number=SeqID_9482
MAPKREDSVCSTWSIRLVDQRLLEVGEVAVDSLELVDDQLDVGIHGPQGCAESGGMAVMNLNLDPKLRTIAYCAEQWRT

SEQ ID NO: 51262 - protein, 429 aa, Zea mays
  Coding DNA Sequence Number=SeqID_9483
  Gene Ontology: Mol. function=O-methyltransferase activity; Biological process=lignin biosynthetic process
  Homolog annotation: Hit_ID=Q75IK0; Match level="QueryCoverage=81%, HitCoverage=95%, E-value=1e-124, Identity=62%"; Hit description =Putative o-methyltransferase ZRP4
  Pfam annotation: Domain name=Dimerisation; Domain location=100-148; Score=77.6; E_value=4e-20; Accession=PF08100.2; Description =Dimerisation domain
  Pfam annotation: Domain name=Methyltransf_11; Domain location=270 -363; Score=1.4; E_value=0.04; Accession=PF08241.2; Description =Methyltransferase domain
  Pfam annotation: Domain name=Methyltransf_2; Domain location=158-406; Score=351.3; E_value=1.5e-102; Accession=PF00891.8; Description=O -methyltransferase
  Pfam module annotation: Pfam domain module=Dimerisation::Methyltransf_ 11::Methyltransf_2; Domain location=100-148::270-363::158-406
  Subcellular localization annotation: CTP_CleavageSite=49; ConfidenceScore=5.07e-01
MAPRTLYDDGGSQPPYGSKRTSARTRQPRQGPPGFETPTPLHESVSGPVSEEYWEETYITPYQSIQHNSIMALTTSTNNQALLDAQLELWHTSFAFIKSMALKSAVDLGIADAIHSHGGNATLPQIVSRAALHPSKIPCLRRLMRVLTAAGIFSAAHRSPDDGGGELVYGLTPASQLLVGGSSSLAPFMSLVLHQVYVSPFLGLGTWLQHERSDPTLFEMTHGLTAWDLNDHKPAFGELFNQGMVCDSSFVMDIVVKECGDVFRGLSSLVDVAGGLGAAALAISTAFPHVQCSVLDLPHVAANAPANTSVKYIAGDMFESIPPADAVFLKWVLHDWGDADCIKILKNCKKAIPSRDAGGKVIIVDMVVGGQSSNIKHKETQVLFDLFIMTINGAERDEHEWKKIISEAGFSDYKIIPVLGVRSIIEVYP

SEQ ID NO: 51263 - protein, 288 aa, Zea mays
  Coding DNA Sequence Number=SeqID_9484
  Gene Ontology: Mol. function=O-methyltransferase activity; Biological process=lignin biosynthetic process
  Homolog annotation: Hit_ID=Q2QS38; Match level="QueryCoverage=93%, HitCoverage=76%, E-value=1e-86, Identity=60%"; Hit description=O -methyltransferase ZRP4, putative, expressed
  Pfam annotation: Domain name=Dimerisation; Domain location=34-82; Score=71.3; E_value=3e-18; Accession=PF08100.2; Description =Dimerisation domain
  Pfam annotation: Domain name=Methyltransf_2; Domain location=93-288; Score=180.2; E_value=4.9e-51; Accession=PF00891.8; Description=O -methyltransferase
  Pfam module annotation: Pfam domain module=Dimerisation::Methyltransf_ 2; Domain location=34-82::93-288
MAPANVQHTSTNQQTMLDAQLQLWHHTIGYVKSMALKAAVDLRIADAIHQHGGSATLPQIVTKVTLHPSKIPCLRRLMRVLTLTGVFSVHAGGDEPVYGLTPASRLMVSPGPNLTPFLTLLLSTFFVSSFLDLNEWFQHETGPSPFELANGRDIWALSGHDASFGKLFDDGMVADSGFIMEVVVKECGDVFRGVGSLVDVAGGLGGATQTIAKAFPDMECSVLDLSHVVANAPTDTTVKYIAGDMFESIPSANVVFLKWILHDWGDAECVKILKNCKKAIASQEEGKV

SEQ ID NO: 51264 - protein, 234 aa, Zea mays
  Coding DNA Sequence Number=SeqID_9485
  Gene Ontology: Mol. function=DNA binding; Biological process =regulation of transcription
  Homolog annotation: Hit_ID=Q8RUF2; Match level="QueryCoverage=91%, HitCoverage=54%, E-value=5e-40, Identity=44%"; Hit description =Regulatory protein-like
  Subcellular localization annotation: CTP_CleavageSite=62; ConfidenceScore=5.32e-01
MGAGLFGGSSKQSGHAVSFLLGAALPTALLFFLASDRLGEGLSTISSSWRGNGSISTAQQPAAAKPATTDAHALSAAAADASDARAAPTQDHEVEFAGLAELLARVATEDRTVIMTSVNEIWTRPNSLLDIFLGGLRGGEDTAHLVDHVLIVTVDAGSFSGCKAVHPHCYLLEVKSMDMNRAKTFGTPEYVEMIWLKLSIQQRVLELGYNFLFTARRSTDMLPAPAALSSIALS

SEQ ID NO: 51265 - protein, 124 aa, Zea mays
  Coding DNA Sequence Number=SeqID_9486
MELGAPSLPYLRAGQMGHRPSPKPPGSGEGGKSFGQRPRAESEPWGRGGGREFRRSFQGAEPEVPSPGVGAEAEFRRSFRVLSPSPSPWGSGRKRKFRRLPGAEPESEPLGVRGGSGSSSSSGS

SEQ ID NO: 51266 - protein, 519 aa, Zea mays
  Coding DNA Sequence Number=SeqID_9487
  Gene Ontology: Mol. function=nucleotide binding; Biological process =fatty acid biosynthetic process
  Homolog annotation: Hit_ID=Q8LBB2; Match level="QueryCoverage=81%, HitCoverage=97%, E-value=1e-115, Identity=53%"; Hit description=SNF1- related protein kinase regulatory subunit gamma 1
  Pfam annotation: Domain name=CBS; Domain location=276-414; Score =90.9; E_value=4e-24; Accession=PF00571.18; Description=CBS domain
  Pfam annotation: Domain name=CBS; Domain location=71-253; Score=31.3; E_value=3.3e-06; Accession=PF00571.18; Description=CBS domain
  Pfam module annotation: Pfam domain module=CBS::CBS; Domain location =276-414::71-253
MQAVRTRAEQRGAEAEATPHGSARSWSPEAEIGMRVEDIWDSLDVQQRQLSHGDKLNSCFDSIPVASFPHAFDGAQLVEIPSDATLAEAVDILSRNRIISAPVRNVDAPEDASWIDRYIGIVEFPGIASEAAATAEVGADELAAKLGTVTLEGAAAAAAAAAVTSKAAAEPEGAIAEVFGALPSSDLFNKTKVKDISGSFRWAPFLALQSSDTFLTMLLLLSKYRMKSLPVVDIGEGTISNIITQAAVVHMLSECVGLHWFEEWGTKTLSEIGLPIMRLSKIVKVREDEPALKAFRLMRRKGVGGIPVVDDSGRAVGSIMIKDVKHLLTASETNRDYRSETAACRTLTAKEFIANARQSSGERQMSIITCKRGDSVKDIILKLDAEKRQRIYVINEEGNLDGLITLRDIIAKLVYEPPGYFGDFFNGVIPLPSNSREAATHYTKGCNKLMADAVVIIPCASLNDVTTHHDRIKDDRLKYSVQVALKFTQFLSVVFRHSKDVGRSSSLYRPLSSNQVRVG

SEQ ID NO: 51267 - protein, 125 aa, Zea mays
  Coding DNA Sequence Number=SeqID_9488
MTYEPLGLRRTHDILGLGLSVQAIYRACNATSHVETQATKAKGWRGVEVVMMASGPCAAHAVCYNEHEKRRLRRVQPTQPHQVRAQVWGLHVLDELSRLWMASNDSDIVYSSGDKAKRGCNFIVT

SEQ ID NO: 51268 - protein, 168 aa, Zea mays
  Coding DNA Sequence Number=SeqID_9489
  Gene Ontology: Mol. function=DNA binding; Biological process =regulation of transcription
  Homolog annotation: Hit_ID=Q8RUF2; Match level="QueryCoverage=97%, HitCoverage=44%, E-value=9e-71, Identity=71%"; Hit description =Regulatory protein-like
MVWFRNPFQHFPVYADMSCSSDDFKPSRAPLDNPLNTGLYYIKSTHRSVEMIKYWRAARERFPGQHDQAVFVNIRHELVTKLQVRIQPLDTVYYGGICEYHDDPEKVCTIHADCCVGLDTKVHDLKAFAADWKNYTSQAPEERQKAAFKWTYPTRCRDSIGWHRRSYF

SEQ ID NO: 51269 - protein, 130 aa, Zea mays
  Coding DNA Sequence Number=SeqID_9490
  Subcellular localization annotation: CTP_CleavageSite=62; ConfidenceScore=5.53e-01
MLPPAACLAARRLLGIASASASEAAGRWVASSPIASAVNFAAASRGSVSSTRPFSTALNYVSAAEYAAVALRPTDCDGCSGLLGTRRDSRKDWEGASVVGRAGAKIPEVGRAEAGAVYALLLIVSRDSQC

SEQ ID NO: 51270 - protein, 619 aa, Zea mays
  Coding DNA Sequence Number=SeqID_9491
  Homolog annotation: Hit_ID=Q5JJJ5; Match level="QueryCoverage=42%, HitCoverage=30%, E-value=2e-93, Identity=69%"; Hit description =Putative dynamin like protein 2a
  Pfam annotation: Domain name=GED; Domain location=322-413; Score =129.5; E_value=9.5e-36; Accession=PF02212.8; Description=Dynamin GTPase effector domain
MGRSQEGVGQARSHESSRRGKAYVWAGVKPWERARRVRHGAPGEGTWCDEKREGRDGCLAQRPATGAGLLQGKCPHVGRGKAKQGLVGPDRDEARGPRAQRRAGQAMGAKPGGRDRGGAVGKAAWRVRRSRWRRRGHGLGSAGRPGGCKTGSARSCRRSACRRKSTRRRLPAEGADGWEKVAVGQAVGREGGEEKLALDGVDSQVSEKTQKSRPILGRSGVNGVVTDHIQGVRPAAEAERPGSSGSGSTSFWNQIFTSNEDRTHAPARDNTANKSYAMPAPNLDHSFSTIQLREVRCSECLTEILFEQPPVVLKPSEHQSEQEALEIAITKLLLKSYYNIVRKNVEDFIPKAIMHFLVNHTKRALHNYLITKLYRDDLLEDLLKEPDELTIKRKQIRENLKVLQQAYKTLDEIPLDAEAVERGGGYSLDSDAIGLPRAHGLSSSLHGFNDGSSSYSTPKQSSVALMKPGMISTLIILLKKYISIIQMRDAYSGSQTGEDGVFKSANETPISSGVTNRGAIVRGDLGRCIHSGGARLAISDASPLKVIQSVHSRRNMLRDRQKLGLAEKVSVITLCHIGHLIGSDDAKFLITDMSTHSEVLDQCLRFTKIQNPQGGSAFC

SEQ ID NO: 51271 - protein, 411 aa, Zea mays
  Coding DNA Sequence Number=SeqID_9492
  Gene Ontology: Mol. function=4 iron, 4 sulfur cluster binding
  Homolog annotation: Hit_ID=Q6M9M7; Match level="QueryCoverage=90%, HitCoverage=63%, E-value=9e-24, Identity=35%"; Hit description =Hypothetical RNA methyltransferase pc1998
MAWCRGAGVRSVSVTSCHGSCWEPATRRLRIAGLYLAEEDRCSGCTHEVDLDKPPVLQEVANFFKGHGVGDFTFSRGRLSQWRCRAKLAVRGTPENPLIGLYQEGTHAVIDIPECRGIDLSINGDPCLTEIDLSILVSEPAKSGRGPVRKLHLGDADVDKGTVEVPGGEGGVEVRAAGATSGPTEHTRSDTGRQGRSKEVWMNRGDAGVPLAGAARVNPLDHTHHPSINAAVKLLRQGITELSIQPFDEDAGAGELRYVQMAVTTYNTSIPVDKRYEQGKVQVSLVWNSRDERSQNAEKLTSIIEYLWTNGGPKSSVHLIHSIWANFQTSTSNIIFGHKWRHLKGERDMWERYGGVDISLDPCSFGQANTLSFNSLLHKLNKYVPRSSTVVDLYSGAGVIGLSVAASRKCR

SEQ ID NO: 51272 - protein, 94 aa, Zea mays
  Coding DNA Sequence Number=SeqID_9493
  Homolog annotation: Hit_ID=Q9LSC5; Match level="QueryCoverage=69%, HitCoverage=94%, E-value=4e-07, Identity=41%"; Hit description =Genomic DNA, chromosome 3, P1 clone: MOJ10
MRWGDGFRRASINRPPTPSAEEDRDKQPSLGEIINIKLVETGEKEKLMELLRERLAECGWRDEMKALCRSLSRKNLWIKCAWPTNWKVFSGVRE

SEQ ID NO: 51273 - protein, 93 aa, Zea mays
  Coding DNA Sequence Number=SeqID_9494
MHRRAATAVPRELEEGGLNVQASARLHELGEAGSSRAQGWYGRGGELGAEGWCEQGRELLAEGWCGRQKKGPAPYEGWVAASRARAREASRRF

SEQ ID NO: 51274 - protein, 128 aa, Zea mays
  Coding DNA Sequence Number=SeqID_9495
MARRLCPSVLPCLLQPAALAQRDVRVCALPTALHAGCLWCNLCSDKEEGVEEEFQDFDEFEDLASDLPQSAACDDDDGSINDVSNHGFWYFLNEEVVFGATYAQVKNKRKRRGGSSGVPGLRRVRGLG

SEQ ID NO: 51275 - protein, 159 aa, Zea mays
  Coding DNA Sequence Number=SeqID_9496
MLLAYVLVFLLRLSASTCHATSRNQHLLFAGRAGDSTAPVHHRHTTKVLSDYNDVHYHPAMMPSPASVELAGGIGGSPPPSLSAVEPSGVEGAPPPPPGKRDTSAPAMEPSPSPHSEGGASSSGDDDASATEQEDSAGYDLDDANVDYVGPKTHPPSHN

SEQ ID NO: 51276 - protein, 405 aa, Zea mays
  Coding DNA Sequence Number=SeqID_9497
MTVAGRREPQSRRQPGSRPVRGQQGCLLPRRDDGGDSGRRSGRRFAFAVITASKKASPPKGSMAASGYSGSAPITDQGFTVASDTERGMTKEGQRRLRHSDCSATRQSESDRQSGPAEGAMGNSAPPDPRARTRAKTRKTANSAPPDPRARTRAKTRKTANSAPPDPRARTRAKTQKTANSAPPDPRARTRAQPQKTANSAPPDPGLRLGLRRRRNSASPDPRARTPPWPRPNDLRLARPGGSGSASATEDRLDLGFGGAPTSPDLRHRPVTLRRSSDSHDITPARCQDLSGCHIGMAFLEKVGREGPRTGQALSWGRSLPSPAWTLVTPLLQAHPTWARDEHEGRGTSTSLTPVSGHLASPPFALAHALDPSGLGHAAYSLVGLGTPLSRNADRNKLQQFTYSI

SEQ ID NO: 51277 - protein, 192 aa, Zea mays
  Coding DNA Sequence Number=SeqID_9498
MQVACNHTAGAHPFGFIASSMEAQAHTSWTGKGDISKGILLREGSGPRALLLIRGSKAGPSEGFDSRPRARRARDDSGYVRYMAEPRATLSRVRLTTAKFSLRRNRKLRLARPWASASGGGLRLARPQGSAPASASDGGLRLARPQGSASTSTSGGIASSPDPGLGLMRSLRLTRPWARTNRATEEASLPYP

SEQ ID NO: 51278 - protein, 124 aa, Zea mays
  Coding DNA Sequence Number=SeqID_9499
MARLIRSTPRLSSVPDRDGATVFYSTYGGREKIKGGWILELAARITVSMGCSRGLLKKIHADSQNTAMQGDDYPWKKEGVRVERTVADFSTDDISAMHESGYFCSFLSQPPLYFTVGHDRGRKY

SEQ ID NO: 51279 - protein, 124 aa, Zea mays; identical to SEQ ID NO: 51278
  Coding DNA Sequence Number=SeqID_9500

SEQ ID NO: 51280 - protein, 206 aa, Zea mays
  Coding DNA Sequence Number=SeqID_9501
MDPHGVTDHISSVIRRRGDDDRAWEVGQCQRQSTEGKPAYTMEQRPMRGPPGTQRRSHLWWSSGRCGARLAPRGVRVCSHPRGLSGYARVAARVPRDRNRGRRCMASPTARLDADATADLGPLMHRWMRDERVEVPVDGELMVDLDGVEIQDERPWVWDQSVVGQGKAVAEREEEGGSAHLKSERKRPLGGANADSIGSGRQRQSL

SEQ ID NO: 51281 - protein, 491 aa, Zea mays
  Coding DNA Sequence Number=SeqID_9502
  Gene Ontology: Mol. function=serine-type peptidase activity; Cellular component=lysosome; Biological process=proteolysis
  Homolog annotation: Hit_ID=Q67WZ5; Match level="QueryCoverage=91%, HitCoverage=95%, E-value=0.0, Identity=66%"; Hit description =Putative prolylcarboxypeptidase isoform 1
  Pfam annotation: Domain name=Abhydrolase_1; Domain location=161-411; Score=-13.4; E_value=0.087; Accession=PF00561.10; Description =alphabeta hydrolase fold
  Pfam annotation: Domain name=Peptidase_S28; Domain location=91-471; Score=180.0; E_value=5.7e-51; Accession=PF05577.2; Description =Serine carboxypeptidase S28
  Pfam module annotation: Pfam domain module=Abhydrolase_1::Peptidase _S28; Domain location=161-411::91-471
  Subcellular localization annotation: CTP_CleavageSite=69; ConfidenceScore=5.36e-01
MAAPDARPSSAGPPPARSLLLPLLLVLLLAAYSLPADSAARPSSNSNPRPAFTPPLLKRHQLRRPSSSSAELVAGPANASTKPFTAHYFPQLLDHFAFTPNASTVFRHKYLLNDTFWRRPGAGAGDDGPGPLFVYTGNEGDIEWFATNTGFMFDIAPTFGALLVFIEHRFYGESKPFGNDSYRSAETLGYLTSTQALADFAVVIRGLKRDLGAEAAPVVVFGGSYGGMLASWFRLKYPHVAIGALASSAPILQFDHITPWSSFYDAVSQDFKSESSNCFGVIRAAWDVLDERGATDKGLLDLSKLFRACKTVKYAYSIRNWLWTAFTYTAMVDYPTPANFLENLPAYPVKEMCKTIDAFPAGADVLEKAFAAASLYYNYTGDQACNKIEDGDDPHGLDGWQWQACTEMIMPMTISNESMFPPSAFSYDDRVLKNISSSIIALVTEKGAHHLDLRSSTKGDPDWLIEQRRQEVEIIQGWIDQYHQDMAETSS

SEQ ID NO: 51282 - protein, 461 aa, Zea mays
  Coding DNA Sequence Number=SeqID_9503
  Gene Ontology: Mol. function=sequence-specific DNA binding; Cellular component=nucleus; Biological process=regulation of transcription
  Homolog annotation: Hit_ID=Q6IEQ3; Match level="QueryCoverage=73%, HitCoverage=88%, E-value=3e-71, Identity=55%"; Hit description=WRKY transcription factor 28
  Pfam annotation: Domain name=FLYWCH; Domain location=318-388; Score= -1.3; E_value=0.098; Accession=PF04500.7; Description=FLYWCH zinc finger domain
  Pfam annotation: Domain name=WRKY; Domain location=330-390; Score =133.0; E_value=8.2e-37; Accession=PF03106.6; Description=WRKY DNA -binding domain
  Pfam module annotation: Pfam domain module=FLYWCH::WRKY; Domain location=318-388::330-390
  Subcellular localization annotation: CTP_CleavageSite=20; ConfidenceScore=5.72e-01
MASSSHSLIHPSSFDMFCPRSSHDASSRLPSPTQVPELAVALRPASHSSVQPPSSTAYIFACPAGATAPLIHPCTSATPQLPPLLPSLAVPLPATSDPFPAPDPDARTSGLLYYAILAAAPMDPWIGQPSLSLDLNVGLPTAARPPATTTTAEVLVEEDFLAVKKDREVQVQALEAELRRAGEENRRLSDMLRAVVAKYAELQGQVNGMAAPVVSTAGNSAAAAAANRQSSASSDDGGSAAGSPSRKRPVRSDSLDTAPQHHNRKPPSPYAAAPAPGPDQMECTSAAVTIVAAAAAYHHEPARRIREAERKPKVSRRFVHADPSDLSLVVKDGYQWRKYGQKVTKDNPCPRAYFRCSLAPSCPVKKKVQRSADDSAVLVATYEGEHNHAPPAAARRRRQEVVRAAGGRGRATAGATAAAEARGRAVVGGREEEPRGAHGGHAHAGSRVQGGASQRALRPDP

SEQ ID NO: 51283 - protein, 102 aa, Zea mays
  Coding DNA Sequence Number=SeqID_9504
  Subcellular localization annotation: CTP_CleavageSite=73; ConfidenceScore=5.53e-01
MGRRQGPGSAGGAAAWAGRGRLASRGVLGAARSRAAWASGRRVGRGAARPGRAARQGAWVRDRMSRGGVLGVAASAWAGGSARRREAGGWGPTAGREKGGKN

SEQ ID NO: 51284 - protein, 88 aa, Zea mays
  Coding DNA Sequence Number=SeqID_9505
  Gene Ontology: Mol. function=transcription regulator activity; Cellular component=nucleus; Biological process=regulation of transcription
  Homolog annotation: Hit_ID=Q67UR9; Match level="QueryCoverage=93%, HitCoverage=20%, E-value=7e-22, Identity=51%"; Hit description =Putative TAF5
MAAIEDEEMEKKVQQYLHRKGFRLTELALHEERSRLSTSDVALTRAFFILSGTARSFFHTFREAHKVMHSRDLQKLEGILSPSHLEVI

SEQ ID NO: 51285 - protein, 329 aa, Zea mays
  Coding DNA Sequence Number=SeqID_9506
  Homolog annotation: Hit_ID=Q1ST75; Match level="QueryCoverage=99%, HitCoverage=99%, E-value=2e-99, Identity=53%"; Hit description=Hus1 -like protein
  Pfam annotation: Domain name=Hus1; Domain location=1-309; Score= -49.8; E_value=1.9e-06; Accession=PF04005.3; Description=Hus1-like protein
MKFKAFFTDDGISLLDKRFLPAMDKVGRVCHVFFTPTHAMLLHNLLGATAAGPDGGGPQCVAQFAKDLLFREYNLSSRNGNQIAFSVEVALLHRALRSVLAVHAQPPAAGDAAGAPAIQVRLVNKLPAGSRTATPFLTFETKGAHAAVVQDVPISRPLSRSDVERLHAALDAAKDLPKTLVQVPDLPQLQSLVDRLKNVGDLLTVAVTQYGDLHLQVSTSLVTVGSEFRKLRVIGDRANAPVGDQNLTSSTRMDMAVERREALSVQVNMKHLVKSLHCHLAKPDCTFYGIAPDGACLTVVFQYFIPGTRLADKSISFYCRLPVLDPGSS

SEQ ID NO: 51286 - protein, 325 aa, Zea mays
  Coding DNA Sequence Number=SeqID_9507
  Homolog annotation: Hit_ID=Q6H5X2; Match level="QueryCoverage=67%, HitCoverage=99%, E-value=3e-52, Identity=53%"; Hit description=ABA -responsive protein-like
  Pfam annotation: Domain name=GRAM; Domain location=189-280; Score =17.6; E_value=0.0037; Accession=PF02893.10; Description=GRAM domain
  Subcellular localization annotation: CTP_CleavageSite=74; ConfidenceScore=5.28e-01
MPQWTLLYYTYPVSTSSPASIEVPQLIKDTLIFPFGARSSSSQRRQPTRTPTNKPHRPTGHSSPARLATTSIAEAEAAGSSAVNSAGRKGKSLGWFQQEIEDGEGRAARACDRHPREQQGVRYRGARFPQQWPRQERSRRRRGTAPGDRGQGRPRPERARDAGPEAVRDREGQAVAGGRGSCGRGGVGKVFRRWFSSPVGGGGERLLRASQCYLSTTAGPIAGMLFVSTERVAFRSDRSLALPLTSPAGGGSGSGTTTVLRVPYKVSIPLRRVAAARPGQNRDRPEHKYVQVVTRDGFDFWFMGFVRYQASLQELEKAVAQSQSQ

SEQ ID NO: 51287 - protein, 642 aa, Zea mays
  Coding DNA Sequence Number=SeqID_9508
  Gene Ontology: Mol. function=exonuclease activity; Cellular component= intracellular; Biological process=regulation of transcription, DNA -dependent
  Homolog annotation: Hit_ID=Q6K2K4; Match level="QueryCoverage=91%, HitCoverage=80%, E-value=0.0, Identity=59%"; Hit description =Putative 5'-3' exoribonuclease
  Pfam annotation: Domain name=XRN_N; Domain location=10-201; Score =134.6; E_value=2.7e-37; Accession=PF03159.8; Description=XRN 5'-3' exonuclease N-terminus
MEKAYRGTAMGIPSFYKWVVSKYPSIISPVKDEPEECPDGIIYDNLYLDMNCIIHCCFHPQDQLTHADIDVRPPTTANEVFESMFEYMDRLFRIVRPTSLLYLAEEPPREISEVSDPNVISPGTEFMEKVSEALEYYIRARFNSDPWWRDIMVDVADKFNISVLKLSVLGINCEESLQDADLIMLALASHEVYFSILREFLNMWVLREYLEIEFKILDPVCETDIERLIDDFIFICFLMGNDFIPHIPSLKTQEGAVDLLIEVYKTTFNKMGGYITNTDKVKDKYGAYLEVSRLETFFHELSMYEDKIFLKRYDLKQDSLLETYHEMLREAPESERPELRQKLDDLLFNEENPYDSIRLGLPGWKSRFFREHFGAKTSSEIGKLQNDMAQKYLEGLCWVLQCYFADVPSWSWYYPFYVAPFVSDLKGLSRIEISFTVDKPLRPFDQLMAVLPMQRHGISEELRLSASEMVDRKLTTLESRRNTTRKEKVFLHRSSNSVPHNGGSSSLPHNEVTEQASHCSMQKLPIDSATRWSQSIFFNSGIGGWIAPAYNDGFCDGFFPSPTPNLQDITSDQTISGMFFNPEAANPVPRLLGNVRVPDKVDSRTPTVHIKLLIVPVYSQTDHGLWDTLTDYYDCHADCYGS

SEQ ID NO: 51288 - protein, 228 aa, Zea mays
  Coding DNA Sequence Number=SeqID_9509
  Homolog annotation: Hit_ID=Q4VYC7; Match level="QueryCoverage=36%, HitCoverage=63%, E-value=1e-16, Identity=46%"; Hit description =Coiled-coil-helix-coiled-coil-helix domain containing protein
MPKSDPEKATAQQHKEKKCVSALAWRSVLTVSRGYTATAEALIAAAPATAWTANTLSPSGLLPPTISAACKAGTHPPQKWRNAASDVESQATRPSEEPSPPVVEPSPPSSAPPPSSLEALAAEAMSFDEDDTEESIEMKVQKALDCPCVADLKNGPCGGQFVDAFSCFLRSTEEEKDCIKANPEAFSKEILEEEENEKEADKSNLKVRAPSWSRESNPKFKEFRVDLN

SEQ ID NO: 51289 - protein, 472 aa, Zea mays
  Coding DNA Sequence Number=SeqID_9510
  Gene Ontology: Mol. function=RNA-directed DNA polymerase activity; Cellular component=mitochondrion; Biological process=RNA-dependent DNA replication
  Homolog annotation: Hit_ID=UPI00004C1731; Match level="QueryCoverage =91%, HitCoverage=30%, E-value=1e-172, Identity=72%"; Hit description= UPI00004C1731 related cluster
  Pfam annotation: Domain name=RnaseH; Domain location=1-123; Score= -7.5; E_value=0.00029; Accession=PF00075.14; Description=RNase H
  Pfam annotation: Domain name=rve; Domain location=182-343; Score =85.8; E_value=1.3e-22; Accession=PF00665.16; Description=Integrase core domain
  Pfam module annotation: Pfam domain module=RnaseH::rve; Domain location=1-123::182-343
MFFDGSLMKTGAGAGLLFISPLGKHLRYVLRLHFPASNNVAEYEALVNGLRIAIELGVRRLDARGDSQLVIDQVMKNSHCRDPKMEAYCDEVRRLEDKFFGLELNHIARRYNETADELAKIASGRTTVPPDVFSRDLHQPSVKLDDAPEPEVPSAQPEVPSAQPEVPSAPEGEALNVEEGQSGATPDQDWQAPYLQYLRRGELPLGQVEARRKAPGGYTHLLVAIDKFSKWIEAVAFFTNIIHRFGVPNSIITDNGTQFTGKKFLDFCEDHHIRVDWAAVAHPMSNGQVERANGMILQGLKPRIYNDLNKFGKRWMKELPSVVWSLRTTPSRATGFTPFFLVYGAEAILPTDLEYGSPRARAYTEQSNQASREESLDQLEEARDRALLHSARYQQSLRRYHARGVRSRELQVGDLVLRPRQDARGRHKLTPPWEGPFVIAKVLKPGTYKLANNQGEIYGNAWNIKQLRRFYP

SEQ ID NO: 51290 - protein, 105 aa, Zea mays
  Coding DNA Sequence Number=SeqID_9511
MAPRPAANHQATAERGAEHLGRPSGAPSARAPRPPPAAPERSTGHRAEQRVERHQRARNRAQDATAREAACPCSPNSEPAPTEGQPTNPAVRSSSRVMELYCDRF

SEQ ID NO: 51291 - protein, 352 aa, Zea mays
  Coding DNA Sequence Number=SeqID_9512
  Pfam annotation: Domain name=Peptidase_M7; Domain location=128-247; Score=-13.3; E_value=0.075; Accession=PF02031.7; Description =Streptomyces extracellular neutral proteinase (M7) family
  Subcellular localization annotation: CTP_CleavageSite=72; ConfidenceScore=5.81e-01
MVSVPAREKGRAPSPVKAASSGKRYPSPRSNSPARAAASGNENAGVQSTHGPSLSRSTSRKAEQSPFRRNPMAELDENTLGNHHHHNSNGRPLKKSVDGAVVLPQKTAERTKDQISSCRTAKEIADEAVASDTKAAPARMNATHSVSIVAENVTNPRPGSRSSRRSSRDFEHNGNTYASLLLEDIQNQQQQSTSAATVAAAPTFALPACVSKACSILEAVADLNSSSSENKNFELERSVNDKESVNGRYGGKGAVTLVMESEVGVKDDLMEPSMHKYVSVRDIRGETEPQESAGSNSFAGNAWTCSWEPNSVDSADRTWTASQSYKRRRGGAVMAEQAEAVVIQGAQPRWFY

SEQ ID NO: 51292 - protein, 218 aa, Zea mays
  Coding DNA Sequence Number=SeqID_9513
MGLCFSKKQQEKRRDVQPSSDAKKSGCRKSGRDTVLVADAKKAPQAKAPALPKKAVARPEEATADKRTVFVVKAAAAAAAAEVAAAAKGRPEDAQAKRAAPEEELRPGAVGRAPVRTSSCTKEELDAILIQCGRLSRSSSSSGKAPSGEHRRYAGSKRSYDFDHERRGRWRRRRRMRLGQGGGRGGQALTAPEVARTEALVEPRWPCWQREREPEPED

SEQ ID NO: 51293 - protein, 71 aa, Zea mays
  Coding DNA Sequence Number=SeqID_9514
MPDSRTCTAGAWQRAARGEAVASGALGAGRLRAMGGGGWAIGRLRAMAAATVDPGPRRVPVAAEESPEPAL

SEQ ID NO: 51294 - protein, 125 aa, Zea mays
  Coding DNA Sequence Number=SeqID_9515
  Gene Ontology: Mol. function=kinase activity
  Homolog annotation: Hit_ID=Q6QP54; Match level="QueryCoverage=51%, HitCoverage=21%, E-value=1e-10, Identity=63%"; Hit description =Putative kinase
MGSGETETVFRRRGGLRAPGRARRRPSSEDEVESEPWGQARRRPSSEDEVESEPWGRARRRPSSGVEAESEPWGRARWRPSFEVKVESEPWPRLAWRSGQGCFSAKPARAGPRASRSFVLMGVTS

SEQ ID NO: 51295 - protein, 187 aa, Zea mays
  Coding DNA Sequence Number=SeqID_9516
  Homolog annotation: Hit_ID=Q6QP51; Match level="QueryCoverage=65%, HitCoverage=42%, E-value=1e-11, Identity=66%"; Hit description =Putative growth-regulating factor 1
  Subcellular localization annotation: CTP_CleavageSite=45; ConfidenceScore=5.13e-01
MSEGSAIGARVAVSVTNRARTVERMNGRADVKAPSTQGTRSRLARAQPRAKAADPEGFTSRLRLSLASGAIGSSASPDPRARTQPRRRTMDSASPDPRARTQPRPQTMDSASPDPRARTQPRPRKTDSASHDPRVRTQPRLRKTVSASPDPRAHTRPRPRRSLRLARPRARTDHVTGGPSLPYSKLA

SEQ ID NO: 51296 - protein, 187 aa, Zea mays
  Coding DNA Sequence Number=SeqID_9517
  Homolog annotation: Hit_ID=Q67W83; Match level="QueryCoverage=77%, HitCoverage=77%, E-value=4e-28, Identity=50%"; Hit description =Integral membrane protein-like
  Pfam annotation: Domain name=DUF588; Domain location=7-154; Score =51.3; E_value=3.3e-12; Accession=PF04535.3; Description=Domain of unknown function (DUF588)
MVAAARVVSGVKAEGLLRGACAALAAAAALLVGLSTQTETVLLVRKKATVKDVQALWVLAMAAASAAGYHLLQLLKCLYLGRRRSGRALAWTCLLLDKACAYATFATTVAAAQACVVALDGAHALQWTKLCNIYTRFCEQVAGSLALGMLAAVGTAVLSAASARNVFRLYYCSSHASPPPRETCAAH

SEQ ID NO: 51297 - protein, 494 aa, Zea mays
  Coding DNA Sequence Number=SeqID_9518
  Gene Ontology: Mol. function=RNA-directed DNA polymerase activity; Cellular component=intracellular; Biological process=RNA-dependent DNA replication
  Homolog annotation: Hit_ID=UPI00004C1733; Match level="QueryCoverage =89%, HitCoverage=41%, E-value=1e-126, Identity=51%"; Hit description= UPI00004C1733 related cluster
  Pfam annotation: Domain name=RnaseH; Domain location=187-304; Score= -12.4; E_value=0.00082; Accession=PF00075.14; Description=RNase H
  Pfam annotation: Domain name=rve; Domain location=328-492; Score =56.6; E_value=8.2e-14; Accession=PF00665.16; Description=Integrase core domain
  Pfam module annotation: Pfam domain module=RnaseH::rve; Domain location=187-304::328-492
MLLGFIVSERSIKANPEKIAAITNMGPIKDLKGVQRVMGCLTALSRFISRLGEKGLPLYRLLRKAERFTWTPEAEEALRNLKALLTNAPILVPPTVGEALLIYVAATTQVVSAAIIVERREEGHALLVQRPVYFISEVLSKTKIRYPQIQKLLYAVILTRQKLRHYFESHLVTVVSSFPLGEINQCREASGAGAGLLFISPLEKHVRYVLRLHFSASNNMAEYEALVNGLRITVELGVRRLDARGDSQLVIDQVMKNSHCRDPKMKAYCDEVRCLEDKFYGLELNHIARRYNEIADELAKIASARTMVPSNIFTRDIYQPSVKFDDAPEPDETSAVEGEAFRIEGERNGKAPRGFPHLLVAIDKFSKWIEVRPLTSIRSEQAVAFFTIIIHRFGVSNSIITDNGTQFTGKKFLDFCEDHHIRVDWAAVAHPMTNGQVERANERLSCRFDCFDSGTLKTTRVHVSGKADRAEGLLRLRDTDISLVTFRAKQLTLG

SEQ ID NO: 51298 - protein, 34 aa, Zea mays
  Coding DNA Sequence Number=SeqID_9519
MNGWAKVTHCDVVKAPKHVAQGREVANSGCILCL

SEQ ID NO: 51299 - protein, 180 aa, Zea mays
  Coding DNA Sequence Number=SeqID_9520
MPETTVHVSPQHLLLPHVLAPNLQDGTSKSLGVHVRISAIISVIPAEGMLNDGSGGILPVEEDTLQSNSTPAAEPMTRKEEFFNKISIAADEILPAPGDRLNAFVPPQPSTTAAPRRSRCIAGVGVEFNMHDWGRTMTRGQCTPAMGYSPTWAQSKEEGRWEHTYGAETTTWAVEKTKRG

SEQ ID NO: 51300 - protein, 62 aa, Zea mays
  Coding DNA Sequence Number=SeqID_9521
MAGDELPGDDRDTDGEDPFLDEQVQDKIALSGKHWGRMWREDHGCFLWMRLFAGKTTDYQSN

SEQ ID NO: 51301 - protein, 142 aa, Zea mays
  Coding DNA Sequence Number=SeqID_9522
MGKSNKRKREPTPPSEDFGDSEYSEEEFSSESEGSPTPVSSPASSDDSDDSQGIAAEVWTYIQTVERSGLEGSDESEYSSDEEDSSDSSEEGGGGDGGDDDDDDGGDGDDGDSSRGGDGGNSGGSRGGNGGGSSKGSNKASG

SEQ ID NO: 51302 - protein, 238 aa, Zea mays
  Coding DNA Sequence Number=SeqID_9523
MEDFEEFQDYDEFLFILVANPQSAACEGLVFYVSYFRTLIKPSHIEFGRSTVKPNDLELMKKLEYIGKNGEDLIRFAGIQKTRVDYEKFEEEGGGVKRKRIVSIMKRQAMRQKSSKIGCADKRTSVPPKQAPETPSTSSIGVTEILETKNKNAKEEIGRGSSGTAMEETINTSEDQVLRKKRYIKTVMKAMCKAPPSEAKKKVPVSEADKPTDAAEGTKDSGVHLGLPYLKLIGLLRM

SEQ ID NO: 51303 - protein, 158 aa, Zea mays
  Coding DNA Sequence Number=SeqID_9524
MAEAQGRLEATVAELRLHRKNTGRERGRECSAEGINEQGEVGERGAGSKGARACGGGRGLRGRGRVHGGGVGGRLGTGSDGWGAENAWARAGLGLLGRLGLKWEFELASQYKSELLEIQGPLLATTLLLLKTKLSSFCDSARCRRSIALAQTKQRRKD

SEQ ID NO: 51304 - protein, 70 aa, Zea mays
  Coding DNA Sequence Number=SeqID_9525
MPYSQEKLERPSTKGYLYPKPTQLRWKAKKAPFRGGRAISEIPLWKSSDSNLVSDPWAKGQSQVDSFYGA

SEQ ID NO: 51305 - protein, 357 aa, Zea mays
  Coding DNA Sequence Number=SeqID_9526
  Gene Ontology: Mol. function=oxidoreductase activity; Cellular component=cytoplasm; Biological process=flavonoid biosynthetic process
  Homolog annotation: Hit_ID=Q75IP9; Match level="QueryCoverage=98%, HitCoverage=97%, E-value=2e-85, Identity=47%"; Hit description =Putative carboxylate oxidase
  Pfam annotation: Domain name=2OG-FeII_Oxy; Domain location=208-309; Score=138.1; E_value=2.4e-38; Accession=PF03171.10; Description=2OG -Fe(II) oxygenase superfamily
MASESRISQVATTIPVRNVQDLAAYDAGELTADALERYIRPDIDKDAVLYEHSGELPVVDLGRLNPQHWEEEAAAKLRYACEEWGFFQVLSHGVPEEVMVNIKRDIQEFFELPLDVKNAYAQTPGDLQGYGQAYVVSNDQKLDWADMFCIISQPPPARDMKHWPTQPLTFRKSLEDYSVELEKVAHSIVTAIGKILNIDPELMSDKYAVQVLRMNYYPPCTSMPEKVLGFSPHSDASFLTILSQVNSVEGLQIRRHGAWVPVKPHPEALLVNVGDLLEIMTNGKFKSIEHRVMINARKERLSVSAFHNPKFDGVVAPVTVTPTEKLLYRTVKVEDYIKHHLSNKLDGKRALDHVKTF

SEQ ID NO: 51306 - protein, 527 aa, Zea mays
  Coding DNA Sequence Number=SeqID_9527
  Gene Ontology: Mol. function=oxidoreductase activity; Cellular component=membrane; Biological process=electron transport
  Homolog annotation: Hit_ID=Q84PV7; Match level="QueryCoverage=93%, HitCoverage=95%, E-value=1e-101, Identity=44%"; Hit description =Putative Reticuline oxidase
  Pfam annotation: Domain name=BBE; Domain location=460-516; Score =16.5; E_value=0.00065; Accession=PF08031.2; Description=Berberine and berberine like
  Pfam annotation: Domain name=FAD_binding_4; Domain location=82-232; Score=103.1; E_value=8e-28; Accession=PF01565.13; Description=FAD binding domain
  Pfam module annotation: Pfam domain module=BBE::FAD_binding_4; Domain location=460-516::82-232
  Subcellular localization annotation: CTP_CleavageSite=37; ConfidenceScore=5.37e-01
MYTNSSPTSLLLGILSILLSTHRHVIASQSPRDNGVRARSLSTCLLASGVRNFSMAGSPGYATIFDFSIQNLRFAAPGFRKPEAVVLPTSRRGLQRAVLCARSASLAIRVRSGGHSYEGQSYTVSGGVLDGKAPFVVIDLMNLNKVRVHAASATAWAESGATLGEVYHAVAHSSPSNRSSLALTAASCSTIGLGGHISGGGFGPVSRKFMLAADNVLDALLVDAVGRVLDRRAMGEDVFWAIRGGGGGSWGVVYAWKLRLVPVPDTVTVFTPRREGSVDAMAGLVYRWQFVGPALPDEFYLSASLTIGSSSSSSQEDRDLRNVAFTGLVLGPKEMAMSVLNERFPELGLAEAEVSEMSWVESAARLAGLSSVDELTSRVSKTKYYGKNKSDYVQRPISRDSLAAILRYLSDGPPAGYVTMDPYGGAMARLSATATPFPHRAGNLYALQYGVTWDSDAGEASVNYIDIDLMGFDESLGPVRLASSVSHARATWGAAYFTVENFDRLVRAKTLPMSFTMPKAYHCISGR

SEQ ID NO: 51307 - protein, 164 aa, Zea mays
  Coding DNA Sequence Number=SeqID_9528
  Subcellular localization annotation: CTP_CleavageSite=53; ConfidenceScore=5.59e-01
MARPPPAGAISSRWRPIILSGLWRSRQVLPPLPPGSGSSSSPILLSFSPLVPLAFMLVALLAAVFFLGARGIFGEGLWASCSCLANCGWRRPAVLVLALLARGIKEKEGGIGANELLSVRIVLAVVFLTKLLLALASGVVVLAILFGPGLVLLLVLGVVLAPAR

SEQ ID NO: 51308 - protein, 483 aa, Zea mays
  Coding DNA Sequence Number=SeqID_9529
  Pfam annotation: Domain name=Extensin_2; Domain location=83-389; Score=-123.3; E_value=0.017; Accession=PF04554.4; Description =Extensin-like region
MGMSLPPSFAPFPQSQTPRSLEIRQDRWRLPHALTHPRVDPVELLRKLDELRDQIIPCKIVGQPRSTDTTASTLGDSGRMVGWGLGAFIPLAYKVGDKTKWNYHKCPPRVRASAAANRARSPLPPSSARPSSPRSPPRPAPRVEIHCTPPAKPVRPSFFQPHAITAGKSASALQPHTTFGSRQPRDAAACAPRRPYQPRAVTLPMPSSRPRLRPHSRPTHPRTLAYARTRAHTRGFRLPQLPCSRLPPGPRDAAAHRACDCARCAHRPPPIPAQSPLVLKYGEEGKVVERVNLATRQLRLLPKPVVQIYGLLALDVSRDQLKVRYSIPRRQHRQDPRTTVPVASAPSPTRKTPPKGEEAEGSPRNKAPCMDDAAQTTVPVASAPSPTQKTTLKGGRRQREACGRNLHGPRRLCLWLRDPERGYCFKCNAEVLMLGKCGEDSNEGSLELICDIVSQLLDQPSVGKLSSDIALCGPMALLLESPV

SEQ ID NO: 51309 - protein, 55 aa, Zea mays
  Coding DNA Sequence Number=SeqID_9530
  Subcellular localization annotation: CTP_CleavageSite=41; ConfidenceScore=5.14e-01
MAGAAAKDLAAVVTCLPSTRWLSSTGWSCLAWRSTTRMTCSAAALPWQGWGLKLR

SEQ ID NO: 51310 - protein, 132 aa, Zea mays
  Coding DNA Sequence Number=SeqID_9531
MVGVPTSSLPLGDGRPGTSDDPATRHHLTHRPPITFPANLGDLLFNLTTMSCKSLPSPLLKPYHAQPGHGGAKIQALSPTQQLIVAQLELWMVCIVAIVARAEQEDEVRALADQAANIDVEVWAVAAHAKVH

SEQ ID NO: 51311 - protein, 384 aa, Zea mays
  Coding DNA Sequence Number=SeqID_9532
  Gene Ontology: Mol. function=nucleotide binding; Cellular component =intracellular; Biological process=multicellular organismal development
  Homolog annotation: Hit_ID=Q7XI68; Match level="QueryCoverage=99%, HitCoverage=100%, E-value=1e-159, Identity=77%"; Hit description =Putative GTP-binding protein DRG
  Pfam annotation: Domain name=Dynamin_N; Domain location=67-191; Score= -33.1; E_value=0.0081; Accession=PF00350.13; Description=Dynamin family
  Pfam annotation: Domain name=MMR_HSR1; Domain location=65-192; Score =33.5; E_value=7.4e-07; Accession=PF01926.13; Description=GTPase of unknown function
  Pfam annotation: Domain name=TGS; Domain location=308-382; Score =138.1; E_value=2.4e-38; Accession=PF02824.11; Description=TGS domain
  Pfam module annotation: Pfam domain module=Dynamin_N::MMR_HSR1::TGS; Domain location=67-191::65-192::308-382
MATVMQKIKDIEDEMARTQKNKATAHHLGLLKAKLAKLRRELLTPTSKGGGGAGEGFDVTKSGDARVGLVGFPSVGKSTLLNKLTGTFSEISQGSSKVLKMERAEEDRSLQNLNQWVPLKMTCTIDDVGFLLKATSFRVSQIDQNKADIRVISTARTCNVILIVLDAIKPITHKRLIEKELEGFGIRLNKTPPNLTFRRKDKGGINFTSTVTNTHLDLDTVKAICSEYRIHNADVSLRYDATADDLIDVIEGSRIYTPCVYVVNKIDQITLEELEILDKLPHYCPVSAHLEWNLDGLLEKVWEYLDLVRIYTKPKGLNPDYEDPVIVSSKKKTVEDFCDRIHKDMVKQFKYALVWGSSVKHKPQRVGKEHELDDEDVVQIIKKI

SEQ ID NO: 51312 - protein, 237 aa, Zea mays
  Coding DNA Sequence Number=SeqID_9533
MPHRHHDAAAGDEAPSPRPSAAGCYAFLTRSHRSAGAYRRLDSARALEAEADAAVAAVRVEVGTAAKGRARSVFHVDPAVLEAGPVRRLLAAAGRRAPGGGVAVDVDALLFEHLMWLATKARDGGGVGGDGDGDEDEGSAPAADDDLSEIVEFYSQDDEDDEEEGRDHGLSSLSFYNGYRGACGEGTHAYATHGAAGVPSPLRRSREQEPVLFLFCQARGHSGRMGIPDSSRWGNST

SEQ ID NO: 51313 - protein, 246 aa, Zea mays
  Coding DNA Sequence Number=SeqID_9534
  Homolog annotation: Hit_ID=Q75M70; Match level="QueryCoverage=39%, HitCoverage=52%, E-value=7e-07, Identity=39%"; Hit description =Expressed protein
MKEGNAGYAYVQALKGDGDGRSKQPFTAAGRQVRPHRPDGTGRHESPALAVAACCVAHSESPATTFQPRDATRRLSIATSLQQPAAMSGNRNGRGKGGAARPVATCMAAIIVCVVVLLVAASALLFLLSSSPPPATGVPGNGPPREPVELAIGLAGHERWLDALRAWAKLACFNLRRPPAEPRYHLPRSPAASVTKAAKSTLEMGKEMVEKLAESAARATEEALERTTEKVRRKVSPSARRPDGDL

SEQ ID NO: 51314 - protein, 742 aa, Zea mays
  Coding DNA Sequence Number=SeqID_9535
  Gene Ontology: Mol. function=receptor activity; Cellular component =cytoplasm; Biological process=ubiquitin cycle
  Homolog annotation: Hit_ID=Q1S9C4; Match level="QueryCoverage=92%, HitCoverage=53%, E-value=0.0, Identity=52%"; Hit description=Zinc finger, RING-type; SPla/RYanodine receptor SPRY
  Pfam annotation: Domain name=SPRY; Domain location=149-271; Score =133.5; E_value=6e-37; Accession=PF00622.18; Description=SPRY domain
MAEGSSSHRRSAFSPGLAVLLSGDEAKISSQKSHLVSYHDEIGHQAVERTIEHIFDLPHKSVVRPPGPVDTGFVHSVVRNQARKFDLDWENCIRGYHRSVFIVDKGAGQRKVVLDDSSICGSFRNVRGPSLVESSAPFSSARANACVWKGKWMYEVTLETSGVQQLGWATLSCPFTDQKGVGDADDSYSFDGRRVTKWNNDPKPYGQPWAVGDVIGCCINLDAGEISFYRNGTSLGVAFDGIRSVEPKKGYYAAVSLSEGERCHLNFGSHPFRYPVDGFDPLEAPPRSWSFVTYLLRCLFRLLEVHNLEKSESAYFEKLRRVKKFAPLQELFGPISEGICAEIFSAIEASQGCLEYIAWGSLITLLLDVFRTREPHDFSCLDQVLDLFLRFPGCTSLFQELIVALSCMCKVAPLVLTECPYSGSYPFLALVCHLLRHKDVMCLWWKAEDFVFSFEGFLTRKIPNKQDLQCLVPSVWWPGSSEDEVSMTLTMTTLSDAIKKIEEMHRELCSLVICFIPPMSTPQPPGSVFRSFVQSLVLKARGGDHRMVVNGTFNNTVLVSLYTVILHLLSEGFSMDSAGSASSSKANFGNGVGFLHKGGKRKFPTQLFFRNDAYHSVIPRIGGPPSILMHHQFDAVENEVQWDEGCMNDEETRVTHTTAQKPCCCSVTDVAVGLRYKETAKYVPSTSKGSYLVRDCCLAHTILKSYGVRLDERDVSMHRGFWDPDMDVAAVLGGGHALCLLL

SEQ ID NO: 51315 - protein, 351 aa, Zea mays
  Coding DNA Sequence Number=SeqID_9536
  Homolog annotation: Hit_ID=Q6K6Z8; Match level="QueryCoverage=99%, HitCoverage=86%, E-value=2e-89, Identity=55%"; Hit description =Hydroxyproline-rich glycoprotein-like
MRKRRKWADRLSVYFCFGSQKNGRRMRVNHAALVPEPAPQRTDAPAAEIPNHPPPPVFPFVAPPSSPASFLQSEPTSIVQSPRAGAPAFSPLSPNSQSPTGPPSIFAIGPYAHETQLVSPPVFSAFTTEPSTAPFTPPPESVHLTTPSSPEVPYAKLLTSINNSKNGEAGGDLQSYPNYPDSPIGRLISPSSGCSGTSSPFPDPEMQASSRSALRLFPVREPPKILDGEGVATQKLIPRHMRNVSTQCITGGHSSGPEKMSRSALRRRLQSPGIEARHHSTLSTPAAAACTENPGRQGQKSTSTNHTKLAREREAVPVPAPSKEFNFHNVDVGSRSRAWDRSGGRTRKSPR

SEQ ID NO: 51316 - protein, 170 aa, Zea mays
  Coding DNA Sequence Number=SeqID_9537
  Gene Ontology: Mol. function=RNA binding; Cellular component=nucleus; Biological process=rRNA processing
  Homolog annotation: Hit_ID=Q1RX21; Match level="QueryCoverage=66%, HitCoverage=36%, E-value=2e-53, Identity=91%"; Hit description =Fibrillarin
  Pfam annotation: Domain name=Fibrillarin; Domain location=1-129; Score=138.3; E_value=2.1e-38; Accession=PF01269.8; Description =Fibrillarin
PDGLVYAVEFSHRSGRDLVNMAKKRTNVIPIIEDARHPARYRMLVGMVDVIFSDVAQPDQARILALNASYFLKNGGHFVISIKANCIDSTLPAEAVFAAEVEKLKADQFKPAEQGAQEAEGHLLGSESVLVLPTKDASLYCGLLRNFEGLVKVCEPSAVKAGLAATAVRV

SEQ ID NO: 51317 - protein, 117 aa, Zea mays
  Coding DNA Sequence Number=SeqID_9538
MKGLCKLGEWVLIPWATDTDNRSGNNDEDDIFDDRMVGNRSSIVVYHSASPIRKQHVFCLRATIPAYTAILDDGFRDEDSSQKAPRVEQVSDAEICEAQILVDNNVDCETNIVVDKV

SEQ ID NO: 51318 - protein, 80 aa, Zea mays
  Coding DNA Sequence Number=SeqID_9539
MAVGRLLSHGAQDSSDLQLLLDEDLEEAEDGQFSWDGQDSSSEFPDDDDDEEGNEDIEEEADDNSDFIDRDSEAVVTMTT

SEQ ID NO: 51319 - protein, 101 aa, Zea mays
  Coding DNA Sequence Number=SeqID_9540
MASSSVIAHGDGDGCIDDRATSATTAHVNIDRVGYDDLTKLATETAMAFNSKAADAEDRAARTPSRYCRLKEDGMEFFNGTRILYSTFSLDHIILRNMPRT

SEQ ID NO: 51320 - protein, 292 aa, Zea mays
  Coding DNA Sequence Number=SeqID_9541
  Gene Ontology: Mol. function=hydrolase activity, acting on acid anhydrides, catalyzing transmembrane movement of substances; Cellular component=integral to membrane; Biological process=copper ion transport
  Homolog annotation: Hit_ID=Q655X4; Match level="QueryCoverage=64%, HitCoverage=20%, E-value=3e-84, Identity=79%"; Hit description =Putative ATP dependent copper transporter
  Pfam annotation: Domain name=E1-E2_ATPase; Domain location=40-198; Score=-63.6; E_value=9.3e-06; Accession=PF00122.10; Description=E1 -E2 ATPase
MAPRPAANHQATAERGAEHLGRPSARPPRPPPAAAERPTGRRAEQRVERRAASGAPLQRHECSRVTTSLLSPRDAAARQLELPTTAIWYKSFRHGFVFIYPFETYRQEVASIFVPIVITLSIVTFSAWFLCGWLGAYPKSWVAENSNCFVFSLMFAISVVVIACPCALGLATPTVVMVATGIGANHGVLVKGGDALERAQNVNYVVFDKTGKLTQGKAIVTAAKVFPGMDLGDFLTLVASAEASSEHPLAKAILDYALHFHFFGKLPSSKDGIEQRKDKYNCYLMLMIIGNY

SEQ ID NO: 51321 - protein, 91 aa, Zea mays
  Coding DNA Sequence Number=SeqID_9542
  Gene Ontology: Mol. function=transferase activity
  Homolog annotation: Hit_ID=Q67V33; Match level="QueryCoverage=84%, HitCoverage=27%, E-value=2e-22, Identity=66%"; Hit description =Ribosomal protein-like
MADRLQKRNALSALGFSCLQKVTATFRHLAYGVPADYVDEYLWIGESTTIESLRKFVTIACEVFGPKCLRPPNESDTARLLLLVNNMDFLE

SEQ ID NO: 51322 - protein, 521 aa, Zea mays
  Coding DNA Sequence Number=SeqID_9543
  Gene Ontology: Mol. function=oxidoreductase activity; Cellular component=integral to membrane; Biological process=electron transport
  Homolog annotation: Hit_ID=Q69MH0; Match level="QueryCoverage=95%, HitCoverage=94%, E-value=0.0, Identity=78%"; Hit description =Putative cytochrome P450 monooxygenase CYP72A5
  Pfam annotation: Domain name=p450; Domain location=38-514; Score =232.3; E_value=1e-66; Accession=PF00067.12; Description=Cytochrome P450
MALASPVLLLLLRAAWVALSCYILTPLRIRRIMARQGVHGPPPRPLIGNLRDVSALMAQATADDMPALSHDIVGRLMPHYVLWSRTYGKLFVYWYGSEPRLCLTDAAQIKEFLSSKYAANATGKSWLQRQGTRHFIGRGVLMANGAHWSHQRHVVAPAFMPDKLKGRVGHMVECTKQTIRALQDAASAPSSGGGRRREVEICGYMTRLTGDIISRTEFDTSYDTGKLIFHLLEDLQRLTASSSRHLWIPGSQYFPSKYRREIRRLNGELEAVLTESIGRRREIADEGRTTSAYGRGLLAMLLAEMEKKKDVAAAERFSYDLQLVIDECKTFFFAGHDTSALLLTWALMLLATHPEWQDRARAEVARVCGEDPPSYDDLSKLTVLQMIIHETLRLYPPATLLPRMVFEDIHLTGGLHLPRGLSVWIPVLAIHHDVSIWGPDAHEFKPERFAAGRRPAFLPFAAGPRNCVGQAYALVEAKVVLAMLLSHFRIAISDDYRHAPVNVLTLRPKHGVPVHLRPLRP

SEQ ID NO: 51323 - protein, 68 aa, Zea mays
  Coding DNA Sequence Number=SeqID_9544
MGEALLQEATVEAERLDLEIAMGTRYPKPAGVFFLRGYEFGQVIPSGFLPIAISIGPQKQLLATGIGK

SEQ ID NO: 51324 - protein, 110 aa, Zea mays
  Coding DNA Sequence Number=SeqID_9545
MSGDHAKREIVTGDKAIGSGRTLSTESDDKYKEESSSSIKSHRKGDKKKKKMKKVVYYETDSSSLSTSGTESTTSKRQERKKYTSLAKASSEGWRLRLRPNICPPRDQFD

SEQ ID NO: 51325 - protein, 59 aa, Zea mays
  Coding DNA Sequence Number=SeqID_9546
MPQATIKIQQDDKKVIANSAYEECLDEEFNSIVTALKTKLESHVSKGMDFFMMVTWFYL

SEQ ID NO: 51326 - protein, 234 aa, Zea mays
  Coding DNA Sequence Number=SeqID_9547
  Homolog annotation: Hit_ID=Q6J338; Match level="QueryCoverage=34%, HitCoverage=94%, E-value=4e-30, Identity=83%"; Hit description =Copper chaperone
  Pfam annotation: Domain name=HMA; Domain location=155-216; Score =64.7; E_value=2.9e-16; Accession=PF00403.16; Description=Heavy-metal- associated domain
MTQTYLGWPDAPPVIHGKRGLGLAFPCVFTDATGRLRFPPPPPNRPDPPPLSRYGPAKQTTRQADVRPSRKQRQAAAVRPCGSAPRRDQAASSPQPAAGGTRQPVNRTSRSAEHRSWRLERDESEAPSGWRPGGWSTGRSGLRPSRQLCGTLATVVLKVGMSCEGCVGAVKRVLGKMEGVESYDVDIMEQKVTVKGNVTPDAVLQTVSKTGKKTSFWEAEAVTSESATPAGATA

SEQ ID NO: 51327 - protein, 617 aa, Zea mays
  Coding DNA Sequence Number=SeqID_9548
  Gene Ontology: Biological process=nuclear mRNA splicing, via spliceosome
  Homolog annotation: Hit_ID=Q2QLX7; Match level="QueryCoverage=82%, HitCoverage=87%, E-value=1e-102, Identity=47%"; Hit description =Expressed protein
MATSLAMDEYAEPDVSTTDPVDKKPPAFRGLKQYVRDLDANTLPPFLARLCAPDRPSSSYSEEEILCIFETAAEAHGRSIVPHIGQIVSAVVRIMASGSSTPSHCAGCSKVVCTLSRYCIDPLGREEEKSETMSSLCRPLSDCLMHANKSVSSGSALCIAALVQSNNWQFASNELVNDVCLKVSGALEEEPRCQTAAVHVRLVLALVKHSPLTLEPYGRTLIKSGLQVLDRSSTEASSSQMIMSSIQMIHSIMRSVNVRTISSEISSIIHALEHCQEDGFAPDICAAASQAAETAKLLLMRQEERGAHRNVSPLGNCSGGNSRKGSNSPVDRAGIRDSGSSGSPRETRSVRGFDGFNSPLQGGQQCTGVLGATRARRRLWSCGSEFSQGMSDDERFFRTWAPSDSSDLVKSSRRRSDVLARIGDPCPACLTPQAANQVCSRRQALSTPRKQLQSLAYCSDSERDGHRRLPPRSALTLFTQRPDHPSFQKNSGCEGRKGCCSSTQQRRNLQWSTRTGDSLAEDLKFATSSSSSSSRRCCSDSARAPPPPPCEERRCDDAAEHRPKVTGIAKRRETNRRRSTARFFICAMVVVFAAALLLACWEQDHHPSNELYFVVPT

SEQ ID NO: 51328 - protein, 797 aa, Zea mays
  Coding DNA Sequence Number=SeqID_9549
  Homolog annotation: Hit_ID=Q6H4Z9; Match level="QueryCoverage=79%, HitCoverage=74%, E-value=9e-34, Identity=35%"; Hit description =Leucine zipper protein-like
  Pfam annotation: Domain name=DUF630; Domain location=1-60; Score =105.0; E_value=2.2e-28; Accession=PF04783.3; Description=Protein of unknown function (DUF630)
  Pfam annotation: Domain name=DUF632; Domain location=387-732; Score =338.9; E_value=8.6e-99; Accession=PF04782.3; Description=Protein of unknown function (DUF632)
  Pfam module annotation: Pfam domain module=DUF630::DUF632; Domain location=1-60::387-732
MGCAASRLEDEEAIKMCRDRRDFIKQALEQRNRFASSHIAYIESLKRVSMALQRFVAGDDHHELIFDTFISPVKQQKPETLSLPYGSYEKRTIHVSRYLRSGPNPSVSVEEHPRPVETVRVESHYPMDNHSGMDRFLQSHSSPVVSSSYYPPPYTRPSYPSPSSQEPVMNTSTYYMPYDRPRYAPPSPQEAMRTSYYASYDRPSYRPPSSQEPPRNSYHVPYDRPSFPPPSPQEQESSPWDSFWNPFSSLDSFGYPRPRSSYDNVTNDDELARLQRVREEEGIPELEEEDDECQEHVQMHRKEEQEDHDNADDDDEDDEEDDDDECEHSDEYMVSDEGTCSVNFDANMKQETKGFESKGIQCTEAPEPRKTVELELKAHKKELMRNRVANAEETPGFTVYLNRRPASLVEAMKDIDCQFSGICDAAREISVMLEASRAQYSASNDLSAKMLNPVALLRSVSSRSSSSRFLLAPSSSIDDLFDNETSSCYSEESCSTMSGSHHSTLDRLYTWEKKLYKEVKAGERLRIEYEKRLTHLRNQDVKGEEPSSVDKTCAALRSLHTRLKVSIQTVQSISTRIEILRDEELHHQLMELIQGLSRMWRAMAERHKAQKRTIEDAKLLFLQHHPSAATAISLGPLEAAGPPPAALELESEIQAWRGALEAWLFAQRAYARALAAWARRCLGISTAARPSSHALPPAFLACMEWGRAVDAATEARVMDGLDFFVAGVGSVCSGAAAGMEGMAGRVLCAGMAAVTGALAEFAAASGDSYDAAVAAVVAAARAPERGKEDGVGQVPER

SEQ ID NO: 51329 - protein, 104 aa, Zea mays
  Coding DNA Sequence Number=SeqID_9550
MPRRRISEDAHWRWRSISHFCVLLVQADARGMPTVVVARGGEGKAVTAHDFYSRSWGRFVPKIPTENHGSRASQPRTSEVVAPHYHCYYFNAQANRTPKDAQVI

SEQ ID NO: 51330 - protein, 442 aa, Zea mays
  Coding DNA Sequence Number=SeqID_9551
  Gene Ontology: Mol. function=structural constituent of ribosome; Cellular component=intracellular; Biological process=translation
  Pfam annotation: Domain name=DUF1666; Domain location=207-442; Score =458.8; E_value=6.7e-135; Accession=PF07891.2; Description=Protein of unknown function (DUF1666)
MDFFKIKKFRKGNKSARGGGEVIESDDDASAGNVTPRGLVEQKPGIGEGNNAEVAVDGGGAGNGVVEEEEDDDDDFITNEVKRRLKELRKNSFMVLIPEDECAEVEEDGDEEEGGSPTEWLESGVGDGFPLCGLDSLYDKYCESMLVFHKMIAQLMKDPESLNMSKKSPRSASKLASTLRNLSFKRKDELPEDCEQLQQQQSGYDPYQTLETAYVAHIALSWEALHCTYVHLSLIVAAQPDNPTTYNSAAQAFQQFQVLLQRFIENEPFEHGTRVEIYARSRSLLSKLLQVPTFQVVDRKDNTDDQMEPAISAHDLIKLLEESILTFRLFLKKDKRKGGVLMSAHGHTGSSIQQVQSSLDKKEAKVKELLKKRKGWKSKTWPGTVEEVQLLLALIDVKVVSRVLRVGKLSREQLLWCEEKLSKVGLTENRLRRDGSPILFPC

SEQ ID NO: 51331 - protein, 69 aa, Zea mays
  Coding DNA Sequence Number=SeqID_9552
MNSVAVEVRTAKSEGIGLSSVAPDCPVPQGDKAPTVDFAPNPNDWVTWRHTGLSGAPIASSLTNDYFGG

SEQ ID NO: 51332 - protein, 94 aa, Zea mays
  Coding DNA Sequence Number=SeqID_9553
MTVISFLRYPATAALPAVHDSTHARDWWPDSPATETPIELALRVATLLLRLLKGDSPATRLRRDRSTSGLRHRGETRTGKGTPWPRPSIPTSRA

SEQ ID NO: 51333 - protein, 74 aa, Zea mays
  Coding DNA Sequence Number=SeqID_9554
MAKLRNGVGGFTLTPLALLVWYYNAGRDETGKRGEPFVLLRLHWGPPASDLLPARTGHTGWPRIQRAEMALRGD

SEQ ID NO: 51334 - protein, 93 aa, Zea mays
  Coding DNA Sequence Number=SeqID_9555
  Subcellular localization annotation: CTP_CleavageSite=79; ConfidenceScore=5.52e-01
MTKVSPIHPSLGDFHTRSAAAPASPSLAGVACPSFVHAQPTSTSHAGAPPHRRRSAVPVIPGAGADAMDHLLLSRPHLPAMGADGDLLELDML

SEQ ID NO: 51335 - protein, 647 aa, Zea mays
  Coding DNA Sequence Number=SeqID_9556
  Gene Ontology: Mol. function=helicase activity; Cellular component =mitochondrion; Biological process=protein amino acid phosphorylation
  Homolog annotation: Hit_ID=Q654Y7; Match level="QueryCoverage=97%, HitCoverage=97%, E-value=0.0, Identity=38%"; Hit description =Putative fertility restorer
  Pfam annotation: Domain name=PPR; Domain location=145-179; Score=8.9; E_value=0.67; Accession=PF01535.11; Description=PPR repeat
  Pfam annotation: Domain name=PPR; Domain location=180-214; Score =38.6; E_value=2.2e-08; Accession=PF01535.11; Description=PPR repeat
  Pfam annotation: Domain name=PPR; Domain location=215-249; Score =29.1; E_value=1.5e-05; Accession=PF01535.11; Description=PPR repeat
  Pfam annotation: Domain name=PPR; Domain location=250-284; Score =33.5; E_value=7.1e-07; Accession=PF01535.11; Description=PPR repeat
  Pfam annotation: Domain name=PPR; Domain location=285-319; Score =44.5; E_value=3.5e-10; Accession=PF01535.11; Description=PPR repeat
  Pfam annotation: Domain name=PPR; Domain location=320-354; Score =49.3; E_value=1.3e-11; Accession=PF01535.11; Description=PPR repeat
  Pfam annotation: Domain name=PPR; Domain location=355-388; Score =22.7; E_value=0.0013; Accession=PF01535.11; Description=PPR repeat
  Pfam annotation: Domain name=PPR; Domain location=389-423; Score =39.2; E_value=1.4e-08; Accession=PF01535.11; Description=PPR repeat
  Pfam annotation: Domain name=PPR; Domain location=424-458; Score =27.3; E_value=5.3e-05; Accession=PF01535.11; Description=PPR repeat
  Pfam annotation: Domain name=PPR; Domain location=459-493; Score =52.7; E_value=1.2e-12; Accession=PF01535.11; Description=PPR repeat
  Pfam annotation: Domain name=PPR; Domain location=494-528; Score =31.3; E_value=3.3e-06; Accession=PF01535.11; Description=PPR repeat
  Pfam annotation: Domain name=PPR; Domain location=529-563; Score =42.1; E_value=1.9e-09; Accession=PF01535.11; Description=PPR repeat
  Pfam annotation: Domain name=PPR; Domain location=564-598; Score=6.6; E_value=1.2; Accession=PF01535.11; Description=PPR repeat
  Pfam annotation: Domain name=PPR; Domain location=606-640; Score =38.7; E_value=2e-08; Accession=PF01535.11; Description=PPR repeat
  Pfam module annotation: Pfam domain module=PPR::PPR::PPR::PPR::PPR::PP R::PPR::PPR::PPR::PPR::PPR::PPR::PPR::PPR; Domain location=145 -179::180-214::215-249::250-284::285-319::320-354::355-388::389
  Pfam module annotation: Domain location=494-528::529-563::564 -598::606-640
  Subcellular localization annotation: CTP_CleavageSite=23; ConfidenceScore=5.14e-01
MRRLPPLPRPAAAVASTSTPDIVAELGRVLSTRRWNKGSAYKRLSPSVTAAHVADLFRAPVSPLDPATALAFFECVARRPGFRHTAASHAALLQLLARRRAPANYDKLVLSMISCSGTAEDVREAVDAIQAIRRVGGKRLVLSPKCYNLALRSLLRFDMTEYMGKLYSHLVQEGLLPDTVTYNTMIMAYCKKGSLAIAHRYFCLLRESGMQMDTYTCNALLLGYCRTSDLRKACWLLMMMPLMGCRRNEYSYTILIQGLCEARCVREALVLVFMMVHDGCSLNLHTYTLLIKGLCKEGRIHDARGLLDEMPLRGVVPSVWTYNAMIDGYCKSGRMKDALGIKALMEQNGCNPDDWTYNSLIYGLCGGKLDEAEELLNGAIARGFTPTVITFTNLINGYCKAERIDDALRVKSNMISSNCKLDLQAYGVLINVLIKKCRLKEAKETLNEMFANGLAPNVVTYTSIIDGYCKVGMVGAALEVFKLMEHEGCHPNAWTYGSLIYGLIQDKKLHKAMALITKMQEDGITPGVITYTTLIQGQCKKHEFDNAFRLFEMMEQNGLTPDEQAYNVLTDALCKSGRAEEAYSFLVRKGVVLTKMTVSGVKCNIVAYTIIISEMIKEGKHDHAKSLFNEMISSGHKPSATTYTGIH

SEQ ID NO: 51336 - protein, 361 aa, Zea mays
  Coding DNA Sequence Number=SeqID_9557
  Homolog annotation: Hit_ID=Q6ZGD1; Match level="QueryCoverage=62%, HitCoverage=23%, E-value=5e-67, Identity=59%"; Hit description=DENN (AEX-3) domain-containing protein-like
MVDKNDGSEGIKFNTSNLIQTTEEVARAFIAAASAATAQSARTSVVYSSKDESGSPMQKLQQHFSKIMKGFSSAPDLSGTYNPEVLTTQKRQWSRYQMKSLVTTFRRLEFIAGMGIRSGSEIHREQASGRRKKGDRCIREPSHLFESIVIVGLPPHADIQELENIALGRNDEDGKRSKNLFGNSHHQVHAITNLEPQVLFAYPPEKPLPLKYKDTLSFCLPGGVQLAVRWGELVPTPVTWKVSVAWWATSSLRKGGSIVLASGSIRFFGRSVSGCIDMGAQSSVLRRFYGCGCGGHCGGWSDVKSVPVKVSACGGMTVAERAVREAVVALSCSGVVATACWVVCLVAVDSIVGVVSVAARQ

SEQ ID NO: 51337 - protein, 359 aa, Zea mays
  Coding DNA Sequence Number=SeqID_9558
  Homolog annotation: Hit_ID=Q6ZGD1; Match level="QueryCoverage=91%, HitCoverage=39%, E-value=1e-132, Identity=73%"; Hit description=DENN (AEX-3) domain-containing protein-like
  Pfam annotation: Domain name=DENN; Domain location=42-206; Score= -87.2; E_value=0.089; Accession=PF02141.11; Description=DENN (AEX-3) domain
SQGSPSEGRNFDTQESDSEEPSSIGDGDLVKHNNILQWAKAKKYGSLQVVCQYYQLQCPARGSTLAFHPLEHLHSLSFHRPGETVLHIAGSTIELRSRDTSLEVAEMRNALFAEEESTALSTWAVASICGCLRLEHTHSLNLLKYSFCTENTIKNPLYHKKANIVLPNDMMDFLDAPVPYIVGVQNKTSDVLNRLTNAVVIDANRNQVLVTVNGEEIGLTLDFVLIKSSSVPQLPQHRELLSALRPYHSILVGESYLARKRPVYECTDAQVEGAKGFLAVLRDYLDTLCSNLRSHTITNVQSNNDKVSLLLKESFIGSFPSRDRPFMKPLDVELNCTYRQLSVCAKSSKEKPYTVRKKW

SEQ ID NO: 51338 - protein, 74 aa, Zea mays
  Coding DNA Sequence Number=SeqID_9559
  Homolog annotation: Hit_ID=UPI00004C1734; Match level="QueryCoverage =56%, HitCoverage=11%, E-value=1e-09, Identity=66%"; Hit description =UPI00004C1734 related cluster
MNAVVTSHLLVCLYSTAAFENKSPTSLKPTKGLDVFMAKTKKACDLVSDLEIAFACLQAKSVRLNPEKCVFGVP

SEQ ID NO: 51339 - protein, 454 aa, Zea mays
  Coding DNA Sequence Number=SeqID_9560
MPPGRGSQGIRTPLGTSVLGFCSPWRHAICHAKPERLWRRHANANAMTVLLRPPLNGHPSSWPRSPCIEQGNQGSKRKILQRQLLEEWEAQDQETLTAPEYTHLISLEPNCRPNNSLRPSDRRSIYIYSVFRDLTSPNFVKSSASDALDELAQESAQPPRSLWASTTHLAPAPTRPLPYLVSPRPRGTNPVGQPSPANLAPSTTQDPAPIPAPLPTSTLLSLTAPTAHHASPPVFGALASPTFSPRRRYWLPPPTTPPSSSSLVPTAGSTAPSLILAFMAARRWPATAVFVHVTPPPALHLSLLGSTALWKPTWPDVLAVPRMPHPTSCSATVERQHPLPLGETESLERAKETGVMEATDHRRLRHEVPVDRRYGLISVPEVTVEPRVPQSWLSLDAAALPGAWTAVEVRSPQRRSLRASAGLGERRAERTQRNQETETNEETQEETGAILTLR

SEQ ID NO: 51340 - protein, 366 aa, Zea mays
  Coding DNA Sequence Number=SeqID_9561
  Gene Ontology: Mol. function=DNA binding
  Homolog annotation: Hit_ID=Q9LGH0; Match level="QueryCoverage=90%, HitCoverage=96%, E-value=4e-49, Identity=32%"; Hit description=NAM -like protein-like
  Pfam annotation: Domain name=Isy1; Domain location=133-366; Score= -128.2; E_value=0.039; Accession=PF06246.3; Description=Isy1-like splicing family
MATRKQMDKTSQAALLSSSSVGADLVGDEHTTGYYTSLLSEGTNLQDYDDLVDLYPEEQPQRVEVNTYAPSARPNHKRSKNFSDVEDELLVSAWLNISLDPIIGYNQTRSSYWTRIYDYFHANKTFSSTRSQNSIMHRWASIQEGVNRFTGCLAQVERRRQSCATMQDKLTQACALYKSEDKQHKAFPYMHCWNKLRTHRKWEMKLEELAVGKSSNKKQKMNSNETSPPHLPSVTETSGPTTPNETVTTRPPVKKKAKAAAFQAEKKGYTETLNKLFEKKKETDEFKEMKKDERFRLALAVEQERAVNEKLNMELRSKELELRQQEVEQHKKREEERIMTLDLSVMPADQKQYYMRLRSKILSENA

SEQ ID NO: 51341 - protein, 57 aa, Zea mays
  Coding DNA Sequence Number=SeqID_9562
  Homolog annotation: Hit_ID=O64568; Match level="QueryCoverage=68%, HitCoverage=38%, E-value=3e-13, Identity=82%"; Hit description =Expressed protein
MGSKDIIRYLCERFLHGGIFFAVLGGVMFIPGFYYTRIAYYAYKGYKGFTFSNIPPI

SEQ ID NO: 51342 - protein, 57 aa, Zea mays
  Coding DNA Sequence Number=SeqID_9563
MATAGQRYYNSEGGRAATSLIPNMNQIPALSNARGVTFYPPEKEFVLEFDHSKQNIQ

SEQ ID NO: 51343 - protein, 347 aa, Zea mays
  Coding DNA Sequence Number=SeqID_9564
  Homolog annotation: Hit_ID=Q9FHY3; Match level="QueryCoverage=12%, HitCoverage=27%, E-value=4e-17, Identity=86%"; Hit description =Arabidopsis thaliana genomic DNA, chromosome 5, P1 clone:MJC20
  Pfam annotation: Domain name=ORMDL; Domain location=16-125; Score =13.6; E_value=8.2e-09; Accession=PF04061.5; Description=ORMDL family
MWLGEQSQFFSQISAMQLSTQSFMSSGHRQISLLPQLHWQNYFTKLCIKITYHFFHWKKGTPFADDQGMYNALTWWEQMDNGKQLTRNRKFLIVVHVVLYVVDGREAGHGWRGASRGAAISIGRRRGVDVGAAGGALAIHVEEAGMHVEVGALDNEEGGGDTRTFRYLAKDAMRFGDSAENTGKTAGTRGGSRIRWHGREEARIGGVRFLQWTEEGRSAHLVVFVAGNRPDEDPAKGPTKALGIGQRTPNCDLVNGCLGRRGHRFRPRRQHRSWHHRRGRPLASGHGRRRLDEGRAGEEGVAMDDWAMDECWRIQPREGDGRADGGPRIERRGFVMNDGGGGTDGVD

SEQ ID NO: 51344 - protein, 57 aa, Zea mays
  Coding DNA Sequence Number=SeqID_9565
MKLVAGEVKGTKTSLLPMAPALRLLEGSSAVICDEENRDWEGELAWARPEPTRLTRR

SEQ ID NO: 51345 - protein, 380 aa, Zea mays
  Coding DNA Sequence Number=SeqID_9566
  Gene Ontology: Mol. function=catalytic activity; Cellular component =plastoglobule; Biological process=cellular metabolic process
  Homolog annotation: Hit_ID=Q2QSR7; Match level="QueryCoverage=71%, HitCoverage=72%, E-value=1e-141, Identity=87%"; Hit description=RNA binding protein, putative, expressed
  Pfam annotation: Domain name=3Beta_HSD; Domain location=88-304; Score= -149.7; E_value=0.063; Accession=PF01073.9; Description=3-beta hydroxysteroid dehydrogenaseisomerase family
  Pfam annotation: Domain name=Epimerase; Domain location=84-276; Score= -26.0; E_value=0.00018; Accession=PF01370.11; Description=NAD dependent epimerasedehydratase family
  Pfam module annotation: Pfam domain module=3Beta_HSD::Epimerase; Domain location=88-304::84-276
MNPNTQIILDEISRRCVDHDAKWDRHVSKQESRWDTAFSKFTSGQEGLVNALEKATVIDGGSSRFLSPTAVERPPVGSPTNSPHGRCVDLCIRRMDLGQSPPFFILRSRVLHLKGDRQDFEFVKTSLAANGYDVVYDINGREAVQVEPIIEALPNLQQYIYCSSAGVYLKSDILPHCEVVDAVDPKSRHKGKLETESLLTSRGVNWTSIRPVYIYGPLNYNPVEEWFFHRLKAGRPIPIPGAGNQITQLGHVKDLARAFNLVLGNPKASKQIFNISGAKYVTFDGLARACAKAGGFPEPELVHYNPKEFDFGKKKAFPFRDQHFFASVEKATSELGWTPEFDLVQGLTNSYNLDFGRGTFRKEADFTTDDMILDKKLATV

SEQ ID NO: 51346 - protein, 132 aa, Zea mays
  Coding DNA Sequence Number=SeqID_9567
  Gene Ontology: Mol. function=protein binding; Cellular component =intracellular
  Homolog annotation: Hit_ID=Q01FY7; Match level="QueryCoverage=74%, HitCoverage=41%, E-value=1e-25, Identity=58%"; Hit description=[R] KOG3157 Proline synthetase co-transcribed protein
MSRCPSLPRAQSLPRLSQNRRFSDTMMLPVLAKIGVDPSGCVELAKHVRLNNPNLVLSGLMIIGMLDYSSTPKNFKALANCQEDVCKELGIPEEQLELFVDMSSDFEQTIEMGSTNVRVGSTIFGAREYPKN

SEQ ID NO: 51347 - protein, 232 aa, Zea mays
  Coding DNA Sequence Number=SeqID_9568
  Homolog annotation: Hit_ID=Q6Z341; Match level="QueryCoverage=40%, HitCoverage=18%, E-value=8e-37, Identity=79%"; Hit description =Putative auxin-independent growth promoter
  Pfam annotation: Domain name=DUF246; Domain location=66-232; Score= -155.9; E_value=1.4e-05; Accession=PF03138.5; Description=Plant protein family
MLPPCRFIDKSGTHVIDGVKMGGKDVYQKYFGKGTCKGAGIFVPNIDCFNEESEHGLTVANTSSILAFALLNQICDMVAIARSLNVTSIVPELDKTSFWNDPSEFQDIFDVEHFIISLRDEVRILRELPPRVKQRVELGNIHSVPPVSWLDISYYHKKVRDVRCHELLCPYPIHRIFTIWPKADHFILYRFYMQFGNKRSSEPEIRLMDWMRDAFPLNTEAISDRLRFSGVT

SEQ ID NO: 51348 - protein, 281 aa, Zea mays
  Coding DNA Sequence Number=SeqID_9569
  Homolog annotation: Hit_ID=Q67BC7; Match level="QueryCoverage=15%, HitCoverage=4%, E-value=3e-17, Identity=93%"; Hit description =Cellulose synthase catalytic subunit 12
MAPPKLHDGGGSQLSYGSSHDITPAGCQDLSGCHIGMAFLEKVGRAGPRTGQALSWGRSLPSPAWTLVTPLLQAHPTWARDEHEGCGTSTSLTPVSVHLASPPFALAHALDPSGLGHAAHSLVGLGTPRSRNADNDEEDGLVGKDLRTRLAPARCGRLCQRTRPAPTRRGRPRPLLSPTRPPPAPPAVAALLYGYKNNNLKWLERFAYINTTIYPFALLPLLAYCTLPAVCLLTGKKQKQELMDYVTQPAATQTSRDSPATHSPATPESNLFGAKLSNKWR

SEQ ID NO: 51349 - protein, 56 aa, Zea mays
  Coding DNA Sequence Number=SeqID_9570
MTISGARISQVRAYLVRATKATLMVSSRCPRSYTTDLVGGALKEEAKEKGRPRVAS

SEQ ID NO: 51350 - protein, 118 aa, Zea mays
  Coding DNA Sequence Number=SeqID_9571
  Subcellular localization annotation: CTP_CleavageSite=65; ConfidenceScore=5.56e-01
MSRLQARSFRRKSPHSHNNKAPRRWPSRLVDGFTRMLVGLFSFPPRPPKVTFTVDDHRPGARVVRPGADGGAGDASKLSLSSSSNLDPLNAHYDEAIADCVEFFNKSARVDLCSRPHF

SEQ ID NO: 51351 - protein, 149 aa, Zea mays
  Coding DNA Sequence Number=SeqID_9572
  Homolog annotation: Hit_ID=Q6QP51; Match level="QueryCoverage=32%, HitCoverage=22%, E-value=6e-15, Identity=77%"; Hit description =Putative growth-regulating factor 1
MQAACNYTKGAHPFDFDASSMEAHTSCNRHAGYYVRETAPPLASVPRLLDCGTGAATRGNPAHGPTVSTEHIDHGDRERGYSERDPSPRRKRAPSPPTDQRFEGWPLRRVRQPPQSTRAPHPLLVRGSKAGPSEGFDSRLRPLGLRAHY

SEQ ID NO: 51352 - protein, 98 aa, Zea mays
  Coding DNA Sequence Number=SeqID_9573
MGIRGFGREANFRREIAAPPITNVQLARLFRCGAHPRQPRARNRCLAMAYEHAHGGGRTAHDDEQVLDAPIRAGEKGGKSTVLFIHRRQSPSGSRRDF

SEQ ID NO: 51353 - protein, 96 aa, Zea mays
  Coding DNA Sequence Number=SeqID_9574
MGIRGFGREANFRREIAAPPITNVQLARLFRCDAHPRQPRARNRCLEMAYEHAHGGGRTAHDDEQVLDAPIRAGEKGGKSTVLFIHRRRSPSGSRR

SEQ ID NO: 51354 - protein, 408 aa, Zea mays
  Coding DNA Sequence Number=SeqID_9575
  Gene Ontology: Mol. function=binding; Cellular component=COPI vesicle coat; Biological process=protein targeting
  Homolog annotation: Hit_ID=Q76LD1; Match level="QueryCoverage=40%, HitCoverage=20%, E-value=5e-13, Identity=27%"; Hit description =Coatomer subunit beta
MENTAPCGDFGKIVADLESENLVANVSAVNQASALIAGGKIPEPQLLCRLIAGLASNLEKPDHDSAIKRCVSFTLKAIRVAVIKNRMNMDSSARDALLSLPPVVPGFSFAIARAYCHMLATVSPQSPLEGFSDLAVDVLAALSNCNLAVRKNLLNLMVRLLTPRNISAVLLLLDNELNRAANIHIEYHKMLEEAIRECHAAFPGCIVEFTLDPKYSVFIDSILYIIDIMNPDQSLRGPLLKGLLRALRHVKSPLVCAAAVWAISMFSGSLEEVSDAIVALSCFFKDLLDRRKIEKLILGGEAENQYKLSTDYYGVTAGDATQGKHQQPWLMEMEELLFVRIGLTRQAGGSYAIPSSSKSSASSSNAYLPEPLGNTDNLIFLVHSGDALLADFVEIMLSNLKKKVKELE

SEQ ID NO: 51355 - protein, 102 aa, Zea mays
  Coding DNA Sequence Number=SeqID_9576
  Subcellular localization annotation: CTP_CleavageSite=80; ConfidenceScore=5.05e-01
MMRHASWRVATKPGRLESRTVAWKSLQQGIRSPPTGFVGVAFRPAATYILAGVSLSTMHIKRTSIKQFRRTITFYLGSTRMPNAGGYCWSEDEASPRSPSFY

SEQ ID NO: 51356 - protein, 660 aa, Zea mays
  Coding DNA Sequence Number=SeqID_9577
  Gene Ontology: Mol. function=phosphoric monoester hydrolase activity
  Homolog annotation: Hit_ID=Q84K83; Match level="QueryCoverage=72%, HitCoverage=99%, E-value=1e-148, Identity=60%"; Hit description =Putative NLI interacting factor
  Pfam annotation: Domain name=NIF; Domain location=430-640; Score =211.9; E_value=1.4e-60; Accession=PF03031.8; Description=NLI interacting factor-like phosphatase
MAPVFRLASVRDFGCVGPWLRGSNVNLLRRSDTAKIFKNSTHRSYKHKVRPKLYLKFSCADKARLVGRQRARKHNLLAVLVHASPCALADESSHLDTVEPVAIRATVGLTDHLQRTDLGLPFTAHEHDLLGRAPLRGGKQARRRSRATEGGGGHEQQKVAARRRLQGWGRSCFELYFIITMQTRKKGAAKNAVGYHANPKTSRPSRRATQSTVAEKKVSDLITSSSKKQRPVGVTSKKHSKGGRKLLVSCDTTDAGNDAPQVPPSVFPDLQAQHSDGVADDRPNDSIFSPTYHHHKEGGVNNLSKGLEEQTTHVHGSKEASLKSGSNLACNTHDGINDHSGTLKLQSAGQSTLLEVDEYSELGNLSSEVSAIYLAMQQSKLECIDEQSQDSTSTEGYGEAEETEEYDDFDPYSFIKDLPDLSMVVPKFRPVLLPKQTRSCPTMTLVLDLDETLVHSTLEHCEDADFTFPVHFNFREHTIYVRCRPYLKEFLDRVASVFETIIFTASQSIYAEQLLNVLDPKRKLFRHRVYRESCVYVEGNYMKDLTVLGRDLTRVMIVDNSPQLEHAMNKDVLVWNSCMSWFMDLNVKPLSSLQAFGFQLDNGIPIESWFDDPNDMELLKLLPFLESLVGVEDVRPYIARKFNLREKVATASSLTIDMQM

SEQ ID NO: 51357 - protein, 101 aa, Zea mays
  Coding DNA Sequence Number=SeqID_9578
MAIEPCHAIVYNSPHCSCRPWLDERGQAQAPSRSRHMVFTSHHRYTMFSPLLAGLTVATPLLVIVVSGLAAVPPPPQIPSQDVRLAVVTFLYEAGQRGLRV

SEQ ID NO: 51358 - protein, 47 aa, Zea mays
  Coding DNA Sequence Number=SeqID_9579
MATLTKVRDPVTTIGRTYFLCRIAHRERQCPEVIPNIYSTLCGGLKP

SEQ ID NO: 51359 - protein, 140 aa, Zea mays
  Coding DNA Sequence Number=SeqID_9580
  Homolog annotation: Hit_ID=Q941W8; Match level="QueryCoverage=26%, HitCoverage=17%, E-value=2e-10, Identity=86%"; Hit description=Bet v I allergen-like
MVVESYVVDVPPGNTVEETRIFVDTIVRCNLQSLEGTRRLRGNSLVLINPGTTLGPFFLHHQSEYSAAAPERIKEDKTRLVHESKGGLQEVDLFGRWFRSFRCDDHQEGRRLLQKQRAHLGHVNMFSCMSVILRTATSNT

SEQ ID NO: 51360 - protein, 473 aa, Zea mays
  Coding DNA Sequence Number=SeqID_9581
  Gene Ontology: Mol. function=structural molecule activity; Cellular component=ubiquitin ligase complex; Biological process=regulation of transcription, DNA-dependent
  Homolog annotation: Hit_ID=Q941V9; Match level="QueryCoverage=79%, HitCoverage=87%, E-value=1e-143, Identity=73%"; Hit description =Protein kinase-like
  Pfam annotation: Domain name=Ank; Domain location=213-245; Score =24.2; E_value=0.00046; Accession=PF00023.20; Description=Ankyrin repeat
  Pfam annotation: Domain name=Ank; Domain location=267-299; Score=0.7; E_value=25; Accession=PF00023.20; Description=Ankyrin repeat
  Pfam annotation: Domain name=Ank; Domain location=300-333; Score =16.8; E_value=0.076; Accession=PF00023.20; Description=Ankyrin repeat
  Pfam annotation: Domain name=Ank; Domain location=334-366; Score =39.7; E_value=1e-08; Accession=PF00023.20; Description=Ankyrin repeat
  Pfam annotation: Domain name=Ank; Domain location=367-399; Score =19.3; E_value=0.014; Accession=PF00023.20; Description=Ankyrin repeat
  Pfam annotation: Domain name=Motile_Sperm; Domain location=16-121; Score=32.5; E_value=1.5e-06; Accession=PF00635.16; Description=MSP (Major sperm protein) domain
  Pfam module annotation: Pfam domain module=Ank::Ank::Ank::Ank::Ank::Mo tile_Sperm; Domain location=213-245::267-299::300-333::334-366::367 -399::16-121
MAAAEAASSAPAPEHLLEVEDDEVMIDFKPNAKCRADLRLRSLHPSLPVAFKVQTSSPLKFLVSPPRGAVPPLSSASLRVVLRPQPHAPPSFPRSRADRFLVLSSLSAARLDSVGSSNDGGGGGGGVRAVRLRVFFGGPYLLRLAADAGDAAAVRLILRRQPHLLPFLEHQQAAAAPDAGEQQWAPLHAAAARGDCGELRRLGPEALAARDREGRTVLHAVAAAGEAEAVAVLVDMGADTSAVDARGRTPLDVARDKGYQEVVDVLERWELVMTAARRGDLGSLESLLSKRAGVRGRDQYGLTALHLAAIKGHGDAIALLAGPGCMDVECEDVEGHRPLHLAVEGGHAEAVELLLDMGADANARTRRGATPLQMAEAMGYEAIAQLLCARGAEVAAASALCAASSSSSSISDAGAGTELDGPFSMEMRVWEIEGNGGRTPTRTMLSTLWATATWPYKLGWKCVVCSLLERIKP

SEQ ID NO: 51361 - protein, 153 aa, Zea mays
  Coding DNA Sequence Number=SeqID_9582
  Subcellular localization annotation: CTP_CleavageSite=25; ConfidenceScore=5.64e-01
MWLPWVKTRPSSATSTSPTSTALVAAAAAASPRLSFSSPSLKDLQALLLSDAATPSPPPAAPCSPSSRVRVFHRVRVAASALRGGPDPSRGPPPAGAPFLPRPPKTPSWFNLPSSPGGFPGTTKGMGGAGAPPPAGGSQSPSKKGEPSHENPP

SEQ ID NO: 51362 - protein, 413 aa, Zea mays
  Coding DNA Sequence Number=SeqID_9583
  Gene Ontology: Mol. function=oxidoreductase activity; Cellular component=extracellular region; Biological process=antigen processing and presentation of exogenous peptide antigen via MHC class II
  Homolog annotation: Hit_ID=Q5QLT3; Match level="QueryCoverage=59%, HitCoverage=78%, E-value=1e-87, Identity=63%"; Hit description =Putative legumaturain
  Pfam annotation: Domain name=GILT; Domain location=33-189; Score =69.3; E_value=1.3e-17; Accession=PF03227.6; Description=Gamma interferon inducible lysosomal thiol reductase (GILT)
MASRPPLHRRRRLPLVPLLVLLCLSPGCAAGRVPVSVYYETLCPFCSAFVVNDLSRIFRDGIFSIADLRLVPFGNGRVSADGTVTCQVSSVPDTVSFSLFLELGMWLCAFLKKSNCKFERHQLDHSNGQLLVLQHGEDECQLNAIEACVIRIWPDAEQHFPFIQCVEHLALTRKWDAWQSCFHETGLAYQPAIDCYNSGYGRQLVLQYAAETNALQPPHRFVPWVVVNGKPLGDKSSLIQRLQDYMNFEAYICSAYDGKLPKACKGKHLAIAQETKASRGDKTSLKSIRPKRNRDWHTSKYRPTVCSYFFKTNRAAELPNILIKRKVHKVQHKPRKKSSYGHNLIGAKGLECAKNGALDTVRCTRAVQLQTSHFRENGGMLRYNSPDCPCKFELTPIRHSQSERELGLHLVPN

SEQ ID NO: 51363 - protein, 232 aa, Zea mays
  Coding DNA Sequence Number=SeqID_9584
MGIKTEQRKFARAAERNWEATTLEKLHEGSRGREQNKEQEPGRASRETGTTASRLRLCARDAKDPRSHPSKCAASVGLTLYARARNAANRGRNVVRTPANSKEQRTTSREGEKRDSWALGHGTDAGEMSSRGQGDGNSAMEDEQSARELGTSARETEHAQQALVSSRGATDNSVTHREMEEGPLGHPWLGCAGTHQGQGAGERVQGVAGGTEQGAPARGARNTEMKRAQGKG

SEQ ID NO: 51364 - protein, 166 aa, Zea mays
  Coding DNA Sequence Number=SeqID_9585
  Gene Ontology: Mol. function=ATP binding; Biological process=defense response
  Homolog annotation: Hit_ID=Q5ZAJ8; Match level="QueryCoverage=38%, HitCoverage=6%, E-value=1e-15, Identity=59%"; Hit description =Putative powdery mildew resistance protein PM3b
MARTLGFPTAGADLEEHGCGARLYNPLARRERLAEIVGGFVLTSSDLGGLLSTPARILGKRRTHGEEHVIQFEGDGSDQTGPTWQGLGKTTLAQLIYNDPQVKEHFHLLKWVCVSDDFSVRILANKICNTSEAVLEDALKKLQEHLKGKSTSMNHKIKVAQNFDEF

SEQ ID NO: 51365 - protein, 99 aa, Zea mays
  Coding DNA Sequence Number=SeqID_9586
MGKRLATTAEWFERRRSTVAARGFERRSTVAAWGGGGGRAGARPVQGRCAKRGRARSSGTGPARRSGTGEGGEQRRGGQTGGGVARSGDRERKKRRRVV

SEQ ID NO: 51366 - protein, 467 aa, Zea mays
  Coding DNA Sequence Number=SeqID_9587
  Gene Ontology: Mol. function=carboxypeptidase activity
  Homolog annotation: Hit_ID=Q67V91; Match level="QueryCoverage=79%, HitCoverage=76%, E-value=1e-125, Identity=59%"; Hit description=Leaf senescence protein-like
  Pfam annotation: Domain name=DUF231; Domain location=266-462; Score =70.0; E_value=7.6e-18; Accession=PF03005.6; Description=Arabidopsis proteins of unknown function
MTLLKTYNHNDKQHQFSLPKRNFVTYAVYALIAVALLYLFVDPAAPPAAGSGATAASSTTTTKPSSSLPPSPYYEASSPIISTSSAAAPLCDYSDGEWVPDARPPLYDGTTCGAIKDDGRSCTANGRADTGYVHWRWQPRACDLPDFSADAFLRWLRNRHVAFVGDSLARNQAESLVCLLSSRSPSPPDLAHRSADGRFRRWVFRDDSGGNATVSVFWSPFLLKGVEKSERDGVRYNQVFLDAFDERWMSELHGIDAAVLSAGHWFRIPSVYHRGGRVVGCHGCDDYAAEFNRTVAESTSSFFSVFRDAVRRTLAEAARRHRHQSSSGAGGKKPQLVAFTTFSPSHFEGHWNEGAPCKKKADRELGYTETEMRKIVVEAVEEAASTMSSSNDSAQPLRFAALDVTALANMRPDGHPGPYMRKNPFAAAGNNTGDHRPVQHDCLHWCMPGPVDTFNQILLQTILLRAR

SEQ ID NO: 51367 - protein, 560 aa, Zea mays
  Coding DNA Sequence Number=SeqID_9588
  Gene Ontology: Mol. function=GTP binding; Cellular component =intracellular
  Homolog annotation: Hit_ID=Q2QZ37; Match level="QueryCoverage=86%, HitCoverage=95%, E-value=1e-161, Identity=58%"; Hit description =GTP1/OBG family protein, expressed
  Pfam annotation: Domain name=Arf; Domain location=361-545; Score= -66.7; E_value=0.00013; Accession=PF00025.11; Description=ADP -ribosylation factor family
  Pfam annotation: Domain name=GTP1_OBG; Domain location=123-371; Score= 8.5; E_value=1.7e-10; Accession=PF01018.12; Description=GTP1OBG family
  Pfam annotation: Domain name=MMR_HSR1; Domain location=373-503; Score= 135.1; E_value=1.9e-37; Accession=PF01926.13; Description=GTPase of unknown function
  Pfam module annotation: Pfam domain module=Arf::GTP1_OBG::MMR_HSR1; Domain location=361-545::123-371::373-503
MKRRVGPALGSLLLHIIAQDPTLKYLLGLELTADAEGREPVVSRLGWPPPEQTLLRRLPPLRVVAQAPASWPACRLGRFCGSVPEKRKGKAAPLQVSYFHIRFPESISPSDCLLMGLVQARGMVDRFRMRAKGGDGGNGCVSLRRSRSNRQGMPDGGSGGKGGDVILECSRSIWDFSGLQHHMRGGRGGNGVSKNQIGTRGPDKIVNIVAEGFDGGLSHRHIAPKHNTDGNDTVKGSSSHSEDPKYFHTCSKLQFSNSNRDVRIYSCQEGTDEKDQTESEDEEFWEDEDEFDMDEEEEEDEKEEQDVQYCVAEMTKPGQRLIIARGGKGGLGNAFVMKEMRPSKANRQEKIARLSTGQPGTESILILELKSIADVGLVGLPNAGKSTLLSALSRAQPEIADYEFTTLRPNIGSLTYEDYFSVKVADIPGLIKGAHENRGLGHAFLRHIERTKVIAYVLDLAATLNGRKGIPPWEQLHDLVTELEHYQKGMTRRPSLIVANKIDEEGAEEMYEELKRRVQGVPIFPVCAILQEGVPDLRVGLRNLMDDSDPQGVDFEENDC

SEQ ID NO: 51368 - protein, 167 aa, Zea mays
  Coding DNA Sequence Number=SeqID_9589
  Gene Ontology: Mol. function=ATP binding; Cellular component=nucleus; Biological process=defense response
  Homolog annotation: Hit_ID=Q5ZAJ9; Match level="QueryCoverage=96%, HitCoverage=34%, E-value=6e-40, Identity=56%"; Hit description =Powdery mildew resistance protein PM3b-like protein
MAELAASLVVTPLVSLLKDKVSSSLLDQYKVMEGMEKHHKTLMRWLPAILEVIGDAERQTPRRGVEKWLEQLKTAAYEANEVFDDFEYEALHRRAKKNGHITKLGIMARVKLFPTHNRAAFHIRMGNRLRGIVDTFKDLVEEMNTFGFNKLQPKATTAWKEWLTKYK

SEQ ID NO: 51369 - protein, 618 aa, Zea mays
  Coding DNA Sequence Number=SeqID_9590
  Gene Ontology: Mol. function=protein binding; Cellular component =nucleus; Biological process=defense response
  Homolog annotation: Hit_ID=Q6VUQ9; Match level="QueryCoverage=99%, HitCoverage=62%, E-value=1e-79, Identity=32%"; Hit description =Powdery mildew resistance protein PM3b
  Pfam annotation: Domain name=LRR_1; Domain location=130-151; Score =8.5; E_value=7.3; Accession=PF00560.23; Description=Leucine Rich Repeat
  Pfam annotation: Domain name=LRR_1; Domain location=153-175; Score =9.4; E_value=4.9; Accession=PF00560.23; Description=Leucine Rich Repeat
  Pfam annotation: Domain name=LRR_1; Domain location=319-340; Score =6.8; E_value=15; Accession=PF00560.23; Description=Leucine Rich Repeat
  Pfam annotation: Domain name=LRR_1; Domain location=408-431; Score =2.8; E_value=85; Accession=PF00560.23; Description=Leucine Rich Repeat
  Pfam annotation: Domain name=LRR_1; Domain location=467-492; Score =2.9; E_value=83; Accession=PF00560.23; Description=Leucine Rich Repeat
  Pfam annotation: Domain name=LRR_1; Domain location=542-567; Score =8.4; E_value=7.7; Accession=PF00560.23; Description=Leucine Rich Repeat
  Pfam annotation: Domain name=LRR_1; Domain location=584-606; Score =3.1; E_value=74; Accession=PF00560.23; Description=Leucine Rich Repeat
  Pfam module annotation: Pfam domain module=LRR_1::LRR_1::LRR_1::LRR _1::LRR_1::LRR_1::LRR_1; Domain location=130-151::153-175::319 -340::408-431::467-492::542-567::584-606
MVSRSFFQYEEQRRIGYNSTTFLKVHDLMHDVALSVSKKECVCITDEFITNMELLPSAARHILIETSIEKEVHGYLYGSMREMSRPIQTLMFDRSCDDVVVQHLSRISSLRVLSMPLWCHLPIKLKHQCHLRFLHITNSSIKELPDDITILYNLQTLKLSGCFNLIRLPKRMKHMSALRHLYTDGCTRLECMPPELGQITSLRTITWFVVGSGLSCSSLAELKDLNIGGSLKLKQLENVPAGRRNAEAANLVNKKELRQLTLEWTSGKAEEKQCHEVLESLEAHDGLLALEIYSYQGTSFPSWMGFCETVDGGAVAFPKLEILHIERCGNLAALPKASVLGEAYCGRDYTVARSAFPELKWLTLEDLCSFERWEAALEIEEGHALFPVVEVVVIRKCPKLTTLLRAPKLQDLSVTGCKELVYWPEKVFQSLISLRMLCIRYCNNLIGYAVANGPDQATSGRNQLLPHLESLEIDTCESLVEVFNLSPALKRMEVEGCCKLESLYGKQELDEEASRSDDMTASAPVEEKLSPSVAPDKPLPSSLEYLSIWDCHGLSEVVNLPSSLRVINIKRCSRLRAMSGQLGALKSLLIVNCPELRSLETCIVDLPSLEILFLSVWL

SEQ ID NO: 51370 - protein, 641 aa, Zea mays
  Coding DNA Sequence Number=SeqID_9591
  Gene Ontology: Mol. function=structural molecule activity; Cellular component=membrane; Biological process=protein amino acid phosphorylation
  Homolog annotation: Hit_ID=Q2L3S0; Match level="QueryCoverage=51%, HitCoverage=88%, E-value=8e-70, Identity=40%"; Hit description =Putative vesicle associated membrane protein
  Pfam annotation: Domain name=Motile_Sperm; Domain location=261-367; Score=55.3; E_value=2e-13; Accession=PF00635.16; Description=MSP (Major sperm protein) domain
  Pfam annotation: Domain name=Pkinase; Domain location=37-296; Score =126.4; E_value=7.8e-35; Accession=PF00069.15; Description=Protein kinase domain
  Pfam annotation: Domain name=Pkinase_Tyr; Domain location=37-272; Score=51.3; E_value=1.3e-15; Accession=PF07714.7; Description =Protein tyrosine kinase
  Pfam annotation: Domain name=TPR_1; Domain location=567-600; Score =11.0; E_value=0.26; Accession=PF00515.18; Description=Tetratricopepti de repeat
  Pfam annotation: Domain name=TPR_1; Domain location=601-634; Score =6.0; E_value=1; Accession=PF00515.18; Description=Tetratricopeptide repeat
  Pfam annotation: Domain name=TPR_2; Domain location=567-600; Score =16.2; E_value=0.12; Accession=PF07719.7; Description=Tetratricopeptid e repeat
  Pfam annotation: Domain name=TPR_2; Domain location=601-634; Score =3.9; E_value=12; Accession=PF07719.7; Description=Tetratricopeptide repeat
  Pfam module annotation: Pfam domain module=Motile_Sperm::Pkinase::Pkin ase_Tyr::TPR_1::TPR_1::TPR_2::TPR_2; Domain location=261-367::37 -296::37-272::567-600::601-634::567-600::601-634
MGSTHKEEVGVLEEILDGRKEPRKLSLSVLKHITNDFSHERIIGYGGCGEVYKGILQNGSVAVKKIFSNLNVEDKEFDREIQSMMQVKHPNVVRFIGYCSNTEHELMRKEGKYIKVEVRERLLCFEHISNGSLRSHITDGLRGLEWHARYKIIKGICEGLHHLHMEKNIIHMDLKPANILVHDQMVPKIADFGLSRLAEVSRTMSNERLLSLGYCAPEYQYHGKMSLKSDIYSLGVIMLELVTGSKEEPDITNEVTYLEDMLGIEPLDLHFLVEPTKQISCSVHLTNATNDCFAFIVQTTNPKQYCIQPDRGVVPPRSECSVAIVLSQEPTHNKRCSMEDELSVQSTRVDEGVTAADVSEALFTGKEDRTVDHVSLMVGFDMSPSPPEEQTEDFTFAPLASLYDEEPQLSAAKVSVWTSNQLGRSGRFSKKKLVSILKSWRARLKVSSHKKLETPKHDCEIPEAVEHEEVAAPRCPKGPLPQRDLSPLGEACSRMNMTAIHEILVNRHYRDDDLDPNVPSLEEWTQQSRDMLDDRKRGDFTFRDKDFRAAIDWYTKCMDVGPKKASPTVLVRRSCCHLMCGNLDAALRDAMQAQRQYPDCPTSLYMQAVALSKLGMHSQAMGMLIEASEMEANQKKTRKAA

SEQ ID NO: 51371 - protein, 55 aa, Zea mays
  Coding DNA Sequence Number=SeqID_9592
MARVLFRVGRRFPLYITPHHSMVVKAGKVSIGSYRWSAGGTNAKQSLGVRLVHMG

SEQ ID NO: 51372 - protein, 116 aa, Zea mays
  Coding DNA Sequence Number=SeqID_9593
  Homolog annotation: Hit_ID=P30571; Match level="QueryCoverage=47%, HitCoverage=73%, E-value=6e-19, Identity=76%"; Hit description =Metallothionein-like protein 1
  Pfam annotation: Domain name=Metallothio_2; Domain location=59-116; Score=68.1; E_value=2.8e-17; Accession=PF01439.8; Description =Metallothionein
MDVIFQARIILRSGDKWGIGPVLASKSLWREIELLLHHKVEDVLQLRIKLRLRLKLQVRKYPDLEETSTAAQATVVLGVAPEKKAAPEFVEAAAESGEAAHGCSCGGNCKCDPCNC

SEQ ID NO: 51373 - protein, 144 aa, Zea mays
  Coding DNA Sequence Number=SeqID_9594
  Homolog annotation: Hit_ID=P30571; Match level="QueryCoverage=35%, HitCoverage=68%, E-value=3e-16, Identity=76%"; Hit description =Metallothionein-like protein 1
MELGVETKCASFAIAEELLLDGKPGAAQCHQRCEEAPSTRGRVCLASRTKRRHSCTIQMAWRAVAGVALAVATAAAAVGGLAGLRRGLDELGRGLLLRGHAEDDGGLRGGARLLQLEPQPQLDPQLQDILDLVVQKKLDLFKNQ

SEQ ID NO: 51374 - protein, 133 aa, Zea mays
  Coding DNA Sequence Number=SeqID_9595
MLGLIALALFILAAAPPGGEARTAPAPGAGAGGGTKPAAGLPPPVWEEKILVIMAGDAKPTYLATPMSSRASSFGGDRSSSKGVDDEEEESNKEVQADEAAVASVMDAGGQNGGEHSERRREGGDQERRIPEV

SEQ ID NO: 51375 - protein, 104 aa, Zea mays
  Coding DNA Sequence Number=SeqID_9596
MAVATTDRWLLLLAVVSAAATSGKHERWRHQPSGVEIIMRETESDACVGPGGVLQACAWGRASGPTDLDPRSQGPHPIYSCRLAPNSGTWRHINNTRETADGHS

SEQ ID NO: 51376 - protein, 275 aa, Zea mays
  Coding DNA Sequence Number=SeqID_9597
MAPKTKKKGASTAAIPQLTLTANFCFVPSLGLAYILDYGGICIIARTLLAEIASLKDRGLTTNAVVIDFMFKNIQPLKDRLYDDSEIEAILGMLAGESSKSAELEQGSGAPEQPGAIKEKVEGGGAGKSARYVVEEAEEDEEVDLPLGLAISVMECHLEEAVSEALLYELPEVHVVDICVDRLDEVPDVSLLAEPEDDDTVVASVNLFVELAQDDLATLGISDVDAAEVMPTRTFVVEDATPVKTPMGAILVAEPSVDVKIPMGVALQLGTLESS

SEQ ID NO: 51377 - protein, 158 aa, Zea mays
  Coding DNA Sequence Number=SeqID_9598
MTITFSTAIIFNAGEVFHFGTLSYITDRRGVLHRIADAGREAPRARASNSTEKGPSLISKTASATTVVETQRALSPRGTDSSARRNDQPLHHPRPKPRSYLLPGRLIRSTQPDGLRCPFCRPKSGPGLLGRRALRSLTLTWSSRNIRRLLWLCRPRGQ

SEQ ID NO: 51378 - protein, 184 aa, Zea mays
  Coding DNA Sequence Number=SeqID_9599
MGQGQKKGRSGSGSVFVPTLAFRGVKELEELGCFPAGACRAARSKTVPQLEGRYYHLWRDSVRGGFRKALLLALAEKVVDDRVSQFGSCTFMPKTRKTKGKRGAKMTRFLVTPIASSDQDLVEEYMACRVWPLGHIWSVGLVEHNSFPGFARQLLSPPFAVDLCGRSGGVIMKEIEEAENWLGL

SEQ ID NO: 51379 - protein, 119 aa, Zea mays
  Coding DNA Sequence Number=SeqID_9600
  Homolog annotation: Hit_ID=Q6QP51; Match level="QueryCoverage=43%, HitCoverage=30%, E-value=8e-18, Identity=84%"; Hit description =Putative growth-regulating factor 1
MKARARRSCNRRNGYCVQGNRTATRANAASSRLWNQYRDSRQPCADRERGYFERDPSPRRKRALSPPTDQGFEGWPLGRVRQPPQSTRAPSPLLIRGLKAGPSEGFDSRPRALGLRAHY

SEQ ID NO: 51380 - protein, 122 aa, Zea mays
  Coding DNA Sequence Number=SeqID_9601
  Subcellular localization annotation: CTP_CleavageSite=8; ConfidenceScore=5.42e-01
MEAQAHASCNRRAGCFVQTTVPPPTPLPRLLDCGTNTVTRGGASGRGSERRFAFAIMTASKKAVRPDLRRHRKLRFARPRARTRAKPRKTANSAPPDPGLGLGLSPGTWRTPLRPTQGSDSG

SEQ ID NO: 51381 - protein, 58 aa, Zea mays
  Coding DNA Sequence Number=SeqID_9602
MWAATKSLTVDKFNFFMGKIDEKDPKVLTWLVEDHPWPKEAHGGAVAAATMGPPRGIR

SEQ ID NO: 51382 - protein, 169 aa, Zea mays
  Coding DNA Sequence Number=SeqID_9603
  Homolog annotation: Hit_ID=Q5JNJ2; Match level="QueryCoverage=48%, HitCoverage=14%, E-value=8e-14, Identity=55%"; Hit description =Putative nitrate transporter
MEDRQAMVRLRPDQGRVLVLIFSIPNYEQLFAGVTYPAPPSSWEVQCKKSTVFVIADMFISVSPMELYSKALKSMSSPVVLIVVGLHHEHHIIVKAVNTATKGFAASGEWLADDNINRNHLDLFWFWLLAVPSIFILGKLIQVQASSGLQEKTLSNSKCDPDHSCGYLI

SEQ ID NO: 51383 - protein, 347 aa, Zea mays
  Coding DNA Sequence Number=SeqID_9604
  Gene Ontology: Mol. function=DNA binding; Biological process =regulation of transcription
  Homolog annotation: Hit_ID=Q84UP8; Match level="QueryCoverage=74%, HitCoverage=69%, E-value=3e-71, Identity=62%"; Hit description=Myb family transcription factor-like protein
  Pfam annotation: Domain name=Myb_DNA-binding; Domain location=151 -202; Score=41.7; E_value=2.5e-09; Accession=PF00249.21; Description =Myb-like DNA-binding domain
  Subcellular localization annotation: CTP_CleavageSite=53; ConfidenceScore=5.02e-01
MELFPSQPDLSLQIGLPARATSHHHGAALSARLLAAAAGGSVGGGNGVPGNPAAAMAPSLQVPIPIPLQLPLPMPPNAAAMLRPIRGVPLYQHPHTHAVPPTFPPHAAGAGPCFCEPCHVAAGAWRRAGCGFGARVAGLFPPAKRAARAPRMRWTSTLHARFVHAVELLGGHERATPKSVLELMDVKDLTLAHVKSHLQMYRTVKNTERPAASSDQADGFESGSSSAGEICDDDNSSLDLHGTDGRRPESSSAVRHGRLTACNDHGSSTGAHGGALWNSSSREDWAGFPSDSNTGSMSMHSRSLKDQTMQSKSLEILSDMNSSCVSETTSCASELNLEFTLGPRIRH

SEQ ID NO: 51384 - protein, 820 aa, Zea mays
  Coding DNA Sequence Number=SeqID_9605
  Gene Ontology: Mol. function=cellulose synthase (UDP-forming) activity; Cellular component=membrane; Biological process=cellulose biosynthetic process
  Homolog annotation: Hit_ID=Q8W1N4; Match level="QueryCoverage=55%, HitCoverage=93%, E-value=0.0, Identity=83%"; Hit description=CSLF6
  Pfam annotation: Domain name=Cellulose_synt; Domain location=1-800; Score=1201.5; E_value=0; Accession=PF03552.5; Description=Cellulose synthase
VLIFVRLIAFTLFVIWRISHRNPDALWLWVTSIAGEFWFGFSWLLDQLPKLNPINRVPDLGALRQRFDRADGTSRLPGLDIFVTTADPFKEPILSTANSILSILAADYPVERNTCYLSDDSGMLLTYEAMAEAAKFATVWVPFCRKHGIEPRGPESYFELKSHPYMGRSQEDFVNDRRRVRRDYDEFKARINGLENDIRQRSDAYNAARGLKDGEPRATWMADGTQWEGTWVEPSENHRKGDHAGIVLVLLNHPSHSRQLGPPASADNPLDLSMVDVRLPMLVYVSREKRPGHNHQKKAGAMNALTRCSAVLSNSPFILNLDCDHYINNSQALRAGICFMLGRDSDTVAFVQFPQRFEGVDPTDLYANHNRIFFDGTLRALDGMQGPIYVGTGCLFRRITLYGFDPPRINVGGPCFPSLGGMFAKTKYEKPGLELTTKAAVAKGKHGFLPMPKKSYGKSDAFADTIPMASHPSPFAAAAAVVAEEATIAEAVAVCAAAYEKKTGWGSDIGWVYGTVTEDVVTGYRMHIKGWRSRYCSIYPHAFIGTAPINLTERLFQVLRWSTGSLEIFFSRNNPLFGSTFLHPLQRVAYINITTYPFTAIFLIFYTTRPTTMFYVYLAIVLGTLLILAVLEVKWAGVTVFEWFRNGQFWMTASCSAYLAAVCQVLVKVVFRRDISFKLTSKQPAGDEKKDPYADLYVVRWTWLMVTPIIIILVNIIGSAVAFAKVLDGEWTHWLKVAGGVFFNFWVLFHLYPFAKGILGRHGKTPVVVLVWWAFTFVITAVLYINIPHIHGPGGKHGGAIGKHGAAHHGKKFDGYYLWP

SEQ ID NO: 51385 - protein, 162 aa, Zea mays
  Coding DNA Sequence Number=SeqID_9606
MAHRTVSGCTEKCLVHQVEQHSNNSLSGFSRARSAIIHRTVQCAPDMSGSPAAAHQSPPSVLRPPLSPCHVCCLASPGLSAPETSSPRPEFLAGIVRPARSTFPSSSFLHWPRSCGRKSASVFARPSGPVLALPSDPSPPGDRVCLVSGDLAAAKETTPATK

SEQ ID NO: 51386 - protein, 153 aa, Zea mays
  Coding DNA Sequence Number=SeqID_9607
  Subcellular localization annotation: CTP_CleavageSite=45; ConfidenceScore=5.06e-01
MAPGGRRSNGETPTGQQQQQQQADGRRGCACGGFPVCACAGAAAVASAASSADMDRVAVAATEGQIGAVNDESWVAVDLSDDGLSSAADPGAVALEERPVFRTEKIKGVLLHPYSSTASPARRAPAFTGRYTPNNNTISASSLPLQASTLLLD

SEQ ID NO: 51387 - protein, 192 aa, Zea mays
  Coding DNA Sequence Number=SeqID_9608
MVVMMKQGTKDEADLMSRRRSRITKAGRTCLRVPATSSCIGGYSLQGSPHAHRAAFCASGSFYLSSPSSRWALGLRSVRDADEWNLRGRRLALRPSVVVLSYMAVAGGAELGSAGSHHELGDAVASMALPELTPLSLPAYMAVATHNPLELTRTQYASSLDLLWLFTYNALYDYKSKIVACAFAILTMFRSL

SEQ ID NO: 51388 - protein, 112 aa, Zea mays
  Coding DNA Sequence Number=SeqID_9609
MVVVGPICGVRKNRRLGWCCISSRYSGLIVGFNMHTWSRKYEAHLWDNSCRVDGRRRKGTRSFCRAAINVLLVKFLINLESFTVNIFGSIFIVGWQETNQREIPCNGLFSYS

SEQ ID NO: 51389 - protein, 231 aa, Zea mays
  Coding DNA Sequence Number=SeqID_9610
  Gene Ontology: Mol. function=nucleic acid binding; Biological process= regulation of transcription
  Homolog annotation: Hit_ID=Q84UQ3; Match level="QueryCoverage=96%, HitCoverage=74%, E-value=5e-74, Identity=56%"; Hit description =Putative zinc finger protein
  Pfam annotation: Domain name=zf-CCCH; Domain location=136-162; Score =27.8; E_value=3.9e-05; Accession=PF00642.15; Description=Zinc finger C-x8-C-x5-C-x3-H type (and similar)
  Pfam annotation: Domain name=zf-CCCH; Domain location=199-225; Score =49.5; E_value=1.1e-11; Accession=PF00642.15; Description=Zinc finger C-x8-C-x5-C-x3-H type (and similar)
  Pfam annotation: Domain name=zf-CCCH; Domain location=61-86; Score =29.3; E_value=1.4e-05; Accession=PF00642.15; Description=Zinc finger C-x8-C-x5-C-x3-H type (and similar)
  Pfam module annotation: Pfam domain module=zf-CCCH::zf-CCCH::zf-CCCH; Domain location=136-162::199-225::61-86
MDYTNAIHIIPPMASDARTNAAASPGEDPDIWATEKDYRQWTAMVAAGAAQASQRHRKMFFKTKLCCKFWARTCPYVTNCNFAHGMEELCKPPPNWQEIVATHEDATTKQGEEHQIPIMTSRSVIAGDDGGGGRAYKGRHCKKFYTEEGCPYGDTCTFLHDEQSKARESVAISLLPTIGGGGYNAASASGSMAQNSSNWKTRICNKWEMTGYCPFGSKCHFAHGSTVIPNL

SEQ ID NO: 51390 - protein, 167 aa, Zea mays
  Coding DNA Sequence Number=SeqID_9611
  Gene Ontology: Mol. function=nucleic acid binding
  Homolog annotation: Hit_ID=Q84UQ3; Match level="QueryCoverage=51%, HitCoverage=23%, E-value=2e-12, Identity=72%"; Hit description =Putative zinc finger protein
MRLLRRGGAAEELLFAELHRYGGGLVDIDGRNIASLLIRSKPVLPLKLLPILLLHPLRSPLMRKRTISASCRSAPPSPTRGLDNCEGPFRNGRALTRSAGFIGDWIGCLSCVPACPALVPGVKHAYNSFKSRSTLQELGRETADCWNMWSLSYVELRLVAMIGMVRP

SEQ ID NO: 51391 - protein, 164 aa, Zea mays
  Coding DNA Sequence Number=SeqID_9612
  Gene Ontology: Mol. function=voltage-gated potassium channel activity; Cellular component=voltage-gated potassium channel complex; Biological process=potassium ion transport
  Homolog annotation: Hit_ID=Q6K625; Match level="QueryCoverage=73%, HitCoverage=27%, E-value=6e-37, Identity=66%"; Hit description =Potassium channel tetramerisation domain-containing protein-like
MAVDKCVKGVLGGGHGRSSRNMAVEHYDGQAKSFTAGLLDFRAKDVVWSWSDAGAAASLDDKRVLHAIAMEDERSVCVINQYDDLGFLDLRSGAGGVRWSSRSKLRNRKVPGEESCYPKLATHGGQLFSSMNDSISVFSNLGCVWSSYPSYALHMFDEMFERLD

SEQ ID NO: 51392 - protein, 191 aa, Zea mays
  Coding DNA Sequence Number=SeqID_9613
MAPPVDVAGLRPRLGEVEAPPKPRSSLSSVAEVESEPLPESEPWVGRSGVRRLPGLSPSPSPGSGGAEFAVFRDLARVRALGRAERSSPSSGAEPESEPWVGRSGVHRLPGLSPSPSPGSGGAEFPVVPSAGPDCLSASLCQVALQSARRRRRCPSVRPLYADGGYQLRIRSLEAVLNRIIRHADSTLIIT

SEQ ID NO: 51393 - protein, 344 aa, Zea mays
  Coding DNA Sequence Number=SeqID_9614
  Homolog annotation: Hit_ID=Q67WZ5; Match level="QueryCoverage=30%, HitCoverage=19%, E-value=1e-47, Identity=84%"; Hit description =Putative prolylcarboxypeptidase isoform 1
MDTGKLDVARSPVRRSGSRARARPLAPARACFQSTGVRPRPHWITTEYGGYRIDKVLKRFRSNIIFSNGMRDPWSRGGVLKNISSSIVALVMEKGAHHLDLRFATDEDPDWVTEQRRQEVEIIEGWIDQYHRDMAQRRILRRMAICPPRPTETTARDVLPTETAAGTYTQPPPPQPTYTIEIVVVLASAYPSRCALGPGSGPTNNRSRSRAQRRSRRSQRQPPSRRIEPRRCCRPWNGLAADELSRPWNGTVAVRPPEEEARSVPVTPHLSQKSSPGSSLAERMQARAGFMVPKLNMPFSTAAGADNSVPEVPSPYLTIPPGLSPATLLESPVFISNSMACALL

SEQ ID NO: 51394 - protein, 147 aa, Zea mays
  Coding DNA Sequence Number=SeqID_9615
  Subcellular localization annotation: CTP_CleavageSite=29; ConfidenceScore=5.59e-01
MPRYPRPLSRRVLAYKSKPAPSPAKATATATTGSSRAPYSNHMPSAPCSGPSPDTARIPRPAGAANKKMACLCSPTSHPGSFRCSRHRTAPDGAEAVPGATRARSVRALLLQRIGGIRREPGRHHRRRGVGVGDFQPRPSRLRLMNL

SEQ ID NO: 51395 - protein, 115 aa, Zea mays
  Coding DNA Sequence Number=SeqID_9616
MSKGKIELEKRWLSSAEVSAVWVNRTVRWCTGQGPVHQADSGELAALGSSTAVYGYNSPDCPVSQRSAGPMVGRAIRARHVAKPTVGRGHRTVRCAPDSVWCANGSQAPTIGFAK

SEQ ID NO: 51396 - protein, 65 aa, Zea mays
  Coding DNA Sequence Number=SeqID_9617
MEDGPQSKLATRDDNCGAMNDTDDDIVVIIVDDVDVEAKEEDKDDEEENDDNEEPPDMRWMKDDS

SEQ ID NO: 51397 - protein, 65 aa, Zea mays
  Coding DNA Sequence Number=SeqID_9618
MEDGPQSKLATRDDTCGAMNDTDNDAVVIIVNDIDVEAKEEDKDDEEENNNNEEPPNMRRMKDDS

SEQ ID NO: 51398 - protein, 129 aa, Zea mays
  Coding DNA Sequence Number=SeqID_9619
MVLWRLRTMKLGVQNKLPYGGKSEAEALQQAFGAQKRRRLNRVFDAIRFFYPNYPTMVQVSKKRKKKVTTRRSKMPKATPEAKIDVEIEELPPMRADELKFEEAIYLIAQKVKPLEMLLESDEEEDDGE

SEQ ID NO: 51399 - protein, 107 aa, Zea mays
  Coding DNA Sequence Number=SeqID_9620
  Gene Ontology: Mol. function=protein binding
  Homolog annotation: Hit_ID=Q7Y180; Match level="QueryCoverage=98%, HitCoverage=39%, E-value=7e-19, Identity=58%"; Hit description =Putative acidic nuclear phosphoprotein
MAAADEEDATWERAISAATKATSAPKILTLDSAVKSSMGRLPSAALIGRFAASLEEFSVTGAALSSLTGLPVSRRFGASPSPTTVSRGSLRSLLSRRPAVPRCATSI

SEQ ID NO: 51400 - protein, 237 aa, Zea mays
  Coding DNA Sequence Number=SeqID_9621
  Gene Ontology: Mol. function=calcium ion binding
  Homolog annotation: Hit_ID=Q2R1L7; Match level="QueryCoverage=75%, HitCoverage=89%, E-value=6e-34, Identity=45%"; Hit description=EF hand family protein
  Pfam annotation: Domain name=efhand; Domain location=168-196; Score =23.6; E_value=0.00069; Accession=PF00036.22; Description=EF hand
  Pfam annotation: Domain name=efhand; Domain location=206-234; Score =33.7; E_value=6.4e-07; Accession=PF00036.22; Description=EF hand
  Pfam module annotation: Pfam domain module=efhand::efhand; Domain location=168-196::206-234
MEIIAETRSSQRDSCVMSSLKDGGSFQDQREEGYKSKTKTLNVSITIILLFTQPCGINLFLKFLTWSVSVFQILLPCSCKPCNCNCSCSCNQGSAEKVIQTPVITTADKEVTETRNKDQDDETALAQEDIKTVMRNIGFNLDQPENGMAIGDDSVARVFDEDEPSLQEVWQAFSVFDHNNDGYFDASDLQRVLGSLGLREGLGMDECEQMIAKYDTNKDGRIDVAEFTRVLESAGIC

SEQ ID NO: 51401 - protein, 293 aa, Zea mays
  Coding DNA Sequence Number=SeqID_9622
  Homolog annotation: Hit_ID=Q6ETC2; Match level="QueryCoverage=62%, HitCoverage=64%, E-value=3e-51, Identity=61%"; Hit description =Pentatricopeptide (PPR) repeat-containing protein-like
  Subcellular localization annotation: CTP_CleavageSite=61; ConfidenceScore=5.87e-01
MPEQRKGRSRLAAVRVGRSPAAASPSRRRRKSGSGSTAARPVPTPGPSRSRTRTRREGKRRALARSASEPLLWFGDARVHDVPPHGPGLGLGLDCPPSPPPPPLERPHTCFDVFAPEFGRSPSYASLTSPCPREEAKVVVSVTVEGSVGPVKAMVRLGASVGEAIAAVVERYAREGRSPRLDPAAAESFQLHHSHFSLESLNKKDRIGDVGGRNFYLHKNDSSNDGLYLQGQEEPGADPSGGDISRHSSSGVGQASGGATSQHQVLTIVISKLDKIGRRTRRIWRFITCNNCA

SEQ ID NO: 51402 - protein, 117 aa, Zea mays
  Coding DNA Sequence Number=SeqID_9623
MKGVIWENDGSIPKLQMKKLWLSRRAVMENGTDLKGNILPSPQLITPYLDSSLAYKARNRWSKRVPKLATRDDTCGATNDTANDTIVIVIDDIDVEAKEEDKDDEENDDNEEPPHMR

SEQ ID NO: 51403 - protein, 73 aa, Zea mays
  Coding DNA Sequence Number=SeqID_9624
  Gene Ontology: Cellular component=nucleus
  Homolog annotation: Hit_ID=Q8VWL4; Match level="QueryCoverage=98%, HitCoverage=21%, E-value=8e-11, Identity=47%"; Hit description =Putative proline and glutamic acid rich nuclear protein
MGRMTMLDEEKTGLTQLEGKHTRFIINSDDEIGREEVADATETRAELGALMPRGLLLPEGRHLRFHNDEDDEE

SEQ ID NO: 51404 - protein, 374 aa, Zea mays
  Coding DNA Sequence Number=SeqID_9625
  Gene Ontology: Mol. function=endonuclease activity
  Homolog annotation: Hit_ID=Q5ZE24; Match level="QueryCoverage=73%, HitCoverage=30%, E-value=9e-83, Identity=57%"; Hit description =Endonuclease/exonuclease/phosphatase family protein-like
MSSPSSYSRTGYPRPRRGYSGRPSPPPPPPPPDAASEIVSRDYHLSAVHAANESLRRGGGGDIRWPPPPYRQGPHPHQPHYGYGYGYGYGYGQTWQPGPSYGFVPYNYGHPQQQPPGPQYGYGAPNPYVHGHLQPQPHVRGAASPGFRPGAPQLTPRLADYLRRWRFAKQRPPHQAGRFIILSYNILADYLAQEHRFLYEKISPFILDWNWRKDKLLFEFGLWSPDILCLQEVDKFTDLEQEMASQGYNGTWKIRTGDAADGCAIFWRTTRFQLRYEEDIEFTKLGLRDNVAQLCVLESVGLQYVQTDSVSLSTRDDYFANLICSPRRREDKQVCLDFKNVGLQKDIMFNNICCIGFVVIQEGFESGTMIYMIG

SEQ ID NO: 51405 - protein, 34 aa, Zea mays
  Coding DNA Sequence Number=SeqID_9626
MEDSGIAPQSAPIARGDSGEGIAGYFVYVAEWKG

SEQ ID NO: 51406 - protein, 98 aa, Zea mays
  Coding DNA Sequence Number=SeqID_9627
MANPSTLCLSVPAVVGQHSGGSGPREDGDGACSCPGAGLLASSHCRRRFRWQTGPIGPGPGSDTAMDPFPLSPSPPRMDRANRGRMPNCQGHVHHTVH

SEQ ID NO: 51407 - protein, 354 aa, Zea mays
  Coding DNA Sequence Number=SeqID_9628
  Gene Ontology: Mol. function=nutrient reservoir activity; Cellular component=cellulose and pectin-containing cell wall
  Homolog annotation: Hit_ID=Q43557; Match level="QueryCoverage=89%, HitCoverage=91%, E-value=1e-107, Identity=56%"; Hit description =Unidentified precursor
  Pfam annotation: Domain name=DUF642; Domain location=43-342; Score =647.8; E_value=8.6e-192; Accession=PF04862.3; Description=Protein of unknown function, DUF642
MRRVALLLVAAVCALAAPAAAVVTDGLLPNGNFEDGPPKSALVNGTVVSGAHAIPRWETSGFVEYIESGHKQGDMLLVVPQGAHAVRLGNEASIRQRLAVARGAYYAITFSAARTCAQAERQRLNVSAKMDAVTLVIHNPGVEEDPACGPLIDGVAIRALYPPALARRAGGNNLLKNGGFEEGPYFLPGASWGVLVPPNIEDDHSPLPAWMIVSSKAVKYVDAAHFAVPQGARAVELVGGRESALVQEVRTVPGWTYRLAFAVGDSGDGCAGSMAAEAYAARATVKVPYQSRGTGGYKRAVLDFTAIANRTRVVFQSTFYHMKPDGTLCGPLVDDASLVGLRKKKPARRLMQLL

SEQ ID NO: 51408 - protein, 183 aa, Zea mays
  Coding DNA Sequence Number=SeqID_9629
MSPNRLFIEANIFENGDATIAYEKKVFMRLLMEINSQILKEWMKRPRLKPTCHLPQCCGPAGVDSGRQERRLEMGDRRLVAECRALDLNRGPRTHSRPPNPLPSIRGRQRAEGAGRVGMDKNWLNGGELLGASRSSRRRASRMVAMMHGLRRMFVAHNGKSQAHRDEQSTTFASTSTSVSPNI

SEQ ID NO: 51409 - protein, 109 aa, Zea mays
  Coding DNA Sequence Number=SeqID_9630
MDVDQLPTYDPRSDVAKKEALDASRADLARALVHLIPVGVLLCGLLLWSFSDTDFPAGWWLRCRDIVSVASVMDSTLCSYSFSRAFGRNGEPRCLRARATLGCQPRSAA

SEQ ID NO: 51410 - protein, 154 aa, Zea mays
  Coding DNA Sequence Number=SeqID_9631
  Gene Ontology: Mol. function=microtubule motor activity; Cellular component=microtubule associated complex; Biological process =microtubule-based movement
  Homolog annotation: Hit_ID=Q6K990; Match level="QueryCoverage=71%, HitCoverage=11%, E-value=2e-33, Identity=69%"; Hit description =Putative phragmoplast-associated kinesin
MCDVRVTDSPVSSQLSPIVCQVVGAPLSEELNTCSAVEGSDPSKEKNSLAGQKDGGGLLEVYIKWESGNLIKGLKLLCNSCLSDLRKLIEAHFKEVGSKQQQQQFIFLLLGVCHSALSMSCFHPSALCYVLLITMALIYDHVLSWGNGTHVTID

SEQ ID NO: 51411 - protein, 108 aa, Zea mays
  Coding DNA Sequence Number=SeqID_9632
MALNQLLPVCCPEKKHTKINSYLGVIIIAVEVTRLCTNLDDADVSVERAEFGRSSAVIVMSPTFRVSVKADRSNARHGLLLIGRTAWVPAVQCGVTKPTHFASRDARQ

SEQ ID NO: 51412 - protein, 195 aa, Zea mays
  Coding DNA Sequence Number=SeqID_9633
MKAREARPSRHGARDPPRGPGGPPAVSGRPHDPWPDRCGDVDQPVNNILMLHNIAENQRLNPCFLKHGTQPRPGLHFVCLRHEEEACILKTKLPVMTYAEKQMVNYVFEDLLDLAGVEKQGLDTEIPHSQWLMKVLRVFFFTEGLQDKNTFGKMIQMLAEAIINLVFASQDEDFVYKQRCRMPKLNSFGSDQAKK

SEQ ID NO: 51413 - protein, 361 aa, Zea mays
  Coding DNA Sequence Number=SeqID_9634
  Gene Ontology: Mol. function=glutamyl-tRNA reductase activity; Biological process=tetrapyrrole biosynthetic process
  Homolog annotation: Hit_ID=Q9LVD1; Match level="QueryCoverage=86%, HitCoverage=79%, E-value=1e-100, Identity=53%"; Hit description =Arabidopsis thaliana genomic DNA, chromosome 5, P1 clone:MJB24
  Pfam annotation: Domain name=DUF266; Domain location=129-240; Score =238.5; E_value=1.4e-68; Accession=PF03267.4; Description=Arabidopsis protein of unknown function, DUF266
MTVMMPQRHRATAKKPMWIIVLLCMVCIVLIGAYVFPPRRFSNCYLSASSVCAPFKDWLPSMGRRERTDEEIISSVVIRDILSMPMPMPKNPKIALMFLTPGSLPFEKLWEKFLQIVGHEGRYSIYVHASREKPVHTSSLFAGRDIHSDAVVWGLISMVDAEKRLLANALEDVDNQVFILLSDSCVPLHSFDYVYNYLMGTNVSFIDCFKDPGPHGSGRYSIEMYPEIDERDFRKGAQWFAVTRRHALMILADSLYYKKFKLYCKMVDPGGISNWSVTHVDWSEGKWHPRSYSADDVTYDLLKNITAVDENFHVTSDDKKLVMQKPCLWNGSKRPCYLFARKFNPEALDNLLKQFTSYTSV

SEQ ID NO: 51414 - protein, 660 aa, Zea mays
  Coding DNA Sequence Number=SeqID_9635
  Gene Ontology: Mol. function=protein-tyrosine kinase activity; Cellular component=integral to membrane; Biological process=protein amino acid phosphorylation
  Homolog annotation: Hit_ID=Q6H504; Match level="QueryCoverage=87%, HitCoverage=87%, E-value=1e-141, Identity=49%"; Hit description =Putative receptor-like protein kinase PRK1
  Pfam annotation: Domain name=LRR_1; Domain location=113-134; Score =13.6; E_value=0.71; Accession=PF00560.23; Description=Leucine Rich Repeat
  Pfam annotation: Domain name=LRR_1; Domain location=136-159; Score =11.8; E_value=1.8; Accession=PF00560.23; Description=Leucine Rich Repeat
  Pfam annotation: Domain name=LRR_1; Domain location=161-183; Score =12.4; E_value=1.3; Accession=PF00560.23; Description=Leucine Rich Repeat
  Pfam annotation: Domain name=LRR_1; Domain location=185-207; Score =11.6; E_value=1.9; Accession=PF00560.23; Description=Leucine Rich Repeat
  Pfam annotation: Domain name=LRR_1; Domain location=87-108; Score =3.0; E_value=80; Accession=PF00560.23; Description=Leucine Rich Repeat
  Pfam annotation: Domain name=Pkinase; Domain location=350-621; Score =32.9; E_value=1.6e-10; Accession=PF00069.15; Description=Protein kinase domain
  Pfam annotation: Domain name=Pkinase_Tyr; Domain location=349-621; Score=-23.4; E_value=4.9e-11; Accession=PF07714.7; Description =Protein tyrosine kinase
  Pfam module annotation: Pfam domain module=LRR_1::LRR_1::LRR_1::LRR _1::LRR_1::Pkinase::Pkinase_Tyr; Domain location=113-134::136 -159::161-183::185-207::87-108::350-621::349-621
MAAATAAGRLLLAAAALILAAASSGVTLAAAQAKSEADVLSEFRATLRGPDPDGGPPAELNQWATGGAPCDGNATSWPRVRRCVDGRVVVLQLEGLRLQGAAPDLALLAPLRSLRSLSLSNNSLAGAFPDVSPLPALRFLFLWQNRLAGEIPDGAFAALRGLQRVDLSGNEFSGPIPSSIASSARLLSVNLANNNFSGPVPEGLRRLGANVQLQGNKFLCGDMVGTPCPPAPPSSSSASSSGGMKVLITIAIVVIAVGAVLAVAGVIAAVRARCNEPCYSGGIETLGDSPDAAKVKVTSAPAVKIEKGGTDQHGGATPAAGKRGGRRDDHGKLVFIQEGRARFGLEDLLRASAEVLGSGNFGASYKATLLDGPALVVKRFKDMNGAGREDFSEHMRRLGLLVHPNLLPVIAYLYKKEEKLLVTDYMANGSLAHALHGGTRSSLPPLDWPKRLKIIKGVARGLAHLYEELPMLMVPHGHLKSSNVLLDATCEPLLSDYALAPVVTPQHAAQVMVAYKSPECAAQGGRPGRKSDVWSLGILILEVLTGKFPANYLRRGHADTDLAGWVNSVVREEWTGEVFDKDMRGTRSGEGEMVKLLQVGLGCCEPDVHRRWGLEEALARIEELRERDTGADDSSTASSFLSDGEAAASRPAGEQQSHSA

SEQ ID NO: 51415 - protein, 469 aa, Zea mays
  Coding DNA Sequence Number=SeqID_9636
  Gene Ontology: Mol. function=N-acetyltransferase activity; Cellular component=intracellular; Biological process=metabolic process
  Homolog annotation: Hit_ID=Q5JLP9; Match level="QueryCoverage=93%, HitCoverage=73%, E-value=1e-121, Identity=52%"; Hit description=Pax transcription activation domain interacting protein PTIP-like
  Pfam annotation: Domain name=BRCT; Domain location=262-338; Score =34.7; E_value=3.2e-07; Accession=PF00533.16; Description=BRCA1 C Terminus (BRCT) domain
MVVVDQLPLLGPYQIVLAMAAEAMEALSNASTVNYVVRENAHPESSVLRTNMGKESKANKICFELSLQKRIGGSSSSVKKHPSKLKDKKSRKQMTRKAKGSIDSTTIEGDTNHEVSEGVKGSGASDSNVVGSNAVMCPKRKRTYMFISRSSKVQFNKAGSSTTPRSKSKEVVDVSTTKPVSVSGPDLNQLARVEKQFTSAQEDHNSSLTNRGPLGELNSKCSHFRTQVSKKPLKRGLVKSPGSRELVSLLRNEASLVLQTSRQRRNMSKVHVLLSHSMDKETIKMQTKILIYFGLQVAATISEATHFVAEKFARTRNMLQAIAMGIPIVTPSWLECCREARCFVDEKAYIMRDMKKEKELGFSMPVSLSRARKKPLLQGRRVLITPNAKPSKELLKSLVVAAHGQPLERITASTMKKKIFEGAFVLSCEQDHSVCMPLIESGLEVFDSELLLNGIVTQKLEFARYRLFP

SEQ ID NO: 51416 - protein, 1054 aa, Zea mays
  Coding DNA Sequence Number=SeqID_9637
  Gene Ontology: Mol. function=hydrolase activity, acting on acid anhydrides, catalyzing transmembrane movement of substances; Cellular component=integral to membrane; Biological process=calcium ion transport
  Homolog annotation: Hit_ID=Q8RUN1; Match level="QueryCoverage=99%, HitCoverage=100%, E-value=0.0, Identity=85%"; Hit description =Calcium-transporting ATPase 3, plasma membrane-type (EC 3.6.3.8) (Ca(2+)-ATPase isoform 3)
  Pfam annotation: Domain name=Cation_ATPase_N; Domain location=115 -194; Score=49.7; E_value=9.6e-12; Accession=PF00690.16; Description =Cation transporterATPase, N-terminus
  Pfam annotation: Domain name=E1-E2_ATPase; Domain location=208-450; Score=214.9; E_value=1.8e-61; Accession=PF00122.10; Description=E1 -E2 ATPase
  Pfam annotation: Domain name=Hydrolase; Domain location=454-787; Score=68.6; E_value=2e-17; Accession=PF00702.16; Description =haloacid dehalogenase-like hydrolase
  Pfam module annotation: Pfam domain module=Cation_ATPase_N::E1-E2 _ATPase::Hydrolase; Domain location=115-194::208-450::454-787
MAYLRNKSMEFLKRFEVPAKNPSEDAQRRWREAVGTLVKNRRRRFRMVPDLDKRSQVQAQRRNIQEKLRVALYVQKAALQFIDAARKTEHPLPEMARQRGFSVSAEELAAVARNHDAKSLRHHRGVDGIAAKLNVSLADGVRSDEAGVRAEVYGANQYTEKPPRTFWMFLWDASQDMTLLLLAFCAFISVAIGLATEGWPSGMYDGLGIVLTIFLVVMITAASDYKQSLQFRDLDREKKKIDIQVTRDGYRQKVSIYDIVVGDIVHLSIGDQVPADGLYIDGYSLVVDESSMSGESEPVHPSTAKPFLLGGTKVQDGSARMLVTAVGMRTEWGNLMETLSQGGEDETPLQVKLNGVATIIGKIGLVFAVLTFTVLMARFLVDKAHAPGGLLQWRGADALSILNFFAVAVTIIVVAVPEGLPLAVTLSLAFAMKKLMQERALVRHLSACETMGSASCICTDKTGTLTTNHMVVEKVWASGAAQTVSTAKGFDELRSSVSENFTRVLLEGVFHCSGSEVVTGKDGRTSVMGTPTETAILEFGLEVEKYMGVEHAGAKKLKVEPFNSVKKTMAVVIASPNSAGHPRAFLKGASEVVLSRCSSVIDGTGSVEKLTEAKAKRVGSAIDAFACEALRTLCLAYQDVGGAGDVPGDGYTLIAVFGIKDPLRPGVREAVRTCHDAGINVRMVTGDNINTAKAIARECGILTDDGVAIEGPEFRAKRPNEMRELIPKIQARSWSNVMARSLPLDKHTLVTNLRGMFNEVVAVTGDGTNDAPALHEADIGLAMGIAGTEVAKENADVIIMDDNFSTIINVAKWGRSVYINIQKFVQFQLTVNVVALMVNFVSASFTGSAPLTIVQLLWVNLIMDTLGALALATEPPNDAMMRRPPVGPRRQLHHQGDVAEHRRPEHLPARRSRRPHLQGQEPSPAERRRGSVRRPAQHVPIQHIRVLPGLQRGQQPGDGEDQRVQRHLQQLDLLGRSPAPPPAFQVIIVELLGTFASTVHLSGRLWLASVLIGSVSLLIGAVLKLIPVGSGSDDSSSADRHDGYQPIPTGPNAV

SEQ ID NO: 51417 - protein, 111 aa, Zea mays
  Coding DNA Sequence Number=SeqID_9638
MAGWNWKLDLVSETNNGSLRLRSRLHLSGLLGAAIGGWRGRQWSRMGGEQIEPAESGLQGKLRPEPELSITTQWLPESSISSTRLEAKAKEPKPKLKLKVSELDWKFGRQD

SEQ ID NO: 51418 - protein, 117 aa, Zea mays
  Coding DNA Sequence Number=SeqID_9639
  Gene Ontology: Mol. function=metal ion binding; Cellular component =nucleus; Biological process=red or far red light signaling pathway
  Homolog annotation: Hit_ID=Q947M8; Match level="QueryCoverage=71%, HitCoverage=14%, E-value=5e-30, Identity=92%"; Hit description=CopI
  Subcellular localization annotation: CTP_CleavageSite=2; ConfidenceScore=5.09e-01
MPASTVTCSRLPGLLPLFPVQLPTGGLLNLIVMMNYLLPLESRNVLKSSNFLLSKLSCLSWNKYSKNIIASSDYEGIVTVWDIQTRQSVMEYEEHEKRAWSVDFSRTDSSMHLMVRS

SEQ ID NO: 51419 - protein, 40 aa, Zea mays
  Coding DNA Sequence Number=SeqID_9640
MSESADISLDEPESQVVSFGLDDLRLDVMDENKTNETMEK

SEQ ID NO: 51420 - protein, 108 aa, Zea mays
  Coding DNA Sequence Number=SeqID_9641
  Gene Ontology: Mol. function=hydrolase activity; Cellular component =cytoplasmic membrane-bound vesicle; Biological process=biological _process
  Homolog annotation: Hit_ID=Q5JLP6; Match level="QueryCoverage=84%, HitCoverage=31%, E-value=2e-30, Identity=68%"; Hit description =Putative S-formylglutathione hydrolase
  Subcellular localization annotation: CTP_CleavageSite=35; ConfidenceScore=5.34e-01
MAVAPPTAAALEQLSSSKMFDGFNLRFRHQSATLGCAMTFSIYLPPSPASNLPVLYWLSGLTCTDENFIIKSGAQRAAAAHGIALVAPDTSPRMSKLSQLLPLTVQGF

SEQ ID NO: 51421 - protein, 102 aa, Zea mays
  Coding DNA Sequence Number=SeqID_9642
  Subcellular localization annotation: CTP_CleavageSite=66; ConfidenceScore=5.46e-01
MALRHAFQRLLRPKETGALTTSASDALGPHRRTPRGQRTTATPRRSKSEASGNARSPPPRRLLPCPASLRPSPTRLEEAVACQCQPGALMGLRWGSDLCGTR

SEQ ID NO: 51422 - protein, 139 aa, Zea mays
  Coding DNA Sequence Number=SeqID_9643
MAPKRATSKAVTSIDDGVKAALLAEKKGKGPLADDISQEAFDDEAVKSKRQRQDNPHAQEGTARTCSSEGAPQAPPPGFTLPEAEDIIEDGEILGISAEDQLKLRPLHQEQSFTEAERNTCSQAPADHHASQGPPYDIR

SEQ ID NO: 51423 - protein, 118 aa, Zea mays
  Coding DNA Sequence Number=SeqID_9644
  Homolog annotation: Hit_ID=O64855; Match level="QueryCoverage=37%, HitCoverage=9%, E-value=1e-14, Identity=77%"; Hit description =Expressed protein
MYVRRVLQLRHGRVLQLLAATPGALFEDKPQSANDTWRKLHSDPLLLIRQREQDAISRIKNNPINQDGRDKEICFVNDFVVVLVDGLCDVDLSLCDTELNLYIYVIMCIKIGDCDTNL

SEQ ID NO: 51424 - protein, 85 aa, Zea mays
  Coding DNA Sequence Number=SeqID_9645
MARSKSDKGKREKKASGDPGLGGGGLQEEGSEEDDSEKEDNDRADEGGYDGDDEGGKDDNSNGGSGKDDSGGGEGGNTDGKAPPA

SEQ ID NO: 51425 - protein, 54 aa, Zea mays
  Coding DNA Sequence Number=SeqID_9646
MNAPESFPKPLEPRRGCPPYLLVLETGISAMLTVKSGLGILFDYKNFEYFYEDD

SEQ ID NO: 51426 - protein, 40 aa, Zea mays
  Coding DNA Sequence Number=SeqID_9647
MAVAQIWAAGGRWHELMFGGGRGASRAGRLRDGFGADINI

SEQ ID NO: 51427 - protein, 85 aa, Zea mays
  Coding DNA Sequence Number=SeqID_9648
MEEAIGSQLENDEEVRCEEDANDKGMAWAIPSHNGSSAPGCSTTVGQGLSQRSRVLADFVTPTCGSTFSMVGHGTNLDVLPLMLS

SEQ ID NO: 51428 - protein, 133 aa, Zea mays
  Coding DNA Sequence Number=SeqID_9649
MAGAGDSARAKKARGGCGWPGGLSSTTRYRYWRSLATNRRDRENGGERKEGPAGKFTSGGAGTVARLCLTMAEHGRGRQPSSTGGGFGLRRPGDGEALTSLKSGCTQLGFSIQNQTKFQIQANSNMCNNSKNI

SEQ ID NO: 51429 - protein, 367 aa, Zea mays
  Coding DNA Sequence Number=SeqID_9650
MVLIPGKRNENGLMFVDINIAGQKRSALIDTGASDLFMSEKAAKKLGLSIRKSNKKIKVATSEKAPTVGVVRDVELQIGEWKSKEEFEATLQLGADQIHIATGSSTKNIVPVHRDVKVGTKVLSSIQLVEDVSYGRNIKSSKRNATKAPSEVLVAQGTDMKPAGPTVEPTPLGKVGGASGSKGKGAMQGQSRRVNATSKVHCKHSDSVLNSDLLAWQGRRGPFKVHKQGGQGTVGSTKPRYENRRDSNRNKSKLGQVIAETSCQQNVPTSGTVQDKRRRKSRHKFRRKGQPDRKTSREEAEATRKFHSESSQCHPENATRALRDWVGENVTGQSAKPVTMPQEVPMEVYRLDGGHLAHKNWPDSESY

SEQ ID NO: 51430 - protein, 131 aa, Zea mays
  Coding DNA Sequence Number=SeqID_9651
MEEAKDLESLPIHELIGSLQTFEKNPDEAKPIYINVNLVIFGINWNKLHSKKYMVFMNRYKESKWKWNVYKICSVTGQSAKPVTMPQEVPHGGLSIRWGTFSPQELARFRELLKKPIRLKPSWPNDEDMAA

SEQ ID NO: 51431 - protein, 58 aa, Zea mays
  Coding DNA Sequence Number=SeqID_9652
MNNPLKAKKRYTFDAKAAKKYAPRGTMPRLHKQKWLDRLLCIQRKLSGVLKSEHNFIR

SEQ ID NO: 51432 - protein, 756 aa, Zea mays
  Coding DNA Sequence Number=SeqID_9653
  Gene Ontology: Mol. function=nucleic acid binding; Cellular component= chromosome, pericentric region; Biological process=regulation of transcription, DNA-dependent
  Homolog annotation: Hit_ID=Q9XFH4; Match level="QueryCoverage=98%, HitCoverage=96%, E-value=0.0, Identity=62%"; Hit description =SWI2/SNF2-like protein
  Pfam annotation: Domain name=DEAD; Domain location=205-374; Score= -11.4; E_value=5.2e-05; Accession=PF00270.19; Description=DEADDEAH box helicase
  Pfam annotation: Domain name=Helicase_C; Domain location=534-613; Score=101.6; E_value=2.4e-27; Accession=PF00271.21; Description =Helicase conserved C-terminal domain
  Pfam annotation: Domain name=ResIII; Domain location=201-368; Score= -17.3; E_value=0.0013; Accession=PF04851.6; Description=Type III restriction enzyme, res subunit
  Pfam annotation: Domain name=SNF2_N; Domain location=207-506; Score =411.4; E_value=1.3e-120; Accession=PF00176.13; Description=SNF2 family N-terminal domain
  Pfam module annotation: Pfam domain module=DEAD::Helicase _C::ResIII::SNF2_N; Domain location=205-374::534-613::201-368::207-506
MGAENGKGNDVSAESPTSVLEDEEKCKEEITKLEEETVLDAKNGDTSLLSEAMVEEEEKLREARLKEEIKQGEPEESVHLNDTQFTRLDELLTQTQMYSEFLLEKMEDITFVFRSHLSFACTFTILIGLSVPKPEAAQTKRGRGSKRRAANQYNNRKVKRAVAAMLTRSKEGETENAEDENLTEEEKNEKEQGELVPLLTGGKLKSYQLKGVKWLISLWQNGLNGILADQMGLGKTIQTIAFLAHLKGNGMNGPYLIIAPLSTLSNWMNEIARFTPSINAIIYHGTQKERDEIRRKHMPKVIGPSFPVVVTSYEMAMNDAKKFLRHYEWKYVVVDEGHRLKNFQCKLVKELKHLRAGNKLLLTGTPLQNNLAELWSLLNFILPDIFQSHEEFESWFDFSGKSNGEVSKEEMEEKRRAQVVAKLHAILRPFLLRRMKSDVEQMLPRKKEIILYASLTEYQRNFQDHLLNKTLESHLRDRGDSGRGMKGKLNNLMIQLRKNCNHPDLLEAAFDGSCTFLVLIFSQWTKVLDIMDYYFSEKGFNVCRIDGSVKLEERRRQIQEFNDVNSDYRIFILSTRAGGLGINLTAADTCILYDSDWNPQMDLQAMDRCHRIGQTKPVHVYRLATAQSVEVFTVSLFYMWTFLCRILKRAYSKLKLEHVVIGKGQFHQERKQSNDLVEEEDLLALLRDEETAEDKMIQTDISDEDLERILDRSDLIADTSDKEKAQASADAVPLKGPGWEVVLPTGTGGMLSTLNS

SEQ ID NO: 51433 - protein, 616 aa, Zea mays
  Coding DNA Sequence Number=SeqID_9654
  Gene Ontology: Mol. function=oxidoreductase activity, acting on the CH-CH group of donors; Cellular component=mitochondrion; Biological process=tricarboxylic acid cycle
  Homolog annotation: Hit_ID=O82663; Match level="QueryCoverage=99%, HitCoverage=100%, E-value=0.0, Identity=84%"; Hit description =Succinate dehydrogenase [ubiquinone] flavoprotein subunit 1, mitochondrial precursor
  Pfam annotation: Domain name=DAO; Domain location=47-383; Score= -28.3; E_value=0.0004; Accession=PF01266.14; Description=FAD dependent oxidoreductase
  Pfam annotation: Domain name=FAD_binding_2; Domain location=47-443; Score=602.2; E_value=4.6e-178; Accession=PF00890.14; Description=FAD binding domain
  Pfam annotation: Domain name=Pyr_redox_2; Domain location=47-431; Score=-31.9; E_value=0.026; Accession=PF07992.4; Description =Pyridine nucleotide-disulphide oxidore
  Pfam annotation: Domain name=Succ_DH_flav_C; Domain location=484-616; Score=288.1; E_value=1.7e-83; Accession=PF02910.10; Description =Fumarate reductasesuccinate dehydroge
  Pfam module annotation: Pfam domain module=DAO::FAD_binding_2::Pyr _redox_2::Succ_DH_flav_C; Domain location=47-383::47-443::47-431::484- 616
MWRCVSRSLRAPYSNRSVAANSLRSNISSFFSTHAGSPYTIVDHTYDAVVVGAGGAGLRAAIGLSEHGFNTACITKLFPTRSHTVAAQGGINAALGNMTEDDWRWHMYDTVKGSDWLGDQDAIQYMCREAPKAVIELENYGLPFSRTEDGKIYQRAFGGQSLDFGKGGQAYRCACAADRTGHALLHTLYGQAMKHNTQFFVEYFALDLLMNSDGSCQGVIALNMEDGTLHRFQASSTILATGGYGRTYFSATSAHTCTGDGNAMVARAGLPLQDLEFVQFHPTGIYGAGCLITEGSRGEGGILRNSEGERFMERYAPTAKDLASRDVVSRSMTMEIREGRGVGPLKDHIYLHLNHLPPEVLKERLPGISETAAIFAGVDVTKEPIPVLPTVHYNMGGIPTNHHGEVVTIKGSDPDSVVPGLMAAGEAACASVHGANRLGANSLLDIVVFGQKQKPLEKDAGARTISWLDKIRNSNGSLPTSNIRLNMQRVMQNNAAVFRTQETLEEGCQLIDKTWESFHDVKLKDRSLIWNSDLIESIELENLLINACITMHSAEARKESRGAHAREDFTKRDDENWMKHTLGYWENEKVRLDYRPVHMNTLDDEVESFPPKARVY

SEQ ID NO: 51434 - protein, 294 aa, Zea mays
  Coding DNA Sequence Number=SeqID_9655
  Gene Ontology: Mol. function=DNA binding
  Homolog annotation: Hit_ID=Q1SFS3; Match level="QueryCoverage=59%, HitCoverage=33%, E-value=1e-11, Identity=29%"; Hit description =Lambda repressor-like, DNA-binding
MESGFLDKVEDNAAVRTWFETTQQEKGDSLADGHVDKRLFQALAQFWNPAYSCFTFGKVDLVPTIDEYMTLLRCSKFQVDRVYSRAVNVPTFSKKLMSVTGISEQWVVARIKQKGDSKCIPWRGLKDAILTHPDVRKMLDVFALSIYGLVVFPKTLGYVDETVTDLFDRLDKKVTPIPAILAETFRSLSACRKTGEGVWGVTGYAPLLVLRQYISRQFIPATQGLADCEFSYKDDGYRKKIQEMVSAWKQTRRMKRLTVGPMTTPGYHQWWARRINDNTPKLNQEESQSIEEHL

SEQ ID NO: 51435 - protein, 269 aa, Zea mays
  Coding DNA Sequence Number=SeqID_9656
  Gene Ontology: Mol. function=DNA binding; Cellular component=nucleus; Biological process=regulation of transcription, DNA-dependent
  Homolog annotation: Hit_ID=Q0PJK8; Match level="QueryCoverage=96%, HitCoverage=87%, E-value=2e-84, Identity=61%"; Hit description=MYB transcription factor MYB75
  Pfam annotation: Domain name=Myb_DNA-binding; Domain location=115 -162; Score=48.3; E_value=2.6e-11; Accession=PF00249.21; Description =Myb-like DNA-binding domain
  Pfam annotation: Domain name=Myb_DNA-binding; Domain location=15-64; Score=34.9; E_value=2.7e-07; Accession=PF00249.21; Description=Myb -like DNA-binding domain
  Pfam module annotation: Pfam domain module=Myb_DNA-binding::Myb_DNA -binding; Domain location=115-162::15-64
MSNSDWFDQEDISRNPYWTKEENKRFESALAIYGEDVPDRWMKVAAMIPGKTVSDVIKQYRELEEDVFDIESGRIPIPGYLTSSFTFEMVDNHDFEPYRKRSNGAKGPDHERKKGVPWTEEEHRRFLMGLMKYGKGDWRNISRNLVVSKTPTQVASHAQKYFQRQLSGGKDKKRPSIHDITTLSITTPNTGFSDNQSDHVLALHQKLSSTLQKVDQNNDASAMALNSSQEGWFTSSQQYLTASNGLRFQGQNLYGNGFHGAQPPQSSVF

SEQ ID NO: 51436 - protein, 342 aa, Zea mays
  Coding DNA Sequence Number=SeqID_9657
  Gene Ontology: Mol. function=DNA polymerase processivity factor activity; Cellular component=PCNA complex; Biological process =regulation of DNA replication
  Homolog annotation: Hit_ID=Q00265; Match level="QueryCoverage=93%, HitCoverage=100%, E-value=2e-87, Identity=52%"; Hit description =Proliferating cell nuclear antigen large form
  Pfam annotation: Domain name=PCNA_C; Domain location=123-250; Score =232.2; E_value=1.1e-66; Accession=PF02747.6; Description =Proliferating cell nuclear antigen, C-terminal domain
  Pfam annotation: Domain name=PCNA_N; Domain location=23-121; Score =164.7; E_value=2.4e-46; Accession=PF00705.9; Description =Proliferating cell nuclear antigen, N
  Pfam module annotation: Pfam domain module=PCNA_C::PCNA_N; Domain location=123-250::23-121
LSRKEKKRKEEKIFEKKAERKTMLELRLTRAGLLKKVLESIRDLVTDANFDCAATGCSLQAMDSSRVAMLSLLLRPDGFEHYRCDRNISMGMNLANMARMLRSQDKISDYEMKLMHITSENLEIPEAGYEAIVKMPASLFARICKDLGTIGDTVMISVTKEGIQFFTRGDIRTANIFCRKTTPVAKEKEAISIEMEKPVSLTLALRYLISFTKATPLAKQVTISMSYGRPIVVEYKMEIMDHIRFYLVPKVEEEVTGPLENVAEADTKSKPDVKPEVEEKPKEVIEIEEGSELKAETKLKPEKNDIDDQSEPKLGTKPKEGRINGTMLQVEDKTEVELMDVE

SEQ ID NO: 51437 - protein, 509 aa, Zea mays
  Coding DNA Sequence Number=SeqID_9658
  Gene Ontology: Mol. function=adenylosuccinate lyase activity; Cellular component=cytoplasm; Biological process=purine ribonucleotide biosynthetic process
  Homolog annotation: Hit_ID=Q8VZX0; Match level="QueryCoverage=94%, HitCoverage=87%, E-value=0.0, Identity=79%"; Hit description =Adenylosuccinate-AMP lyase
  Pfam annotation: Domain name=ASL_C; Domain location=368-482; Score =306.6; E_value=4.5e-89; Accession=PF08328.2; Description =Adenylosuccinate lyase C-terminal
  Pfam annotation: Domain name=Lyase_1; Domain location=40-358; Score =165.8; E_value=1.1e-46; Accession=PF00206.10; Description=Lyase
  Pfam module annotation: Pfam domain module=ASL_C::Lyase_1; Domain location=368-482::40-358
MELCSCLGFEKKKEKLFKAIKDDSREFELSSLTALSPLDGRYWGKVKDLAPYMSEYGLIYFRVLVEIKWLLMLSQIPEVIEVPSFSAEAQSYLLGLIDGFSMDDALEVKKIERVTNHDVKAVEYFLKQKCQSQPEIAKVLEFFHFACTSEDINNLAHALMLKEAMTKVMFPTMDKLVEAICKLAKANASVSMLSRTHGQPASPTTLGKEMAIFAVRLSRERQEISQVEMMGKFAGAVGNYNAHIVAYPTVIWPQIAEQFVTSLGLKFNPYVTQIETHDYMAKLYYAIIRFNNILIDFDRDIWGYISLGYFKQLMSFRGQNLEQITKAGEIGSSTMPHKVNPIDFENSEGNLGKANEDLTYLSMKLPISRWQRDLTDSTVLRNMGGGLGHSLLAYKSALQGIGKLQVNEARLSEDLNQAWEVLAEPIQTVMRRYGVPEPYEKLKELTRGRAVTKESIREFIEGLELPEEAKTHLLKLTPHSYVGAAVELAKTVDSAVNVINGSEVLETCR

SEQ ID NO: 51438 - protein, 267 aa, Zea mays
  Coding DNA Sequence Number=SeqID_9659
  Gene Ontology: Mol. function=acid phosphatase activity; Cellular component=integral to membrane; Biological process=translation
  Homolog annotation: Hit_ID=Q1S5H6; Match level="QueryCoverage=87%, HitCoverage=76%, E-value=1e-44, Identity=40%"; Hit description=HAD superfamily (Subfamily IIIB) phosphatase, putative
  Pfam annotation: Domain name=Acid_phosphat_B; Domain location=33-262; Score=43.2; E_value=5.8e-12; Accession=PF03767.5; Description=HAD superfamily, subfamily IIIB (Acid
MSAYGHQMEREFSSQSLLSREDTVMLQSCESRSKGVVEIEKASDSYHYCKAFALHGELNSLEEPEIPPVCWNLAIHYIEGGEYERDLNFTISMIESFFDTISPSDNHLDAVLMDIDDILASNHTYSHQSMHQQQFNQYGSNKPSGSIEDAANLKHWRILELYVKLKSRGWSLILLSRKPERQRNVTAEQLKAVGFNGWSSLIMRADSEMEMETWEYFRTRRTAMKEEGTQIISVISSQLDALTGSSLGKRVFKLPKPLHYNSQTPTL

SEQ ID NO: 51439 - protein, 83 aa, Zea mays
  Coding DNA Sequence Number=SeqID_9660
MAQPHARSVSRYPSLVLVLPAKGLVGTVEFLIGIEWRRVATYGVDSATDASTTGRSGSLEHWGAYTDKGRHRGGWVSLPDASG

SEQ ID NO: 51440 - protein, 361 aa, Zea mays
  Coding DNA Sequence Number=SeqID_9661
MGGGEVEDYGFAVVASIDGAAGGGDGGRNGAGQERAAHAVVLMLLLGFDRRRLQVQGDTVQYGCSVEGAVLGSFDNDLLPSIELVTKMIEDVELLEEKAKVAKHELSVAGTGILAKVEELREMITYAKEANDMVFPSNPHAGKVLGEKAILTTEARELLSRHQRLSDERNKYLVIIEEIHQILAERLVAAQQEIAAAEKENAEKEAAAQAVLDEQEKMMNSIVEESRKLQKEAEENLKLKEFLVERGQIVDMLQGEMAVTCEDVSLLKRVVDERLPLSKLQRSAMSSLSSSLHSSHHKSWTSSDKAIRSPDKHTLAEPASPVGKDLDGNECTVEVSDGNDSGEGILKRVDSKEDVDGWELC

SEQ ID NO: 51441 - protein, 173 aa, Zea mays
  Coding DNA Sequence Number=SeqID_9662
MQLMDDPRKDGHDQWMLAKQVPSSRHYLVWIPGQQALQAAEFASSKRKQAEQWSTGCTSEAGGAKQSRQAAVEQWRWSTAVRPPASQRPTGQPDKHARTAGRQRQPPARQDRSPQEAEARDGGGQAAADGQAVGRPGESRADVLCCSGCVAAAVLYLLVLVDGVTWPPSLPPG

SEQ ID NO: 51442 - protein, 109 aa, Zea mays
  Coding DNA Sequence Number=SeqID_9663
MADGGIGDREPLDYKASARIRLSPHRIGTHSPPSDLNPKAHILKNPDPIGAVQIGMNGTDDSPRPRTAEVGRNLAESAPCAVSPNDGEGLFRGRVGATARNRQRSGAPA

SEQ ID NO: 51443 - protein, 57 aa, Zea mays
  Coding DNA Sequence Number=SeqID_9664
  Gene Ontology: Mol. function=binding; Cellular component=chloroplast; Biological process=photosynthesis
  Homolog annotation: Hit_ID=P61843; Match level="QueryCoverage=82%, HitCoverage=28%, E-value=6e-16, Identity=79%"; Hit description =Photosystem I assembly protein ycf3
  Pfam annotation: Domain name=TPR_2; Domain location=7-40; Score=20.8; E_value=0.0048; Accession=PF07719.7; Description=Tetratricopeptide repeat
MKAIINTEVAVNKGDSEIAEDWFDQAAEYWKQAIALTPGNYIEAQNWLKITKRFEFE

SEQ ID NO: 51444 - protein, 112 aa, Zea mays
  Coding DNA Sequence Number=SeqID_9665
MPYSQEKLEQPSTKGYLYPKPTQVSTKLYDHVWGLTPAQCQKVKEVGELMTGKPATEASVKIPCRLRWKAKKAPFRGARAISEIPLWKSSDSNLVSDPWAKGQSQVDSFYGA

SEQ ID NO: 51445 - protein, 58 aa, Zea mays
  Coding DNA Sequence Number=SeqID_9666
  Homolog annotation: Hit_ID=Q5W7C9; Match level="QueryCoverage=100%, HitCoverage=35%, E-value=1e-17, Identity=55%"; Hit description =Unknow protein
MGESLMEQCRVEVEGLRVVNFFSRTRNNDGLNPGQAVETTKLEYGRGRRNFQWSGEMH

SEQ ID NO: 51446 - protein, 787 aa, Zea mays
  Coding DNA Sequence Number=SeqID_9667
  Gene Ontology: Mol. function=DNA binding; Cellular component=nucleus; Biological process=regulation of transcription, DNA-dependent
  Homolog annotation: Hit_ID=Q1RYJ7; Match level="QueryCoverage=96%, HitCoverage=65%, E-value=1e-99, Identity=30%"; Hit description =Timeless protein; Timeless C-terminal
  Pfam annotation: Domain name=TIMELESS_C; Domain location=280-786; Score=-27.0; E_value=5.8e-09; Accession=PF05029.4; Description =Timeless protein C terminal region
MCLYSMYISSRKSTTACILWALILQHLALQIDMIYLVLKVLPEDSRESQTARVLLYKLFYDQTEHGLTQFLLNLFRSFDSHKQPKSDLVDLLETIHIMLQLMEKLQARGALRVAKKTKKVRRKKSTNDKKENSEPKVDNAEPNDANPTDGTKCSPETLPDLRSEGPALESSPSEPGKVDTSGAHVLDTLVDTVVNIESTAHAEGDPSCTDSGVMKRNLIEEEGETSDSSVDHQPATSEVDFNVSRLISSLANNSVVQNICWLLKHYKSNSYRTNHYIICMLRRFCEDLELSPMLYQLSLLTTFYDILAEQKLSSSKEYTNIVNFLSKVVRKMLRTIKKQPLLFVDILFWKTRKECHCIDADALLNELKNDVGSKDSEIGSSKGWRDRINIADSLGDDEVDVVIPQAPYDADKDGDLSAGEHTDDFRKSSTKYKRSRLSLSDSEADEIERFLNHVSRDSVPKVPKRRGRSLFTEEQERLIRDLYEKYKDGPKCSHIIAESLDPSGKISSAQVSRKLTQLGLRNVTRRKKVAGPEGKNYTRQVMTMMTQVRENHLMKTHYKSKSKKVPLVDSSLSGSQHQEAQHDPDSDDATIGSMIRSRKKKRLSTSDFEGNVRNHQESSDNTKAKDCSPIISQHEKALQDIYPDDETIGSIIRSVKKKRSVTSNFSANIEAQESLRNINLQDETVVSNIMDASVNHGSDPVNNSDNTVEDELLDDFETELVNNGGNTVEAELLDDFEVELDDHEHTDQRITDDEIMTESGKATNSDAKGRAGLKRRHRMVIDDEDDD

SEQ ID NO: 51447 - protein, 70 aa, Zea mays
  Coding DNA Sequence Number=SeqID_9668
  Homolog annotation: Hit_ID=UPI000034F013; Match level="QueryCoverage =52%, HitCoverage=8%, E-value=1e-09, Identity=75%"; Hit description =bile acid:sodium symporter
MGKMSLLEKADRIAVSHYIKIEEKYETKPSKTLPVMITVVEQLGGALGESGLLVIPCVFAHINQVLIAKT

SEQ ID NO: 51448 - protein, 240 aa, Zea mays
  Coding DNA Sequence Number=SeqID_9669
  Pfam annotation: Domain name=DUF1645; Domain location=66-218; Score= -39.7; E_value=0.0091; Accession=PF07816.2; Description=Protein of unknown function (DUF1645)
  Subcellular localization annotation: CTP_CleavageSite=35; ConfidenceScore=5.02e-01
MPDTEGGHHRGDAAVARQLDLVAPPAAPATTSSSRATTTATATATARHDDEEEDGFTFAAVAVPCPVYAVFGRPRWSPQKQRQQEEEEEEEGPAGTGAATARRVPLGRLLLEERWCDDGAPSVSGKQPADAAEAELDGVPAETYCLWSPASPAAGSSRRASPARCRTRGSAGLSVLRWQRQRRVAAGKDKFVFLAGAGEGHGSAARGGGKSTTTTFLPWKQDLVGLVASAITFRPSCQPF

SEQ ID NO: 51449 - protein, 208 aa, Zea mays
  Coding DNA Sequence Number=SeqID_9670
RSRAQAGVSVQFPSRAELTLRAMGRRGSGGEDHRPQQEQEEQRAAVPRRGRWLDEERPHPHQPAAAGWRCRSCAAAAIADCVALGCCPCAVVALLALALVRAPLAVGRRLRMRRRSALRRKRVRDVAAKVAPRAAPGAGSGTTPLDPAAAATPVRQQQQQTQTQAEVEELAWLDEMYRVGHWGFGRVSFSGGRSLVPGTCRVHGTFGA

SEQ ID NO: 51450 - protein, 218 aa, Zea mays
  Coding DNA Sequence Number=SeqID_9671
  Homolog annotation: Hit_ID=Q84XZ3; Match level="QueryCoverage=22%, HitCoverage=12%, E-value=2e-17, Identity=88%"; Hit description =Mitogen-activated protein kinase
MEPSINALLCSAINARLPIAEGGRGSAPSTLAIGPVRDISTAIMEGCRGRHQRHPPHAVDGARRQNRAPPPHAESPSAINALLHQRALTEPRPLSHTESPSAINALLHPLPFLHRPRQPLSTYDYKWGGLQLIPTSLPQDTDSIIDPQAADSTKIVAIRDIIPPAQRAAFNDVYIAYGLMDTDLHQIIRSNQALSEEHCEDTLKDSVLYIFCVSSNVP

SEQ ID NO: 51451 - protein, 160 aa, Zea mays
  Coding DNA Sequence Number=SeqID_9672
  Homolog annotation: Hit_ID=Q6YX79; Match level="QueryCoverage=33%, HitCoverage=5%, E-value=3e-10, Identity=64%"; Hit description=GHMP kinase-like protein
MVVVWSKTKTTRFYAVVWHVWHDRRSRLHNQEDEFGRTTTNAINNQASTNYNACLLGSDGTDRLVNLVQEVRHRKKASRAGGPSLFGAKTNNSPRSRSVWWQWLNTSCPRGSVAASDRLDDSGAASGGAVDGGAKVAMEGMVAARMVELASPIPRTRREQ

SEQ ID NO: 51452 - protein, 113 aa, Zea mays
  Coding DNA Sequence Number=SeqID_9673
MEKENGQQIRLQMKLFILCPTEQSKEFLITAGVTPSKFRITKLFLSLPESVALPSARRFAECRTRQSLALGNERVYREQDSKQRITLGKGILPSAKHSAKAALVKGPSAAGYN

SEQ ID NO: 51453 - protein, 90 aa, Zea mays
  Coding DNA Sequence Number=SeqID_9674
MECRGHQSEREKKICRCGVGAVKDRRARWPSATSLRLYWLAGESPKLVYLGSAWVVTIGYPGRVATLSDSIFADVVRPPPRLGHSATGFT

SEQ ID NO: 51454 - protein, 100 aa, Zea mays
  Coding DNA Sequence Number=SeqID_9675
MTTDFDTALAYATGGDTIDDATDDSVDAASDTNVNDASNDTIDVAATYAVGISSYGAFTNAVAICSMADTTTSTPGVAEGVFLVYDRRIPSVWLGLDLWP

SEQ ID NO: 51455 - protein, 291 aa, Zea mays
  Coding DNA Sequence Number=SeqID_9676
  Gene Ontology: Mol. function=protein kinase activity; Biological process=protein amino acid phosphorylation
  Homolog annotation: Hit_ID=Q5VRE1; Match level="QueryCoverage=34%, HitCoverage=13%, E-value=2e-30, Identity=64%"; Hit description =Putative wall-associated kinase 4
  Pfam annotation: Domain name=Pkinase_Tyr; Domain location=107-234; Score=-139.4; E_value=0.00064; Accession=PF07714.7; Description =Protein tyrosine kinase
MARWRAGAVAEKRRRWPRKHGDIGTTRAMCPLLSMGRWHRANGGMAVALSRTMVEVKTKDNEREVVVVVGALGHHGGMLLLHEISLKQGTTFIVFTEAELVEATDNLADKNILGHGGFGTVYRGLLKDGGVVAVKRFISSMASEQQKEFGKQMLILSQINHKNIVKLLGCCLEVERSQLYMRLVVFPRHEKVVRQELTFALSISGVTGGLSEREPPPLSGLLLCENTASGRAVLGSGTPAGATGGGVVGSGGRGRERARRRRRAAAASILLEDTGERKKSEKRIRLGSGLR

SEQ ID NO: 51456 - protein, 695 aa, Zea mays
  Coding DNA Sequence Number=SeqID_9677
MKDLLYLFALFMPELLLSLTVSYDLKEEVATCERPTSVVKLITGRLKDADVVFIDALRAATCGFDFRRIVESHLCIPVVYFLSRDYGVTGDVSEALQRTVWAATYVVRKPLDAGELSRLWKVIKWSKFLLRRAWPEWPRGSRVRPAVVGALLPGSSTVDGRWEDDDDDGREHFRAVRAGRGRRRKLGDRQYHGGRSSGRGGGGGVAGPFGIGIGIGRRQPTERLEQMNLTGWQQENDDDDGVFPIHQQPAQQNRPGVQTMDDVQNQQHGRSLFMQPGPQTLNVPHNNPMISPDAGWPSSSNVAAFAGASNTTGPTLLQGVYQAPAARGARAASPAPHAVYAPPAPGLRPPVYQQQQQPMAPLYDFGDMVAPPAAVPLPIPTMAATSGHQPQFTLNHHHQQQQEEEISHRPLILSPLWLAVALSRLWRLGRLAVARAFGASSPTGATDAGAYGAAAVAQAQLQSPNAGAQPADSSFDDVLRAMMEMDYYANNCSAEALMAPATDELAGMQAAAALGSSGNYNAGPFMVTDANGGNGTPFMALALAPQDPAAPTGNQNQVQVELGAPDIYGGSLLVGSHQGGGTSAMFNGDGDMAPMFPSNEYGATANAMFSLDALLDFDDGVPTYPEGHQVAAADSTTASNATGIMSNGGESGGSGPSWNMGAAAADEGLDMLEEFLMEDNESGFLLPQDMNNGLQ

SEQ ID NO: 51457 - protein, 859 aa, Zea mays
  Coding DNA Sequence Number=SeqID_9678
  Homolog annotation: Hit_ID=Q9C597; Match level="QueryCoverage=35%, HitCoverage=56%, E-value=2e-39, Identity=34%"; Hit description=DNA excision repair protein
  Subcellular localization annotation: CTP_CleavageSite=7; ConfidenceScore=5.13e-01
MPRPRSRDKAASPPSPAGARQRTPAPSPSTSLHLGIGPASPDNDLGVGSLDLKQPAAAPPRHSLLLAGAALRLGLGPASPDDDRGARSPNLSPPAAAPPRRSLRLAGSRNTLSVSGRGEKGARRAHARVSASSLATTVSPRAGNSSSDDSGSGADTALASGERYGSAVPFTTRSRIVKRRAEASPQAGGEVGIGSAGRGQVPDEMLHRDVGTPSKRCRTVLVGGVETVYMSDTESDSDEDCMMLGPSGTELNPIAVDMTENGSLDDPANASDVESLQTHNLLGTTNVGVVEQSVYPSGSASSFEARISADMYVSSHYSSRKGSKVNGKLVLENNSSRADANVGSAVGTSPRKFNPYSKGKGKMVAEDTLSSLVSSEDEPDLDPVHSKETQVNPGSVSASMVSYRRQKAKERAIRLAPEFAFFKADKDEHSEDDDEELEPGPDSQDWPGSFVTAARMYEEREAKLRARELNSSKLNKSANRVIVWSPSKDEKNPARAQAAPSLTSLCLNTLAKHSECIGTLEGIPEELKNRLFKILCHSRKMNTYLLNELLCDSPTELHLSECSWLSEDDFEKTFGKCSIESLQDLQLDISGRCMPDYILPTTLAKVPNCMPLLRKISLKGNYRLSDNGLVTIISAAPSLCSINLCECSLLTSSGINILANKLHSVLRELYIDDCTNVDAMAILPALQKINHLEVLSMSGIQSVCDKFVKGLIPVHGSNLKELAFAGCLELTSASIKTVGEYCQELTSLDLRNLNRLRDSALWHLRGCRLLRKLRLQRNAFSDEAVSQYLEESGGGLTELMLNNVKKSLNDIVMVARSVSDWRGVSIGRNVGRGPLPTAEQEEGFSLLILTYFISHPWIT

SEQ ID NO: 51458 - protein, 131 aa, Zea mays
  Coding DNA Sequence Number=SeqID_9679
MSGTWRWHRDERSPVRPCLGHGMGTDMRTSHYCKATSRILKKSEIVHTINHNCSVFYIESRLSYGMYRDLLILYVCDYDFAKEWCGYLWVVKELTKFICTYKSLSDVSRTYEDDQGLQGGTKPDGVEIKES

SEQ ID NO: 51459 - protein, 113 aa, Zea mays
  Coding DNA Sequence Number=SeqID_9680
MALYKALYCRRCRTPTCCTELGERQALGPELVSDTEEKIEYSVGDFVFLKVSSWKMIQRFGQKGVFEKPEFKSWVLQGSNGVGLKHSCGEFEWVLNGVVGGVEEEVVEKIKEG

SEQ ID NO: 51460 - protein, 316 aa, Zea mays
  Coding DNA Sequence Number=SeqID_9681
  Homolog annotation: Hit_ID=Q9FJ89; Match level="QueryCoverage=94%, HitCoverage=95%, E-value=5e-94, Identity=51%"; Hit description =Arabidopsis thaliana genomic DNA, chromosome 5, P1 clone:MSG15
  Pfam annotation: Domain name=TraB; Domain location=99-268; Score= -56.9; E_value=1.6e-05; Accession=PF01963.8; Description=TraB family
MDALLKSSFPIFSANPKFLSTKHVKPLKVSIKPPPPDFDFRADILAESTAKIGQTYPQLVDLAENGTLVLVEKRQFGPVPAWRTEFVEPEAIWLLEFIFRAGIMYISSGVENGEQLRSNMFSLSGTGFFGAVGRSINLGGQTALALRLLLALFSSKLSSDLNRPFGDEFRAARKASEEVGAQIVLGDRPIEITEQNYENDTFQLYERLSFSYPSLLQPLVHERDTYLAWSLKRSKAVNKCKTVVGVIGKGHMNGVIYALVSDQGNLRFRDLAGKTPSEAESNGWVQRLLKSLARDTLIGILLWALYEQIKSAGILL

SEQ ID NO: 51461 - protein, 119 aa, Zea mays
  Coding DNA Sequence Number=SeqID_9682
  Gene Ontology: Mol. function=DNA binding; Biological process=DNA integration
  Homolog annotation: Hit_ID=Q0ZCB6; Match level="QueryCoverage=64%, HitCoverage=18%, E-value=3e-13, Identity=42%"; Hit description =Integrase
MKEVVKKEIIKGLDAGIIYPIFDSSWAFEQLKKRLVAAPFMVAPEWTLSFELMCDTNDYVVGVVLGQKRNKGKFVLFDENHINAQFGIEEARDEHFEFFENITSKGLAKVLEDLCVEGT

SEQ ID NO: 51462 - protein, 147 aa, Zea mays
  Coding DNA Sequence Number=SeqID_9683
MSKAYDCVEWNFLEKFMKKLSFEDVWVDKFMQCVQSVRDVNEEGDGQCLLGTEFAFPRYFPSGDIFHPTVVDKPSYIWTSIATVAKALENGTIITHVGTKRSNNFLSCNNFFFYSINFLLSNKTYTMGEDATGLSRSSKLSSEEERS

SEQ ID NO: 51463 - protein, 481 aa, Zea mays
  Coding DNA Sequence Number=SeqID_9684
  Pfam annotation: Domain name=DUF740; Domain location=4-455; Score= -87.3; E_value=0.0005; Accession=PF05340.3; Description=Protein of unknown function (DUF740)
MDPSVSVCRLHPGVAVTGFCPACLRDRLSGLHPPSAADLRRCKSFSYARSAAAVEPQRRSCDLFRHGQPIAAAVPEEEEDQQEHGRSHSHQSKKSSSLGGLLGNKLQQWRRKNKKEPEMEVPSSWDARLGPVPALGRLPATMLSLPVEEDDDSMAAPAVPRSDGQIPVEEDYCYYYDNANNINAAAAVPGGSEQTRDYYLDSSSSSRRRRSVDRSTTSGRNSFSDANSSEAACRMMMMMNAAANGNARVSPAGIAAAESLHHYHESHHHHHHQSVLVHHQCYREEDEQQQEAYNLRAGDFSGSNGVPASKPNKKGIKGWSIWGLISKKSSSSRKHSAAGGGAVAGGGGGGGEYEYPWPELRARGYNGQMLRCNSSISARSSFSGTGTGSGRRSVSGVDMRDKYNSNNGGLRTRRDEVLLERHLSTRSSSYSRSGHHDLDPAAMAPPQMGMQLSSRPPNIPRRSSSNSKHELGKTRRSTLGL

SEQ ID NO: 51464 - protein, 120 aa, Zea mays
  Coding DNA Sequence Number=SeqID_9685
  Gene Ontology: Mol. function=transporter activity; Cellular component= mitochondrial inner membrane; Biological process=mitochondrial transport
  Homolog annotation: Hit_ID=Q8S4C4; Match level="QueryCoverage=90%, HitCoverage=35%, E-value=6e-40, Identity=76%"; Hit description =Uncoupling protein
  Pfam annotation: Domain name=Mito_carr; Domain location=12-115; Score= 73.8; E_value=5.4e-19; Accession=PF00153.17; Description =Mitochondrial carrier protein
MPGDHGSKGDISFAGRFTASAIAACFAEICTIPLDTAKVRLQLQKNVVAAAASGDAAPALPKYRGLLGTAATIAREEGAAALWKGIVPGLHRQCIYGGLRIGLYEPVRSSPQSTIYSAYH

SEQ ID NO: 51465 - protein, 74 aa, Zea mays
  Coding DNA Sequence Number=SeqID_9686
RPENVKRGRGRPTLTWTEAVKRDLKEWNIDKELAVDRKGWKVSSLAYPNVLGTKGFVVVVVVVVVVDFGTELRM

SEQ ID NO: 51466 - protein, 117 aa, Zea mays
  Coding DNA Sequence Number=SeqID_9687
  Subcellular localization annotation: CTP_CleavageSite=97; ConfidenceScore=5.90e-01
MTTTCSSMTTATTPSSSSPKSPLRSTSGRLPSRPHHHDANGSYSTVSFRGSNFSTRPFSIALKYVSTPQIRYTCVCLILQHLDLPENKSTMKWEFSRANMKKMLFAPVLGSSVSQIW

SEQ ID NO: 51467 - protein, 228 aa, Zea mays
  Coding DNA Sequence Number=SeqID_9688
  Gene Ontology: Mol. function=catalytic activity; Cellular component =endoplasmic reticulum; Biological process=metabolic process
  Homolog annotation: Hit_ID=Q2QZ14; Match level="QueryCoverage=97%, HitCoverage=98%, E-value=1e-117, Identity=79%"; Hit description =Sterol desaturase family protein, expressed
  Pfam annotation: Domain name=Sterol_desat; Domain location=18-190; Score=49.4; E_value=1.2e-11; Accession=PF01598.8; Description=Sterol desaturase
MAAPMSAIDSAWQLLIANFTEFQLATVVTFLLHETVFFLSGLPSLLFERFGLFAKYKIQKKSNTSAYQNRCVLRLILYHVCVNLPVMIFSYPAFKFMGLRSSLPLPHWYATPFGLTSEYAHPAEILFLGFATVVGPALTGPHLFTLWLWMVLRVLETVEAHSGYHFPWSPSNFLPLYGGSDFHDYHHRVLYTKSGNYASTFVYMDWLFGTDKDYRKAKTIEEKEGKNL

SEQ ID NO: 51468 - protein, 283 aa, Zea mays
  Coding DNA Sequence Number=SeqID_9689
  Gene Ontology: Mol. function=oxidoreductase activity; Cellular component=mitochondrion; Biological process=metabolic process
  Homolog annotation: Hit_ID=Q942W0; Match level="QueryCoverage=92%, HitCoverage=96%, E-value=1e-84, Identity=63%"; Hit description =Putative tropinone reductase homolog
  Pfam annotation: Domain name=ADH_zinc_N; Domain location=24-183; Score=-13.3; E_value=0.063; Accession=PF00107.16; Description=Zinc -binding dehydrogenase
  Pfam annotation: Domain name=Epimerase; Domain location=28-274; Score= -56.0; E_value=0.017; Accession=PF01370.11; Description=NAD dependent epimerasedehydratase family
  Pfam annotation: Domain name=KR; Domain location=27-216; Score=-26.4; E_value=8e-06; Accession=PF08659.1; Description=KR domain
  Pfam annotation: Domain name=NAD_binding_4; Domain location=30-256; Score=-88.5; E_value=0.0067; Accession=PF07993.2; Description=Male sterility protein
  Pfam annotation: Domain name=adh_short; Domain location=26-199; Score= 115.7; E_value=1.3e-31; Accession=PF00106.15; Description=short chain dehydrogenase
  Pfam module annotation: Pfam domain module=ADH_zinc_N::Epimerase::KR:: NAD_binding_4::adh_short; Domain location=24-183::28-274::27-216::30 -256::26-199
MAATGSGSGGGRQNEEARQRWSLAGKTALVTGGTKGIGLAIVEELASLGARVHTCSRTAGDLDACRRRWADKGLVQAGDVITTSVCDVSSERDRESLVATVRDIFHGSLHILVNNAGGSLYRPAAATTPDDYAHLMATNLDSCFHLSRLAHPLLRRAGGAVVVHMSSVAAFVAYPALSAYSVSKGALQPLTRSLAAEWAPHGVRVNCVAPGVIDSTGISGTTLGDASRARRLAEMEMSRVPMRRFGTPQEVAALVAFLCMPAASYITGQVICIDGGRTVAAKL

SEQ ID NO: 51469 - protein, 59 aa, Zea mays
  Coding DNA Sequence Number=SeqID_9690
MAKRRRLGAVRTARASEQKEKGLFDLLTVELDEPRQGSQTFDFKRLRSAAWQGMNQTCL

SEQ ID NO: 51470 - protein, 504 aa, Zea mays
  Coding DNA Sequence Number=SeqID_9691
  Gene Ontology: Mol. function=RNA-directed DNA polymerase activity; Cellular component=integral to membrane; Biological process=RNA -dependent DNA replication
  Homolog annotation: Hit_ID=Q7FS87; Match level="QueryCoverage=52%, HitCoverage=43%, E-value=1e-49, Identity=62%"; Hit description =Putative glycerol 3-phosphate permease
MKTVPIKIPSKSLLPPSQDLHEDSQSPVPAEADNRKKRPILVGTEVRSARLREKARGFKSCYGIRKNCSCCARPSPPSIPYKIIKKLGTEFCKVDPSKLCPDALNRSRSSSSAIQRPHSSSSNRAELRATSEDLRDESEDEDDVGSRPSVGMPGPPTSLPLLPIPWLGVPQTTFPGWSMSKSTFPNRPSSDLKIIGSNWKTFIQFSKALGPKGCFSLIQRNDLWLNLKGQESLLATCPHWRCPSPTPVIASDFYELCDKFFDGSICLDSINGSYVTLIPKHSSPVSVGDYRPISLLNTSMKAPTKLLTNRLQLVITKLVHQNQYGFLKAWTIQDYLAWAFEYISICHKSGSFWWKDILKLQDVFKEIARVEIGDGKTTFLWYDRWDGLRKFEKFLELWSFASLRDININQARLASPNEMFHTPLSTEAFEQLLTLRDILANIQLHDHNDKWRCNGSSKLFSLRKVYSHLIGNQQSHPLFSWLWKSKCQPKHKAAFNAFGFFYLR

SEQ ID NO: 51471 - protein, 92 aa, Zea mays
  Coding DNA Sequence Number=SeqID_9692
NVEMFDELVEKAKVVEETLAELPRFVTYSSAHASVLAGGRGHGRGNGRLVGQRSVAHTVATLVESGGPAQVYAIREPQDQDSNVKIESIFAL

SEQ ID NO: 51472 - protein, 285 aa, Zea mays
  Coding DNA Sequence Number=SeqID_9693
MEIVGATVANVEVLFLRKVEEENTVQLVFNQNINLTELRKRIRRKIFGTTPMKVLSITYRFCSSVDPVTYDSFDIKAAHSLEAMVQTHLASGTPYIELYVQFTSPNYVIATGVRDVYTTPDRHSVSGLQNMKQPMFGSGVECTSPARHSIDGWDMYVGGSMFDVGNTYWGTTSSSSGWQSTSNWERYEMPRRRDDVLPTTSTGEGTSYAADDGGLEDDSDVDPPLEPGPDGVEVGLFSEPKPILTEPEDAERSSDEEEKPRTKNPFPADPGYHVQGASPECPING

SEQ ID NO: 51473 - protein, 37 aa, Zea mays
  Coding DNA Sequence Number=SeqID_9694
MTLTRYLGKYEPKVSKRHHDSNEMTPVLFGRIYRIFT

SEQ ID NO: 51474 - protein, 164 aa, Zea mays
  Coding DNA Sequence Number=SeqID_9695
MKEVVKKEIIKWLDAGIVYPISDSNWVSQGLCNELRLQYLSKEKRIALIEKVKIDLQFPISKGGQEKYGKNKKDKENDAEKESDQNIVTAPQFVGASTDNLEGDGARPAKATEEATDNAGAELEPEEQSEDHLKPNEKKRKCSKDKNYGGLSLLWVNRHEREAD

SEQ ID NO: 51475 - protein, 148 aa, Zea mays
  Coding DNA Sequence Number=SeqID_9696
MALVKEANLGTGKAVFAECCGQGTRQRDWQRGPLEDSLPSARHQTLGKEASFAECLRELSALGLAVGPTGAVFADGRGLQAREMGQGKGAGVHGAQKESGQRQLREEGATWAAFLGVLEVILALLLMVFIHLSMKVSLMRSMGLIGRS

SEQ ID NO: 51476 - protein, 274 aa, Zea mays
  Coding DNA Sequence Number=SeqID_9697
  Gene Ontology: Mol. function=sequence-specific DNA binding; Cellular component=nucleus; Biological process=regulation of transcription, DNA-dependent
  Homolog annotation: Hit_ID=Q41876; Match level="QueryCoverage=92%, HitCoverage=50%, E-value=1e-37, Identity=90%"; Hit description=ZAG1 protein
  Pfam annotation: Domain name=SRF-TF; Domain location=46-96; Score =120.2; E_value=6e-33; Accession=PF00319.9; Description=SRF-type transcription factor (DNA-binding and dimerisation domain)
MPSTLTSAGQQKLKEPISPGGGSASVAGSAAERNNGGRGKGKTEIKRIENTTNRQVTFCKRRNGLLKKAYELSVLCDAEVALIVFSSRGRLYEYANNSNSVTGCKLVNVSEGRFQKNQNFIYIVAILKLKSSSDALVNMSCIGGLQGEESWQCKLVLVRRVMAPNGNHVVGNAWLLPSMLEDAKLGFDYAGNAIVYNIRLLVKSEAVIVKGTIERYKKATSDNSSAAGTIAEVTIQHYKQESARLRQQIVNLQNSNRFSSYRKLSCAREYRKVI

SEQ ID NO: 51477 - protein, 400 aa, Zea mays
  Coding DNA Sequence Number=SeqID_9698
MQIKAVGSESYLFGFIVEQIKAKVEQIKAKDSESCFPSVTAEKIKADVEQIKAMSSESYIFGFIVEQINAKGIESYIFGFIVEQINAKVGQIKAKDSESCFASVTAEKIKADVERIKAMSSESYIFGFIVEQINAKGIESYIFGFIVEQINAKVLQQCRLKVRAANLVSLALRLEIAEAKRIKAVGSESYLFGLIVEHIKAKALQRSRLKLRAVNLISLALRLEIAEVMQIKAVGSESYLFGFIVEQIKAKALQRSRLKLRAVNLISLALRLEIAEVMQIKAVGSESYLFGFIVEQIKAKVEQIKAKDSESCFPSVTAEKIKADVEQIKAMSSESYIFGFIVEQINAKGIESYIFGFIVEQINAKVEQIKAKGSESCFPSIAAEQIKAEGSECYLPGVKT

SEQ ID NO: 51478 - protein, 268 aa, Zea mays
  Coding DNA Sequence Number=SeqID_9699
MGSESYPFGIIVDQIKAKALQRSRLKQRVANLVSLALRLEIADVERIEALGSDSYLFGIIVEQIKAQGREVGFPSIASKQIKAEGSESFLPDCNRLKLKVANLVSQALKLSRLKLSAANVISLALRREVAEVERIKAVGSESYLFGIIMEHIKAKVEQIKAKDSESCFPSVTAEKIKADVEQIKAISSESYIFGFIVEQINAKVLQQCRLKVRAANLLSLALRLEIAEAKQIKAVGNESYLFGIIVEHIKAKGSECCFPTITAEQIKA

SEQ ID NO: 51479 - protein, 114 aa, Zea mays
  Coding DNA Sequence Number=SeqID_9700
MDSNRADYVDVECNAQASVHGAASFGSRPIFGSRVGEGKEAFFQMMNDWFTEFVRTNQATQRPLPPSIPQSVPIVPQGLELLRVSKSPVDKIQKYGAEEFRATFDDDPERIEFG

SEQ ID NO: 51480 - protein, 84 aa, Zea mays
  Coding DNA Sequence Number=SeqID_9701
MALRLEIADVERQVVGSDFYLFGIIVKQIKAKGSESGFPSIASKRIKAEVEQIKPKGIESCFPSVAAEQMKAEGSESYVSGINT

SEQ ID NO: 51481 - protein, 36 aa, Zea mays
  Coding DNA Sequence Number=SeqID_9702
MQELDQNGNPSDMSLLNRREFNVEATCSKNAKSFDL

SEQ ID NO: 51482 - protein, 59 aa, Zea mays
  Coding DNA Sequence Number=SeqID_9703
MKFPDPIEECSIMKEIETLVSMESNFEEYPLKKALDLDPLEDEEDAIFGTWTKDTEDAN

SEQ ID NO: 51483 - protein, 162 aa, Zea mays
  Coding DNA Sequence Number=SeqID_9704
MQIKTVGSESYLFGFIVEQIKAKVEQIKAKDSESCFPSVTAEKIKADVEQIKAMSSESYIFGFIVEQINAKVGQIKAKDSESCFASVTAEKIKADVERIKAMSSESYIFGFIVEQINAKGIESYIFGFIVEQINAKAEQIKSVGGESFSLALRLEIVEGEAD

SEQ ID NO: 51484 - protein, 381 aa, Zea mays
  Coding DNA Sequence Number=SeqID_9705
MQIKAVGSESYLFGFIVEQIKAKVEQIKAKDSESCFPSVTAEKIKADVEQIKAMSSESYIFGFIVEQINAKGIESYIFGFIVEQINAKVGQIKAKDSESCFASVTAEKIKADVERIKAMSSESYIFGFIVEQINAKGIESYIFGFIVEQINAKVLQQCRLKVRAANLVSLALRLEIAEAKRIKAVGSESYLFGLIVEHIKAKALQRSRLKLRAVNLISLALRLEIAEVMQIKAVGSESYLFGFIVEQIKAKVEQSKAKDSESCFPSVTAEKIKADVEQIKAMSSESYIFGFIVEQINAKGIESYIFGFIVEQINAKVLQQCRLKVRAANLVSLALRHEIAEAKRIKAVGSESYLFGIIVEHIKAKGSECCFPSITAEQIKA

SEQ ID NO: 51485 - protein, 317 aa, Zea mays
  Coding DNA Sequence Number=SeqID_9706
MKWSGLKLWVWNRLKIKVANLVSLVLQQCRLKVRAANLVSLALRLEIAEAKRIKAVGSESYLFGLIVEHIKAKALQRSRLKLRAVNLISLALRLEIAEVMQIKAVGSESYLFGFIVEQIKAKVEQIKAKDSESCFPSVTAEKIKADVEQIKAMSSESYIFGFIVEQINAKGIESYIFGFIVEQINAKVGQIKAKDSESCFASVTAEKIKADVERIKAMSSESYIFGFIVEQINAKGIESYIFGFIVEQINAKVLQQCRLKVRAANLVSLALRLEIAEAKRIKAVGSESYLFGLIVEHIKAKGSECCFPSITAEQIKA

SEQ ID NO: 51486 - protein, 254 aa, Zea mays
  Coding DNA Sequence Number=SeqID_9707
QSRLKLRAENLISLVLRLEIAEVEGIKAVCRKSYLFGIIVGQIKAKDSESCFASVTAEKIKADVERIKAMSSESYIFGFIVEQINAKVLQQCRLKVRAANLVSLALRLEIAEAKRIKAVGSESYLFGIIVEHIKAKGSKSCFPTIAAEQIKCNRLKLKVANLVSQALKLSRLKLSAANVISLALRREVAEVERIKAVGSESYLFGIIMEHIKAKVEQIKAKDSESCFPSVTAEKIKADVEQIKLLAANPISLAL

SEQ ID NO: 51487 - protein, 98 aa, Zea mays
  Coding DNA Sequence Number=SeqID_9708
MARYSVPTHIYRPHRFPRQQRGAHRLGVQCLTDPDCRRVVTALVPTITGMGDHVFSRVRKAICCQVHSDNASPWIYVNRPSLFCYQNGYNQVLTSREC

SEQ ID NO: 51488 - protein, 104 aa, Zea mays
  Coding DNA Sequence Number=SeqID_9709
MAARGAVAATGGRQRLYSWRRSPQLLPTRSHHAHARIAEDPNLTREVELGFAKKTQQNGKDKTDVMAPDDSDPSRSDVARLSSTNYQLGITNPTPLKRNLVLEI

SEQ ID NO: 51489 - protein, 169 aa, Zea mays
  Coding DNA Sequence Number=SeqID_9710
MRSIKPATMLFLNYQVLRARKEKTAAHAPGDFVPKRGQRRAITDGSMTPRPSSRHHGERDPTTKLLSPKPTPRRCPGREWLSSIPSLNSHTDASRILVSGQVRVDTGCHDRVVPLIRAEIANAQRNSPDIPGEVDTARAGSVTPVRSWIGPTVTATAAPSFDDKGNMHA

SEQ ID NO: 51490 - protein, 143 aa, Zea mays
  Coding DNA Sequence Number=SeqID_9711
MGKGNKRKREPTPPSDDFGDSKYSEEEFSSESEGSPAPVSPPASSDDSDDSQGIAAEVWTYIRAIERSGLEGSDESEYSSDEEDSPEEDGEGDDDDDDGGDGGGRGGNGSSTGGNGDGKGGDGGSSRGSNGGGSSKGSNKASG

SEQ ID NO: 51491 - protein, 112 aa, Zea mays
  Coding DNA Sequence Number=SeqID_9712
  Gene Ontology: Mol. function=nucleic acid binding
  Homolog annotation: Hit_ID=Q3LRV2; Match level="QueryCoverage=69%, HitCoverage=33%, E-value=2e-31, Identity=80%"; Hit description=Gag
MKKVVYYETDSSTPSTSGTESTSSKGQERKKYNKMRHHLTSLHESIWDIIEFGAQVPQVGNEDYDPNEAAQVRHFNSQATSILLASLCREEYNKVQGLKSAKEIWDVLKMAH

SEQ ID NO: 51492 - protein, 404 aa, Zea mays
  Coding DNA Sequence Number=SeqID_9713
  Homolog annotation: Hit_ID=Q6H8D5; Match level="QueryCoverage=41%, HitCoverage=16%, E-value=1e-25, Identity=43%"; Hit description =Putative coatomer protein complex, subunit beta 2
  Pfam annotation: Domain name=WD40; Domain location=215-253; Score =3.7; E_value=13; Accession=PF00400.22; Description=WD domain, G-beta repeat
  Pfam annotation: Domain name=WD40; Domain location=273-311; Score =1.0; E_value=28; Accession=PF00400.22; Description=WD domain, G-beta repeat
  Pfam annotation: Domain name=WD40; Domain location=315-354; Score =19.6; E_value=0.011; Accession=PF00400.22; Description=WD domain, G -beta repeat
  Pfam annotation: Domain name=WD40; Domain location=359-398; Score =15.8; E_value=0.16; Accession=PF00400.22; Description=WD domain, G -beta repeat
  Pfam module annotation: Pfam domain module=WD40::WD40::WD40::WD40; Domain location=215-253::273-311::315-354::359-398
MCAPDQASTCVSELLEQVQSLGVSTVPSSQLHRITSIPKGFGETNTHHIRSPGSTSESSKLLDVYPLELRFPLEPNKCTECPVTLTNRTDCYVGVWITPAKPHTCHGFYFSYLWWQFPSSSFFQIMDPHSTLVVTLVMDPLQLGLGLQDTEDKFQVLMIVMESQKDLENLNPSISSSTDNDMLRRVEELGGEVHRAILRAVSCDPASCKPEVVHSVPMVISAKTLENVLSIDVDLDMCWILASHRAGYVSIWNYNTQGRVTALKVTKEAGMLHSLTRTRSATTSCVYSAKFITRKKLFATGDGYGYICIYAYTMDKVKKFEAYHGKPVSLLAVHSTYPFLLSSSSCDRSIKLWAWDQQWACTRTFDAHTSGVQHVRFNPADVNTFVSVSCGGACVKFLSSVDNH

SEQ ID NO: 51493 - protein, 381 aa, Zea mays
  Coding DNA Sequence Number=SeqID_9714
  Gene Ontology: Mol. function=protein serine/threonine kinase activity; Cellular component=integral to membrane; Biological process=protein amino acid phosphorylation
  Homolog annotation: Hit_ID=Q8L7G3; Match level="QueryCoverage=73%, HitCoverage=44%, E-value=1e-36, Identity=31%"; Hit description =Putative serine/threonine kinase
  Pfam annotation: Domain name=Pkinase; Domain location=90-298; Score =81.3; E_value=3.1e-21; Accession=PF00069.15; Description=Protein kinase domain
  Pfam annotation: Domain name=Pkinase_Tyr; Domain location=88-303; Score=-51.7; E_value=2.7e-09; Accession=PF07714.7; Description =Protein tyrosine kinase
  Pfam module annotation: Pfam domain module=Pkinase::Pkinase_Tyr; Domain location=90-298::88-303
  Subcellular localization annotation: CTP_CleavageSite=45; ConfidenceScore=5.04e-01
MPLVSQHTTSVLSGDNPLIIKASGRPFAVGASSIDLVGHCSKKVSASRRKAPLPEMDDQENEDQALEHILTDANAEPVMLSYAFLKSITNDFSCVIGRGGFGVVYKGYLHNGKTVAVKQLSKTDDFSEKQFHDELMCLIRVKHRNIISMEDLFWQISDEGSSALSLYLTKAFSIISKGLWYLHHEEHINHLDLKPENILLDDDMVPKISDFGLSRRFSGELNVIITENICGTLGYIAPEYLSKGEISFKADIFSLGIIIKKILMGSNDLSDFEKDDQEKLLFLQELRAIREACTGPWLLVGDFNLILQASDKNNSNLNRAMMHRFRCLIEDVALKEIPLHGRRFTWSNQQTDPVLVKLDRFFCSVSWELLFPNVLLQSSAS

SEQ ID NO: 51494 - protein, 92 aa, Zea mays
  Coding DNA Sequence Number=SeqID_9715
MAQAPKMIREFSPLRSFLSEGLIRVMLTFSHQSSKEEESRLGERFNSQETSITKELNPFNTSLGKDAVGYVDVDSAKRLSLEEWVVTGEVVA

SEQ ID NO: 51495 - protein, 64 aa, Zea mays
  Coding DNA Sequence Number=SeqID_9716
MTKVTLAEGIQSSRNGSFVLTALHVRNSESEGTCSHNPLGKHCQIMFLRTFGGRRPPTVCDRGV

SEQ ID NO: 51496 - protein, 93 aa, Zea mays
  Coding DNA Sequence Number=SeqID_9717
  Subcellular localization annotation: CTP_CleavageSite=56; ConfidenceScore=5.20e-01
MNDPISAEQNQKGGKTKSAHHLPRGGPHAPSGSPFLRWRERERESVFVLTGRPRTRKAESWVKKKEYPSPTGSESSVERRGDLAVAWLVFLHP

SEQ ID NO: 51497 - protein, 202 aa, Zea mays
  Coding DNA Sequence Number=SeqID_9718
MSRAFDDYYIKDCGVISAPEAQRLSELTAARNLTPEWESSPTDRGSSHLVSKPSELAIVEEKTQRLPLQNHSCRPGFYWKPWMREIEQCKGIGTSELAAVVAEQAAVDRNDLYRKLEETGQEVSQLRLEHMGRELGETSTTTQEQGGDVRRNQQQSHGDQNRGNQQRGMRGDPRQFTDSGNQAIPKLPFPKFSKGDPVVWLD

SEQ ID NO: 51498 - protein, 102 aa, Zea mays
  Coding DNA Sequence Number=SeqID_9719
MVVRPRGRAGMSEMGREGQQTMHRGKRRGERGCSPRRRALTTTSIAHGGVAAAPKDVTGVARAAKLDSAGGFDAYNSRHDDEMSERTAGRAVYFCEIVGAAA

SEQ ID NO: 51499 - protein, 76 aa, Zea mays
  Coding DNA Sequence Number=SeqID_9720
MEMCITFLDDRWCVVSLAPDRLMVHRAVRWLSSIVPPRTSRWAPIPWCTGQSVGWHRTVRCTLVDGPGVTPLFFMS

SEQ ID NO: 51500 - protein, 506 aa, Zea mays
  Coding DNA Sequence Number=SeqID_9721
  Gene Ontology: Mol. function=oxidoreductase activity; Cellular component=integral to membrane; Biological process=electron transport
  Homolog annotation: Hit_ID=Q6ZD83; Match level="QueryCoverage=96%, HitCoverage=88%, E-value=1e-123, Identity=48%"; Hit description =Putative cytochrome P450 71C4
  Pfam annotation: Domain name=p450; Domain location=2-485; Score =290.1; E_value=4.3e-84; Accession=PF00067.12; Description=Cytochrome P450
MPPSPPAVPLIGHLHLVAGGLPHVRLRDLAARQQDGEGLMLLRLGTVPTLVVSSPHAAQQVLRAHDKSFASRPRTVVGDILSYGPSDVGLAPYGDWWRQAKKLVTTHLLSARKVQCYRAAREEEVGAVIAKIHGAAGAHAAVDMSELLSSFTNDILCRAVAGRSFRADDGRNKVFRYAGTAVVGGFNPENLYPRLAKVAGGVLTWPARRRAERLRSQWDKVFDALIDEHAREMAGGAGGGDLEETDFIHVLLSVQEEYGLTRNSIKGILADMFTAGTDTSYAALEFAMAELMRHPHALAKLQAEVRKTTAAAAASGEKQVKETNLDGMTYLKAVIKETLRLHPPAPLLLPHLSLEDCDLDSYTVPAGTTVLINAWAIGRDPRVWNAPDEFMPERFIVDDDDDMGGIDNNGSVDLRGNDFQFLPFGSGRRICPGLNFALVSIELMLANLVYHFDWELAEGEDSNSNIDMTEVFGLTARRKHKLLLVPRSASSAPVAVDQSTGRGAHM

SEQ ID NO: 51501 - protein, 301 aa, Zea mays
  Coding DNA Sequence Number=SeqID_9722
  Gene Ontology: Mol. function=phosphotransferase activity, phosphate group as acceptor; Cellular component=chloroplast; Biological process=nucleobase, nucleoside, nucleotide and nucleic acid metabolic process
  Homolog annotation: Hit_ID=Q10S93; Match level="QueryCoverage=79%, HitCoverage=82%, E-value=1e-102, Identity=75%"; Hit description =Adenylate kinase, chloroplast, putative, expressed
  Pfam annotation: Domain name=ADK; Domain location=73-267; Score =173.0; E_value=7.2e-49; Accession=PF00406.12; Description=Adenylate kinase
  Subcellular localization annotation: CTP_CleavageSite=12; ConfidenceScore=5.71e-01
MAVLSRCSRAVTAATTPNAAAAKFSYLIRALSPFSSSSSSTFDADNGLNSRIKPAVLGTLKREPKDRNVQWVFLGCPGVGKGTYASRLSDLLGIPHIATGDLVRDELTSSGPLSSQLKEIVNQGKLVSDEIIIDLLSKRLEAGEAKGESGFILDGFPRTVRQAEILEGVTDIDLVINLKLREEALLAKCLGRRICSECGGNYNVACIDIKAENGKPGMYMAPLPPPPQCASKLITRADDTEEVVKQRLRIYQAMTLPVEDFYRSRGKLLEFDLPGGVRESWPKLLHALNLEDEEDKQSAAA

SEQ ID NO: 51502 - protein, 213 aa, Zea mays
  Coding DNA Sequence Number=SeqID_9723
  Gene Ontology: Mol. function=two-component response regulator activity; Cellular component=nucleus; Biological process=two -component signal transduction system (phosphorelay)
  Homolog annotation: Hit_ID=Q9SHC2; Match level="QueryCoverage=62%, HitCoverage=84%, E-value=2e-47, Identity=71%"; Hit description=Two -component response regulator ARR16
  Pfam annotation: Domain name=Response_reg; Domain location=83-205; Score=72.1; E_value=1.8e-18; Accession=PF00072.14; Description =Response regulator receiver domain
MELRNTDIGWPFSTAFFAGCCRIWKIFTVYFIGVLLIHTAPEDLLDGEDGGQGSYYSLHTMLGSGGGSGSCSKDMAVELGDEPHVLVVDDSLIDRKLVERLLKNSSCKVTTAENALRAVEYLRLGNDTLEGTVSEVNMIITDYCMPGMTGYELLKKIKESSVLKEVPVIIMSSENIPTRISQCLEEGAKMFMLKPLKRSDVKQLKWHLMKCRN

SEQ ID NO: 51503 - protein, 136 aa, Zea mays
  Coding DNA Sequence Number=SeqID_9724
  Gene Ontology: Mol. function=two-component response regulator activity; Cellular component=nucleus; Biological process=two -component signal transduction system (phosphorelay)
  Homolog annotation: Hit_ID=Q9SHC2; Match level="QueryCoverage=94%, HitCoverage=84%, E-value=5e-45, Identity=70%"; Hit description=Two -component response regulator ARR16
  Pfam annotation: Domain name=Response_reg; Domain location=9-128; Score=53.7; E_value=6.2e-13; Accession=PF00072.14; Description =Response regulator receiver domain
MAVELGDEPHVLVVDDSLIDRKLVERLLKNSSCKAENALRAVNYLRLGNDTLEGTVSEVNMIITDYCMPGMTGYELLKKIKESSVLKEVPVVIMSSENIPTRINQCLEEGAKMFMLKPLKRSDVKQLKWHLMKCRS

SEQ ID NO: 51504 - protein, 346 aa, Zea mays
  Coding DNA Sequence Number=SeqID_9725
  Gene Ontology: Mol. function=methyltransferase activity; Cellular component=nucleus; Biological process=fatty acid biosynthetic process
  Homolog annotation: Hit_ID=Q9LRL5; Match level="QueryCoverage=99%, HitCoverage=95%, E-value=3e-72, Identity=43%"; Hit description=S -adenosyl-L-methionine:salicylic acid carboxyl methyltransferase-like protein; floral ...
  Homolog annotation: Hit description=nectary-specific protein-like
  Pfam annotation: Domain name=Methyltransf_7; Domain location=16-346; Score=509.3; E_value=4.4e-150; Accession=PF03492.6; Description=SAM dependent carboxyl methyltransferase
MAEAKKAVISKVRSMVEESVTDMFSKTVPTCMKVADLGCSSGPNTFMTIWHIIDTIHGICQQEDMKLPEFEVLLNDLPENDFNYVFKSVPSFIERLKKEIGDMVQERCFIRGVAGSFYHRLFPAKSLHFVYSSYALHWLSKVPVGVENNKGNICMAGSSPPNVVEAYAQQFQKDFINFLSLRSKEILPQGRMVLTFTARKNPNPSNEDYGLELVAESLLELVAEGVVKEADVDSFNIPLYAPCKEEVAEIVEKEGSFGIKELQVFVVDTDPRNRDDKKHLDFNIYTQMGKNYANTMRAVLESILCSHFGDAILDELFKRFATNAADPLRNSMLQKKVNVVVSLAKK

SEQ ID NO: 51505 - protein, 42 aa, Zea mays
  Coding DNA Sequence Number=SeqID_9726
MRPQIQMPIQESSVDAWDNADVAGTFNLPYYSKAGTIVDARG

SEQ ID NO: 51506 - protein, 98 aa, Zea mays
  Coding DNA Sequence Number=SeqID_9727
MAILVQSSLKKVVTGKKPENLNKTEWEELDEKALSAIQLCLANSVLQEAFGLLGLPLTSPFYCCTTLLLLLPSISYHFKLQPPPSQSNQKAVKQKVKR

SEQ ID NO: 51507 - protein, 144 aa, Zea mays
  Coding DNA Sequence Number=SeqID_9728
  Gene Ontology: Mol. function=glutamate dehydrogenase [NAD(P)+] activity; Cellular component=mitochondrion; Biological process=amino acid metabolic process
  Homolog annotation: Hit_ID=Q43260; Match level="QueryCoverage=66%, HitCoverage=20%, E-value=1e-20, Identity=61%"; Hit description =Glutamate dehydrogenase
  Pfam annotation: Domain name=ELFV_dehydrog; Domain location=14-144; Score=-113.6; E_value=0.009; Accession=PF00208.11; Description =GlutamateLeucinePhenylalanineValine
MASLCHTHLGAWVGASTDLASDGVINLNDLEQRDQRLQGGDAIDPGPLLTKKCDVFIPPALGGVINKDNANDVKESTSSRLPITPWTQRQARQVHTSTVSKGLAILSKKGVLILPDILANSGGVTVSYFECVQAYLQKLISLEK

SEQ ID NO: 51508 - protein, 171 aa, Zea mays
  Coding DNA Sequence Number=SeqID_9729
MYMLGRHWNRGRGKVRRVCPRGGHGEQGRSARGRGMRDCARQGHRNPEEASHVDGWDSSTMTKEKECATEEGSYTERCEGYSGISGASFGRKRRADTENNGRAARGQGLWQHAVQNRGGLGVAHSDQRAHCGWRGAARHVRVAEHALDQLEEAIVVLLRGREESDECIGGR

SEQ ID NO: 51509 - protein, 158 aa, Zea mays
  Coding DNA Sequence Number=SeqID_9730
  Homolog annotation: Hit_ID=Q8H052; Match level="QueryCoverage=44%, HitCoverage=12%, E-value=9e-08, Identity=54%"; Hit description =Putative mandelonitrile lyase
MEFRIEKQSMWPMKTSQKYASGRAPLIKQAPLAMDSLLRHSRVLLLEYGGQFTDALADASLLSPASDSSPRTTSSTRARVLGGESCLNAGFCTRASSSYVRAAGWTTAMFESINESLLVRRQRRGWPSSLLRAATLSPGSVVSSPPPPPALQIGYGGH

SEQ ID NO: 51510 - protein, 50 aa, Zea mays
  Coding DNA Sequence Number=SeqID_9731
MADKGKGKSIVIGDHHTSNISQGGIARKAPDKKTNKSRGTEGKAGDLHQA

SEQ ID NO: 51511 - protein, 664 aa, Zea mays
  Coding DNA Sequence Number=SeqID_9732
  Gene Ontology: Mol. function=protein serine/threonine kinase activity; Cellular component=cell surface; Biological process =protein amino acid phosphorylation
  Homolog annotation: Hit_ID=Q84ZH5; Match level="QueryCoverage=96%, HitCoverage=93%, E-value=0.0, Identity=62%"; Hit description =Putative receptor-like protein kinase
  Pfam annotation: Domain name=Lectin_legB; Domain location=19-257; Score=316.7; E_value=4.1e-92; Accession=PF00139.10; Description =Legume lectin domain
  Pfam annotation: Domain name=Pkinase; Domain location=342-613; Score =168.1; E_value=2.2e-47; Accession=PF00069.15; Description=Protein kinase domain
  Pfam annotation: Domain name=Pkinase_Tyr; Domain location=342-613; Score=105.6; E_value=1.5e-28; Accession=PF07714.7; Description =Protein tyrosine kinase
  Pfam module annotation: Pfam domain module=Lectin_legB::Pkinase::Pkina se_Tyr; Domain location=19-257::342-613::342-613
MKHTSFLPYLLLLTTLASCDDQFLLSGFTQSSLNLDGSAIVTNDGLLDLTNSTAITNGHAFYPSPLHFRKSPDGKVESFSVNVVFSIFITYPDLSADGMAFFIAPTKNFSDARAGKYFGLLNENNNGNTRNHIFMVELDTYKNAEVQDINDNHVGININGVFSFKSNTSGFYEDSGAFRELTLNGNKGTQLWIDYDKSTMQINVTLAPINVHKPSRPLLSTTYDLSTVISTSTSYIGFASGASPVNSRHYVMGWSFGMNKPAPPLDVSKLPKLPFHGPKAQSKLLAIVLPIATATLILSIGTIVTLVVRRRLKYAEVREDWEGEFGPHRFSYKDLYHATGGFKNKHLLGEGGFGKVYKGVLPLSNVEVAVKRMSHESRQGMKEFVTEVVSIGRLRHRNLVQLLGYCRRKGELFLVYNYMPNGSLDKYLYCEEHGAILNWEQRFRVIRNIATVLLYLHEKWEKIVIHRDIKASNVLLDGEMNGRLGDFGLARLYDHGTDPQTTHMVGTKGYLAPELLRTGKASPHTDVFAFGMFLLEVACGQRPVKKNAEGTEFFLVDWVLEHWNNGVITKTLDSRLQGDYNIDEAHLVLKLGLLCSHPLPSSRPRMRQVMQYLDGDTPLPELRPTQLSSNMVALMKNSGLNSSVVSYPQISTSFCTISSLSGGR

SEQ ID NO: 51512 - protein, 677 aa, Zea mays
  Coding DNA Sequence Number=SeqID_9733
  Gene Ontology: Mol. function=protein serine/threonine kinase activity; Cellular component=cell surface; Biological process =protein amino acid phosphorylation
  Homolog annotation: Hit_ID=Q6YWI8; Match level="QueryCoverage=99%, HitCoverage=100%, E-value=0.0, Identity=60%"; Hit description =Putative receptor-type protein kinase LRK1
  Pfam annotation: Domain name=APH; Domain location=360-544; Score= -17.5; E_value=0.1; Accession=PF01636.13; Description=Phosphotransfera se enzyme family
  Pfam annotation: Domain name=Lectin_legB; Domain location=34-271; Score=378.9; E_value=7.7e-111; Accession=PF00139.10; Description =Legume lectin domain
  Pfam annotation: Domain name=Pkinase; Domain location=357-630; Score =157.0; E_value=4.8e-44; Accession=PF00069.15; Description=Protein kinase domain
  Pfam annotation: Domain name=Pkinase_Tyr; Domain location=357-630; Score=89.6; E_value=9.3e-24; Accession=PF07714.7; Description =Protein tyrosine kinase
  Pfam module annotation: Pfam domain module=APH::Lectin_legB::Pkinase:: Pkinase_Tyr; Domain location=360-544::34-271::357-630::357-630
MAVFDMKSAPLMILELLLVSLGLTIAPFSAEENNDHWFVYSGFANASLTLDNTASITPSGLLELTNGTVMSMGHAFYPTPLRLRDSPNSTVQSFSASFVFGIISIYDDLSSHGLAMLIAPSRTLSALPVQYLGLLSGSNDGNKSNHIFAVELDTYQNSEFKDINNNHIGIDINSMTSVQSNPAGFFHDQDGTFENLTLSSKEAMRVWVEYDRENTQIDVTMAPLAIVKPKRPTVSTIQNLSDVLTDVAYVGFSSSTGKIHTQHYVLGWSFAMNGPAPSIDLSMLPKLPRHHHKSRRSWVLETVLPIATAALLLSLGVVAFLLVRRHVRYAEIREDWELEFGPHRFSYKDLFHATGGFENKNLLGIGGFGRVYKGELPRSRLKIAVKRVSHDSKQGMKEFIAEIVSIGRLQNRNLVQLLGYCRRKGELLLVYEYMPNGSLDKYLHNAKEGNSALSWAQRFRIIKGIASGLLYLHEEWEKVVVHRDIKGSNVLLDSEMNGRLGDFGLARLYDHGVDPQTTHVVGTIGYLAPKLARGGNATPLTDVFSFGMFVLEVTCGQRPVRHENVQDSQLMLVDWVLDKVREGSFGATMDARLEGKYDIGEAYLALKIGLLCSHPFASERPTMRQVIQYLDGEIEAPDLSFEVLASMQSEGIDPYLISYPLSTECFSTTSNVVSGGR

SEQ ID NO: 51513 - protein, 119 aa, Zea mays
  Coding DNA Sequence Number=SeqID_9734
MPSVKPLARSRLVLEAMTIEAKQGETRWEKMMATLERLTGKVEAMEKVHHQLLGQSELTTDLVKQDVEERTTLSRRVAENKKALTRMRLEAMAREMEDVGAGPESSDTGGRRGASPIMN

SEQ ID NO: 51514 - protein, 62 aa, Zea mays
  Coding DNA Sequence Number=SeqID_9735
MALPPAWCRRWECCDGGHSGAGATVGDGGAVVTMAVVVAEEGEHARRPIEGVRRGERGTPEC

SEQ ID NO: 51515 - protein, 70 aa, Zea mays
  Coding DNA Sequence Number=SeqID_9736
MEEILRFLTEEKEIPKDDLRHCLVYTQSQKVPMWRNKEGERRRNKAGAEYKNSETSFGVATHPRDVTTHP

SEQ ID NO: 51516 - protein, 155 aa, Zea mays
  Coding DNA Sequence Number=SeqID_9737
  Homolog annotation: Hit_ID=Q1RVP1; Match level="QueryCoverage=39%, HitCoverage=29%, E-value=1e-11, Identity=58%"; Hit description=Zinc finger, CCHC-type
  Pfam annotation: Domain name=zf-CCHC; Domain location=27-44; Score =6.2; E_value=0.094; Accession=PF00098.13; Description=Zinc knuckle
MSKGEGWHKPGKVKAALKPKCGVAKEGNYFHCGVTGDLKRNCPIYIKEVKKAKISGKSASDTGCGSHICTSVQGLQRSRTLARGDVDLRYGYVYLICHKFESLEKFKEFKNEVQNQPGKNQDKPRTYQEAVMSPESEKWLEAMRSEMDSMYENQV

SEQ ID NO: 51517 - protein, 621 aa, Zea mays
  Coding DNA Sequence Number=SeqID_9738
  Gene Ontology: Mol. function=transmembrane receptor activity; Cellular component=exocyst; Biological process=exocytosis
  Homolog annotation: Hit_ID=Q9FFX6; Match level="QueryCoverage=86%, HitCoverage=78%, E-value=5e-99, Identity=40%"; Hit description =Putative leucine zipper protein
  Pfam annotation: Domain name=Exo70; Domain location=66-613; Score =120.5; E_value=4.9e-33; Accession=PF03081.6; Description=Exo70 exocyst complex subunit
MNKRLNSEKSGSFPRFGRRRSKRELETGSFKLKGLNPKVCGKNQNPVELFWKSNLNHDQILEKVVQFIEKLASGQDKSKAPEIPNFVESFLKMVESRIATYEQSEASAKLGFNEEYTSFFEAVSCLSKIVNTLDEFPFDSATTSCFNRAGSVHHRAMLLSEYQFLALLDISKRNCNVTVDSKTPKTPKQSFFNSNQETDRCVKPEYDSGTGIVFPYFPPQSVANMNQVALAMISAGYEEECFIVYSGLRLKALDFEFSNQGYENVNMEDFQSMDWESLEGEIDNWIHIVKYCTTNLFSVERKLCNSVFPEHSLIAQKLFCDLATSLTIRLLNFPNAIVLIKQYSAEKLFKFLDIYETLRDLTSSLGSELSAMDLISETSETQRRVGEAAVTIFCQLENSIKSDNGRIPVASGAVHPLTRYTMNYLKYACEYKDTLELVFQQHYETEGSTRRKVQKQESKNAIEDNDRIPKTSHFSVKLMMVMDLLDAKIEMKSKFYRDPALRYIFLMNNGRYILQKIKGSTDIDEIMGPSWSGKRTSDLRQYHKNYQRETWRKVLQCLNHEGLQTNGKVSKAILKGRFKNFNTLFDEIHKTQSIWMVMYFAPPNNHTSGVLVIALTLTQEV

SEQ ID NO: 51518 - protein, 91 aa, Zea mays
  Coding DNA Sequence Number=SeqID_9739
  Subcellular localization annotation: CTP_CleavageSite=29; ConfidenceScore=5.01e-01
MTPTTSSSVALRRASRRLAHATTILVGVRASDSTPLASTSLGGGGDSKYIGDDSAFEVSHSANDLAAEVEELNAALANQDKFLRLATRERK

SEQ ID NO: 51519 - protein, 148 aa, Zea mays
  Coding DNA Sequence Number=SeqID_9740
  Gene Ontology: Mol. function=kinase activity; Cellular component =ornithine carbamoyltransferase complex; Biological process=amino acid metabolic process
  Homolog annotation: Hit_ID=Q6QP54; Match level="QueryCoverage=77%, HitCoverage=37%, E-value=1e-19, Identity=60%"; Hit description =Putative kinase
MAPPIDVAGLRPRLGDVEAPPKPRSSPSSVAKVESEAWVGRGGDRWLRPGRSLSPGVGRSGVRRLLGLSPSPSPGSSEADPSPSPGSGGAVFAVFRHLARVRALGRAERSSSSSGAQPKSELGVGRSGASYGQSVERRSDGGHFGSVG

SEQ ID NO: 51520 - protein, 95 aa, Zea mays
  Coding DNA Sequence Number=SeqID_9741
MKLTIVTQKVIKDKKGRIGASLGGVAGIVGEMSGERQFGEDDQEMGRSGGWDPPTGGGGARVWGKVRCARWVAEARGLGRAKGGSGVGLGRGMGR

SEQ ID NO: 51521 - protein, 369 aa, Zea mays
  Coding DNA Sequence Number=SeqID_9742
  Gene Ontology: Mol. function=oxidoreductase activity; Cellular component=glyoxysome; Biological process=fatty acid metabolic process
  Homolog annotation: Hit_ID=Q94CN1; Match level="QueryCoverage=97%, HitCoverage=47%, E-value=0.0, Identity=88%"; Hit description =Putative tetrafunctional protein of glyoxysomal fatty acid beta- oxidation
  Pfam annotation: Domain name=3HCDH; Domain location=142-235; Score =106.8; E_value=6.3e-29; Accession=PF00725.12; Description=3 -hydroxyacyl-CoA dehydrogenase, C-terminal domain
  Pfam annotation: Domain name=3HCDH_N; Domain location=2-140; Score =109.9; E_value=7.4e-30; Accession=PF02737.8; Description=3 -hydroxyacyl-CoA dehydrogenase, NAD binding domain
  Pfam module annotation: Pfam domain module=3HCDH::3HCDH_N; Domain location=142-235::2-140
MTEERYEKAMSLVTGVLDYERFKDVDLVIEASLYSLPFLIMHQMAVIENVKLKQQIFSDLEKYCPSHCILATNTSTIDLNLIGEKTKAQDRIAGAHFFSPAHVMPLLEIVRTQHTSPQVVVDLLDVGKKIKKTPIVVGNCTGFAVNRMFFPYTQSALFYVDLGMDVYKIDRACTKFGMPMGPFRLADLVGFGVAVATGMQYLENFPERVYKSMLLPLMMEGNRAGEATQKGFYKYEGKRKATPDPEIMKYIEKSRSMAGVTPDPELMKLSEKDIVEMVFFPVINEACRVLDEGIAVKASDLDIASIFGMGFPPYRGGVMHWADSIGAKYIHGKLEEWTKRYGGFFKPCSYLAERAAKGIPLENQTLPKS

SEQ ID NO: 51522 - protein, 292 aa, Zea mays
  Coding DNA Sequence Number=SeqID_9743
  Gene Ontology: Mol. function=hydrolase activity; Cellular component =intracellular; Biological process=translation
  Homolog annotation: Hit_ID=O82734; Match level="QueryCoverage=68%, HitCoverage=90%, E-value=4e-43, Identity=56%"; Hit description =Serine/threonine-protein phosphatase PP1 isozyme 8
  Pfam annotation: Domain name=Metallophos; Domain location=70-249; Score=67.2; E_value=5.2e-17; Accession=PF00149.18; Description =Calcineurin-like phosphoesterase
MGVMDAAAVDEVVRRLVEGGRGGRQVQMSEAEIRQLCVEAKQVLLSQPNLLRIHAPVKICGCLEWMIKNDRVHSSGDIHGQFVDLLRLFDLGGYPPTSTYIFLGDYVDRGKQSLETICLLLAYKLKYPDNIYLLRGNHEDAKINRVYGSMMNVVEDGYEFFAERRLVTIFSAPNYCGEFDNAGALLSIDESLMCSFQILKPNETGAPHSRKPLPSKFILMSLAYVLKSVCFLFPCFFLRLSCWTDIKFMVLIRQGIQICIRDEVFLFPTSQTVVGPLKTFLSNTQESCASFH

SEQ ID NO: 51523 - protein, 534 aa, Zea mays
  Coding DNA Sequence Number=SeqID_9744
  Gene Ontology: Mol. function=protein kinase activity; Cellular component=chloroplast; Biological process=protein amino acid phosphorylation
  Homolog annotation: Hit_ID=P46573; Match level="QueryCoverage=58%, HitCoverage=75%, E-value=1e-119, Identity=65%"; Hit description =Protein kinase APK1B, chloroplast precursor
  Pfam annotation: Domain name=Pkinase; Domain location=94-376; Score =169.2; E_value=1.1e-47; Accession=PF00069.15; Description=Protein kinase domain
  Pfam annotation: Domain name=Pkinase_Tyr; Domain location=94-376; Score=140.3; E_value=5.2e-39; Accession=PF07714.7; Description =Protein tyrosine kinase
  Pfam module annotation: Pfam domain module=Pkinase::Pkinase_Tyr; Domain location=94-376::94-376
  Subcellular localization annotation: CTP_CleavageSite=51; ConfidenceScore=5.82e-01
MAPHKSEGSMSSGSGPSSSSRSAGSSMSSIATTTGRSGGSTSTSSGSRPLRAAAAASYREEEEEEEEEKEGRILEAPNLRIFTFAELRAATRNFRPDTVLGEGGFGRVYKGWVDERTMNPTRSGIGMVVAVKKLNQESVQGLQEWQSEVNFLGRLSHPNLVRLLGYCVEDRELLLVYEYMPKGSLENHLFRKGGSFEPISWNLRLRIAIGAARGLAFLHSSEKQVIYRDFKASNILLDTNYNAKLSDFGLAKNGPTGGDSHVTTRVMGTYGYAAPEYVATGHLYVKSDVYGFGVVLLEMLTGLRALDTARPAQQHNLVEWAKPYLADRRKLPRLVDPRLEGQYPSKAALQAAQLTLRCLEGDPRSRPSMAEVVLAIEAMEQLRLLTVQEEITWTISAGSGRLSDWSIVRLSSPCVMRSEEDPGIIRRLGFASCSLASVDTTGFSTCAPPNSSRQQCITSPSSLIIGVAVGAQGSYTCTVFGAAAVRSAAQCAAAPRHAGRGPGQGHRKGPPAWHSSVLQLTGSWRRLAGAEPGL

SEQ ID NO: 51524 - protein, 596 aa, Zea mays
  Coding DNA Sequence Number=SeqID_9745
MKGAADISPVARQLAGGLNADSDPSRRRVLASGCAPDHDDHPPISRRKAVSQRAEDDGWTEVKPKYWWRKIQGNLGKSLQQIDAMGARLFKSKLQGDPRGRPAHAHCAVAATGSIKRRRDEMINKAVVCSFDDNSHEVDSLQADQSSGLLTVIRSRIVVGSFILGIGPKIVMLERLSSSLELRFELKQGGPPNRKPRREFEWTYGVPDSIGEKREYPGVRRGRDVVRRDWDQDDDDEYQHGRRRGPRRHRSLSGWVRSSRCRGGTADCISSNGKFRASTPFRRHEMGMPHSKRWVPKLKAKAVSFAVPLISAVWPFEGEEGATGVDRLLLNGGTEAGMQEALGFHAGGGSPTKLIAPKNDLAMETATSPKVISKLSSDTATAPLPSKPVPSPISNLHNSLNPKISNVDVHQQSQQGFQVVEPQVESNDIYAEQVCNVTAAQDECPVPSTVTAVTQHSQEACSLPPDSQPNSTNSLQLQNFIANITMPPVLSLIQTLPHNKSPNIANALGVLSQQHTKMPDQVPTSGKRYSVRLDAKKKLSLGRSRDAIAKAQDILIAKLYNSTTKNNQGSLASCSTNEVNHFEQIARLFARPLTKV

SEQ ID NO: 51525 - protein, 336 aa, Zea mays
  Coding DNA Sequence Number=SeqID_9746
  Homolog annotation: Hit_ID=Q0KBC4; Match level="QueryCoverage=75%, HitCoverage=89%, E-value=2e-34, Identity=37%"; Hit description =Uncharacterized conserved protein
  Pfam annotation: Domain name=DUF833; Domain location=1-269; Score =211.5; E_value=1.9e-60; Accession=PF05742.2; Description=Protein of unknown function (DUF833)
MCIAAWAWHCHPTHRLLLLFNRDEYHSRPTQPAQWWAAGEEAKEILGGRDELGGGTWMGCTRDGKLAFLTNVREPSSLIGAKTRGQLPVRFLQGSLCPLEYATEIAKEADQYNGFNLILADVNSGTMVYISNRPGGDPVIQTVAPGLHVLSNAAINSPWPKAMRLGQSFKRYLTIHDDAEASLKQMVEELMMDTARPDRSMVPDTGDDPEWEYKLSSIFIDTAKEQAKTMARYGTRSMVALAAKLEGEVTFYERCTVMFIQIPQEELVACAIPPLPLYNFGGHQFFAGTKLLKLQCHPMILYMLCACIGEYTKSVSTEVTSVSNPKSDGHKLGYYI

SEQ ID NO: 51526 - protein, 102 aa, Zea mays
  Coding DNA Sequence Number=SeqID_9747
MTKALSEVTKQVANLHTQQVVILLRLATWRVIGHPHQRRRERGSEHRRGRQRGGGSVVLLHQLRQVLHKMTNSPVVSCHSHHSAGCLVEGFFVPTAMWVSAG

SEQ ID NO: 51527 - protein, 352 aa, Zea mays
  Coding DNA Sequence Number=SeqID_9748
  Gene Ontology: Mol. function=protein transporter activity; Cellular component=integral to membrane; Biological process=protein transport
  Homolog annotation: Hit_ID=P59277; Match level="QueryCoverage=99%, HitCoverage=100%, E-value=1e-83, Identity=50%"; Hit description =Syntaxin-81
MARVRDRTEDFKEAVRVAALSHGYTEAQLAALMSSFIIRKPSPKSPFTNAAIKTLQSIRELERFIVKHRRDYVDLHRSTEQERDNIEHEVGVFVKACKEQIDILKNRIHKEEKNGSGKTWLGTRDESSRVDLIAHQHGVVWLFSLPLLGSQSSVLKSELRCFAVVLGVSLCPAPVLILSERLHSVTAQFDHLRSIRFQDAINRAMPRKKIQKRPEIKPAEPSKSNLVLKSDVSKVVDHEVSTTPMRVQEQLLDDETKALQVELTSLLDAVQETETKMIEMSALNHLMSTHVLQQAQQIQYLYDQAVEATNNVERGNKELSQAIQRNSSSRTFLLLFFFVLTFSILFLDWYNN

SEQ ID NO: 51528 - protein, 240 aa, Zea mays
  Coding DNA Sequence Number=SeqID_9749
MKAAVAAVVVGGGGGDEWRCRKHPAARSGGGVCPHCLRDRLLRLCPNCAHVRPCACAAACASPSSSSSASGDAVGRVHSLIEREHRIARSRSVATGSSAALAAPSAATASGGGRRKARVWGWPPFWKPAAREGGAEPGEEEDDDEGMGLPRSSSVSATAVEAKSAAAAARGAVGVALPEPAEGVPAPQVVGERGGAGVSEVPHLQMPGKCCWTISFEGRDVRVRLALVLIGSNVAELQQN

SEQ ID NO: 51529 - protein, 138 aa, Zea mays
  Coding DNA Sequence Number=SeqID_9750
  Gene Ontology: Mol. function=heat shock protein binding; Cellular component=integral to membrane; Biological process=protein folding
  Homolog annotation: Hit_ID=Q6Z899; Match level="QueryCoverage=60%, HitCoverage=69%, E-value=1e-38, Identity=86%"; Hit description=DnaJ protein-like
  Pfam annotation: Domain name=DnaJ; Domain location=52-114; Score =120.8; E_value=4e-33; Accession=PF00226.21; Description=DnaJ domain
MAPRIPTHKKGNKGTRHREESPGSTVFTVFGNCLKFSVDHRGDTNVSYSELDYYKVLEVDYDASDDTIKLSYRRLALMWHPDKHKGNSNATTKFQEINEAYKVLSDPAKRLEYDVSGCYEIDQYTLREYLTKFKGPDI

SEQ ID NO: 51530 - protein, 45 aa, Zea mays
  Coding DNA Sequence Number=SeqID_9751
MDSGYAISALSAAGVLNRVDSLFHGIETDVRYDETAPWARAVRQV

SEQ ID NO: 51531 - protein, 144 aa, Zea mays
  Coding DNA Sequence Number=SeqID_9752
MPGLGSRGNGDHDGGSGDDIVFTLPLAFLLVLQLTKDDRHLTTTTSAESSSTASPRQRRRHQGGIPTRPPSRCSPPAQPHPSPLMVVMRHVPVILTTEKAPTAVGAIVVPIDVDIQVMLHRPSSRGGGGDHGGQREWGHRHVRH

SEQ ID NO: 51532 - protein, 461 aa, Zea mays
  Coding DNA Sequence Number=SeqID_9753
MAAQQQAAASVLQSFPIRAAVLALCVALLPLLLPAQAPDVAAGGAGQAFLAKAWELLHLLFVGIAVSYGLFSRRNSADDGRAGAAAAEKDDAAGPEPAKADARYAWRMFRDSIAPFDDDDADVLVPDSPPGGGGGGMARSWSALHRPVEPVVVVSTGGGGSSAVDCAHDDETVLPSPIPWRSRSGRLDARRPASSPSPSPSPKRVSPASSLSRETLAKASEEEYYAKAKRRSPYRCSSISSSPPAPPPPPPPFLVHGYHPTTERRSAAPKSFKEELQHHSMRGRGEDHYLPKTSSNSFSLPANPRSSFSSNGGSSSSVSVGKSVRTFRTREPAVFQDQSQELPDDSGDDRDALDVHGSEEPYGYRAYQSISRFQYERSGSDSILGGVAVSSDESESSDDDGGDDVGGGGYSTRESTPEVDENEVDKKAEEFIARFREQIRRQRIESIKKSAGTRGVKRHGK

SEQ ID NO: 51533 - protein, 184 aa, Zea mays
  Coding DNA Sequence Number=SeqID_9754
  Gene Ontology: Mol. function=transcriptional activator activity; Cellular component=nucleus; Biological process=regulation of transcription, DNA-dependent
  Homolog annotation: Hit_ID=Q9AUT0; Match level="QueryCoverage=89%, HitCoverage=60%, E-value=2e-11, Identity=39%"; Hit description =Homeodomain leucine zipper protein hox1
  Pfam annotation: Domain name=HALZ; Domain location=104-149; Score =10.7; E_value=0.027; Accession=PF02183.8; Description=Homeobox associated leucine zipper
MNRAPAGKAPGGSCSEDEEPGASSPNSTLISSLSEKRAAPARSGEEVGPEADHTRRAGGSGSGSDDEDCVAGARSRKKLRLSKDHRPPSSKRASTAPSTPTKLKQTDRRWTASAERCCVTLAEEIRRLQREVVELRALKLVAPHHARAHSAAHRAHHAPLLREVRFPRVLPFDGPEVMTIDDMA

SEQ ID NO: 51534 - protein, 84 aa, Zea mays
  Coding DNA Sequence Number=SeqID_9755
  Homolog annotation: Hit_ID=Q6YUV9; Match level="QueryCoverage=55%, HitCoverage=9%, E-value=3e-11, Identity=68%"; Hit description =Transitional endoplasmic reticulum ATPase-like
MISLHIANTYKWNTFSIDIVFMEVDKGVRWARNHYLSSTALPSIKGDKLIIPHESLDISIERLKEQKIEACHMSISQRCFMLSI

SEQ ID NO: 51535 - protein, 50 aa, Zea mays
  Coding DNA Sequence Number=SeqID_9756
  Homolog annotation: Hit_ID=Q10T50; Match level="QueryCoverage=94%, HitCoverage=8%, E-value=2e-15, Identity=85%"; Hit description=Hexose carrier protein HEX6, putative, expressed
MAIGAFVEGAPADGGEGYSGRVTPFVVLSCVVAGSGGVLFGYDLGISGSK

SEQ ID NO: 51536 - protein, 97 aa, Zea mays
  Coding DNA Sequence Number=SeqID_9757
  Gene Ontology: Mol. function=protein binding; Cellular component =nucleus; Biological process=regulation of transcription, DNA -dependent
  Homolog annotation: Hit_ID=Q6Z6T3; Match level="QueryCoverage=87%, HitCoverage=27%, E-value=1e-45, Identity=98%"; Hit description =Nuclear protein-like
  Pfam annotation: Domain name=DUF572; Domain location=11-97; Score= -114.4; E_value=0.024; Accession=PF04502.3; Description=Family of unknown function (DUF572)
MSSLAAARADNFYYPPEWSPKKGGLNKFHGQHALRERARKLDQGILIIRFEMPFNIWCGGCNSMIAKGVRFNAEKKQVGNYYSTKVNHIILVIGFTV

SEQ ID NO: 51537 - protein, 198 aa, Zea mays
  Coding DNA Sequence Number=SeqID_9758
  Subcellular localization annotation: CTP_CleavageSite=21; ConfidenceScore=5.21e-01
MKRLRDVSSTKRTVPSWGSIPADSRSYPLSQRRATTAESQKNQSVKQSSYRRITKHHGPDGYGFSTRFRAGVDKYSKERPPSLGRWKNGIERSPRVRSPTYHVASWVEEGEKEVDNDANFPAAAAAAVMSTVASTVSNRSGRSAAEDREGVRRREEGRRAGDCSTLYRLSGDGRRMIRVGDAVTRLRLGPGTLFFPRL

SEQ ID NO: 51538 - protein, 126 aa, Zea mays
  Coding DNA Sequence Number=SeqID_9759
MAQPCIYYAYCFSKQCRVQRRQAAACTAAWAWQPESDQTGTRAWHARCVRREGRGRGRAEAMERTRTPPSQDRARGGVGDREGGNGMQLARNWNWAAAAAACFAGAGGGGPGVGLTDQLTTLFDLD

SEQ ID NO: 51539 - protein, 253 aa, Zea mays
  Coding DNA Sequence Number=SeqID_9760
  Gene Ontology: Mol. function=transcription factor activity; Cellular component=nucleus; Biological process=regulation of transcription, DNA-dependent
  Homolog annotation: Hit_ID=Q6Z301; Match level="QueryCoverage=84%, HitCoverage=86%, E-value=6e-14, Identity=60%"; Hit description=AP2 domain-containing transcription factor-like
  Pfam annotation: Domain name=AP2; Domain location=38-99; Score=77.4; E_value=4.6e-20; Accession=PF00847.10; Description=AP2 domain
MVKGAQLQDAAADAARNAAAAAARQQGCGGGGPAGCGKRQYKGVRMRSWGSWVSEIRAPNQKTRIWLGSYSTAEAAARAYDAAPALPQGLRRRPSTFPSHPSASPPAAAAQCPPCGQARCRPGAGRRPPAAPHYYSYSSSAASTMAADGATPPCSYGDASSGVSSPGDGRETLMTCATAWRTTTTWNMVAGDADLAALADIESFFRSPKCMEYAMMDPCSTFFAPAPMATDAASEWEWEEEGEIDLWSFSSLN

SEQ ID NO: 51540 - protein, 781 aa, Zea mays
  Coding DNA Sequence Number=SeqID_9761
  Gene Ontology: Mol. function=protein serine/threonine kinase activity; Cellular component=membrane; Biological process=protein amino acid phosphorylation
  Homolog annotation: Hit_ID=Q8LJZ0; Match level="QueryCoverage=97%, HitCoverage=92%, E-value=0.0, Identity=65%"; Hit description =Receptor-like kinase
  Pfam annotation: Domain name=B_lectin; Domain location=77-188; Score =118.7; E_value=1.6e-32; Accession=PF01453.15; Description=D-mannose binding lectin
  Pfam annotation: Domain name=PAN_2; Domain location=333-407; Score =128.3; E_value=2.2e-35; Accession=PF08276.2; Description=PAN-like domain
  Pfam annotation: Domain name=Pkinase; Domain location=506-776; Score =142.1; E_value=1.5e-39; Accession=PF00069.15; Description=Protein kinase domain
  Pfam annotation: Domain name=Pkinase_Tyr; Domain location=506-776; Score=143.3; E_value=6.3e-40; Accession=PF07714.7; Description =Protein tyrosine kinase
  Pfam annotation: Domain name=S_locus_glycop; Domain location=202-316; Score=46.0; E_value=1.3e-10; Accession=PF00954.11; Description=S -locus glycoprotein family
  Pfam module annotation: Pfam domain module=B_lectin::PAN _2::Pkinase::Pkinase_Tyr::S_locus_glycop; Domain location=77-188::333- 407::506-776::506-776::202-316
MAVLNLLALIIATLLLLFRRTSGAGISPADTLNSGGNVTDGETLVSAGGTFTLGFFSPSTTVLTKRYLGIWFTASGTDAVLWVANRETPLNNTSGVLVMSSRVGLRLLDGSGRTAWSSNTTGASTSSVAQLLGSGNLVVREKSSNAVFQWQSFDHPQNTLLAGMRFGKNLKTGMEWSLTSWRAQDDPATGDYRRVMDTKGLPDIVTWHGNAKKYRAGSVERALVQRRAGDGLRVTYVLNTTAGIPFTRVVLDEVGKVRVLMWLPTSRVWKEYPWLPRDACDEYTSCGAFGLCNVDAAPTPSCSCAVGFSPVNASEWSRREASGGCQRDVPLECAAGNGTAVTDRFAPVHGVKLPDTDNATVDMGATLEQCKARCLANCSCVAYAPADIRGGGDGSGCVMWKDNIVDVRYIENGQDLFLRLAKSESATGERVRLAKILVPVMAFVLALTAAGMYLAWNCKLRAKRRNRDNLRKAILGYSTAPNELGDENVELPFVSLGEIAAATNNFSEDNMLGQGGFGKVYKGTLGQNVQVAIKRLGQCSGQGVEEFRNEAVLIAKLQHRNLVRLLGCCIDGDEKLLVYEYLPNRSLDSIIFDAASKHLLDWPTRFKIIRGVCRGLLYLHQDSRLTIIHRDLKTSNILLDADMSPKISDFGMARIFGGNQHEANTNRVVGTYGYMSPEYAMDGVFSVKSDTYSFGVIVLEIISGLKISLTHCNGFPNLLAYAWSLWIDDRAMDLVDSSLEKSSSCSEALRCIQIGLLCVQDNPNSRPLMSSVVTMLENENV

SEQ ID NO: 51541 - protein, 821 aa, Zea mays
  Coding DNA Sequence Number=SeqID_9762
  Gene Ontology: Mol. function=protein serine/threonine kinase activity; Cellular component=membrane; Biological process=protein amino acid phosphorylation
  Homolog annotation: Hit_ID=Q8LLI3; Match level="QueryCoverage=93%, HitCoverage=96%, E-value=0.0, Identity=54%"; Hit description=S-locus receptor-like kinase RLK13
  Pfam annotation: Domain name=B_lectin; Domain location=93-205; Score =117.5; E_value=3.9e-32; Accession=PF01453.15; Description=D-mannose binding lectin
  Pfam annotation: Domain name=PAN_1; Domain location=365-440; Score =10.8; E_value=0.013; Accession=PF00024.16; Description=PAN domain
  Pfam annotation: Domain name=PAN_2; Domain location=360-429; Score =102.0; E_value=1.7e-27; Accession=PF08276.2; Description=PAN-like domain
  Pfam annotation: Domain name=Pkinase; Domain location=525-775; Score =136.9; E_value=5.5e-38; Accession=PF00069.15; Description=Protein kinase domain
  Pfam annotation: Domain name=Pkinase_Tyr; Domain location=525-775; Score=128.1; E_value=2.4e-35; Accession=PF07714.7; Description =Protein tyrosine kinase
  Pfam annotation: Domain name=S_locus_glycop; Domain location=220-348; Score=56.8; E_value=7.2e-14; Accession=PF00954.11; Description=S -locus glycoprotein family
  Pfam module annotation: Pfam domain module=B_lectin::PAN_1::PAN _2::Pkinase::Pkinase_Tyr::S_locus_glycop; Domain location=93-205::365- 440::360-429::525-775::525-775::220-348
MKCRARMQAQQRHLQTAVRTQESTHPGHVAGSGSGYTRSQSICGATLTHTKPLFPKETLISAGGDFALGFFSPTSSSNKLYIGIWYNNVPERERTVVWIANRDSPVTTPATSVKLAVTNDSELVLSDSQGHIFWMATSSTSGGAGAFAVLLNSGNFVLRSPNGTDVWQSFDHPTDTVLPTMRSMIRYRSQPATGLFAWKSPDDPSTGDISSGMDPASSNVQVFIWNGTLPYYRSSFFNDVPASGGTYQANNTSVTYQWMMVDTGDEIYYTFTVLAGSPYMHFSLHHTGKMRLLVWENSTSSWVLISEEPSVGCDLYASCGPFGYCDLTKAMPTCQCPDHFELVDSLNFSRGCQRKEELKCGTESYFMTMPNMKIPDKFLHIRNRTFDQCAAECARNCTCMAYTYATLSTASTTGDASRCLVWTQDLIDMEKASVFLENLYIRLGESPDQKKRNFQKILLSAIACLLLLTIGALGWACKIRGKWHKKKIQTRMMLEYLSSTDEAGGKNIEFPFITFENIVTATDNFSDCNILGKGGFGKVYKGMLEGTKEVAIKRLSKSSGQGAEEFRNEVILIAKLQHKNLVKLLGCCVHEDEKLLVYEYLPNKSLDYFLFDSARKSTLQWPTRFKIIHGVARGIMYLHQDSRLTIIHRDLKASNILLDKDMSPKISDFGMARIFSSDQLHANTNRVVGTYGYMSPEYAMEGAFSVKSDTYSFGVLMLEIAWNMWKEGKIEDLVDSSVMENCSLDEVSQCVHIGLLCVQDSPSFRPLMSAVVSMLENKTTTLPTPSQPVYFAVRDPYQPGKAVGNKELSIYDMSLTVPEGR

SEQ ID NO: 51542 - protein, 92 aa, Zea mays
  Coding DNA Sequence Number=SeqID_9763
MTHPKRSKKMVPELLGEDTKHRNSCVFDGATPDISKITQDIRDDAKMWCLAGAAGLKDMPAGCPFRQTLELVVAHREDIKAQFKAAQQIENP

SEQ ID NO: 51543 - protein, 147 aa, Zea mays
  Coding DNA Sequence Number=SeqID_9764
MVWNEAPESATQSMGGGDSEDMGGGDHKVSIVMEAIATLGNTSNPVEWRPSYGWTSMQSRRTEIMTRSTPRVCLREAGHRKGRHGRHGGVKEGHRGSKCKKARIVLEGRATRESGHGKGRAPDSKRNAMNSQGRVRAGEIGSYWGCR

SEQ ID NO: 51544 - protein, 183 aa, Zea mays
  Coding DNA Sequence Number=SeqID_9765
MDGNEEARAMVWERQKAEGSRGGEQSGGMAVAKGSHGKGMAVAEEVVVPYGGKGERGHETRDGNGYPNTQWVLPDMKAGMEWYYPTVAVYLPPGGYPLFQAVPVLTPALPGAAAPGPNAPTIRDTLLRRASAFSYIPTTPCTSLVTQTLPSTTLRNIAITFNLDIGALSAAPGPPAGTSFHYD

SEQ ID NO: 51545 - protein, 124 aa, Zea mays
  Coding DNA Sequence Number=SeqID_9766
  Gene Ontology: Mol. function=hydrolase activity, hydrolyzing O -glycosyl compounds; Cellular component=beta-galactosidase complex; Biological process=carbohydrate metabolic process
  Homolog annotation: Hit_ID=Q9FT03; Match level="QueryCoverage=93%, HitCoverage=28%, E-value=2e-44, Identity=65%"; Hit description=(1-4)- beta-mannan endohydrolase precursor
MASDPADRSKATAALDEAARLGATLVRTWAFSDGGYRALQVSPGVYDEEVFRGLDYVISEAKKRGIHLILSLVNNWDGYGGKKQYVQWARTQGHSLNSDDDFFTDSVTKGFYKSHVRARRPRTP

SEQ ID NO: 51546 - protein, 124 aa, Zea mays
  Coding DNA Sequence Number=SeqID_9767
  Homolog annotation: Hit_ID=Q6Z309; Match level="QueryCoverage=74%, HitCoverage=21%, E-value=6e-40, Identity=87%"; Hit description =Remorin protein-like
  Pfam annotation: Domain name=Remorin_C; Domain location=11-118; Score= 47.8; E_value=3.7e-11; Accession=PF03763.4; Description=Remorin, C -terminal region
MENQTIVRLLERPPELEPWCIGFSKFPGQPGCKREEAKITAWENLQKAKAEAAIRKLEMKLEKKRSSSMDRILGKLRSAQKKAHDMRSVVSYSEDHCGARTTKKTSFLVKTGKPFSCCFTYRAC

SEQ ID NO: 51547 - protein, 105 aa, Zea mays
  Coding DNA Sequence Number=SeqID_9768
MRREMNTERGEVRRKSGQEHASRIPSRPWEMDAGRGARLGERERSVQGRARLGEAKRKTRWKRGGAVELGAGRSRGARRKMGTAGEESAGRESGVGIFEEGSGDG

SEQ ID NO: 51548 - protein, 67 aa, Zea mays
  Coding DNA Sequence Number=SeqID_9769
MTEAGELPTVGPRTTMEQRTDEQENIRERDHAEYSDAAYQMEERKRWRDKAREGRCTYGIFEEEPAR

SEQ ID NO: 51549 - protein, 67 aa, Zea mays
  Coding DNA Sequence Number=SeqID_9770
MTEAGELPTVGPRTTTEQRTDEQENIRERDHAEYSDAAYQMEERKRWRDKAREGRCTHGIFEEEPAR

SEQ ID NO: 51550 - protein, 106 aa, Zea mays
  Coding DNA Sequence Number=SeqID_9771
MGLKPDRGLMALGQALRQMTRTSWSRALGMGTELEQGGGRNAGEPQQGPSRGSRSVGVHAMAKGEADHDKLEPGPGRGSHGKQTESVASWSWGMERTQGIRRREHD

SEQ ID NO: 51551 - protein, 84 aa, Zea mays
  Coding DNA Sequence Number=SeqID_9772
MAGARTVLFLPGCRALPSVLLAVLGPRLQSKIVVIPCVIEESQGLDEDETSSAVFPKRSTNCLNRKNRYRSHGFMSAVETVREA

SEQ ID NO: 51552 - protein, 130 aa, Zea mays
  Coding DNA Sequence Number=SeqID_9773
MVEERDSGRRRRGTEQEAGSCCGSTAAATVAARNIAGGGELLRWRRRTMESRDGEEWSRRRGAAVDRRRLLPQRRGTEQELRSCCGLAPAAAAAAWSGGRVESAAAWINEQSAGRLDRDSKWERGHIWCT

SEQ ID NO: 51553 - protein, 303 aa, Zea mays
  Coding DNA Sequence Number=SeqID_9774
  Homolog annotation: Hit_ID=Q7XN76; Match level="QueryCoverage=35%, HitCoverage=33%, E-value=7e-43, Identity=80%"; Hit description =Peroxidase
  Pfam annotation: Domain name=peroxidase; Domain location=1-159; Score= 20.2; E_value=4.4e-10; Accession=PF00141.13; Description=Peroxidase
MPGLPSEKESIPNLILRGFGTIDRVKAKLEQACPEVVSCADILALVARDVVVLTKGPHGDVPIWRRDGRRSVKQDALDNLHAPFFDVGRNMCQFFMPKGLNAKDQIVLLGVGVCRVPTTVWWLVSSGVESGGGVRSDSGGRRDAVRWPTGWQVELDASRGTGTGRTTEQADDTRRRQKLGGRGSGVGTRGSGRPQMASRPSRPGTAASRLNVGEQVRLQAATVFWRPEGVRVSDGLAGTWSRLGWAGGPANFFCTLMWPSSGATDRGVELRDGFRRVSITGIGRELGAMIYGAELGHVGASKA

SEQ ID NO: 51554 - protein, 63 aa, Zea mays
  Coding DNA Sequence Number=SeqID_9775
  Gene Ontology: Mol. function=catalytic activity
MGVTVGQPKFDEVEMDGRVVEQKGRMTAVAVEIRKKESGELVAIGRQWMTASRPKGATAHSKI

SEQ ID NO: 51555 - protein, 189 aa, Zea mays
  Coding DNA Sequence Number=SeqID_9776
MELGRCEVGDVVVDGDLDDALHGHDGRGAHVVRRRRDGARVPVPLRVLTRGRGGREPSQEPVTRPGLRESWDGRKEGRRGTHREVERHAERVERAASLREGHARAPESGSALKARPGASWGYTGDVIDRVHLLDTLVYAHAEYADERRRTGPDAAVAVAALEDAKSKRNEPLRVAMGSNPNATDSDGIL

SEQ ID NO: 51556 - protein, 126 aa, Zea mays
  Coding DNA Sequence Number=SeqID_9777
MKDQLSVQRIRSSMNVVSLERKMVTKDILLSMRVRTNSIKSEVLPQKSTLTQRPLRVLPQPNLVPLLGEHRAFADGDAVFWDKEYAHALKCYTLVTFILNQRLSKPAEVLVGTVLGLYEDIRYKSE

SEQ ID NO: 51557 - protein, 258 aa, Zea mays
  Coding DNA Sequence Number=SeqID_9778
  Gene Ontology: Mol. function=lyase activity
  Homolog annotation: Hit_ID=Q2QNQ1; Match level="QueryCoverage=91%, HitCoverage=53%, E-value=5e-55, Identity=51%"; Hit description=F-box domain containing protein, expressed
  Pfam annotation: Domain name=FBD; Domain location=141-192; Score =40.9; E_value=4.2e-09; Accession=PF08387.1; Description=FBD
MVLDGNIGCHSLHISSPTLRSLGVSDGVKVLEGKLQELIVEDALLLEMLIPQPPSYGLVIWVIHAPKLKTLGYLHDDIPTFQLGTMFFEKMVPIISLPNVMRTVRTLALLTTPDLDLVIGFLKCFPCVEKLYIVSYTRMLIKNEQGYVPLECLDRHLKNMQIINYEDNSADVNFVKFFILNARVLESMKFVVRQGQCDTKWIARQHKKLEIHLMNHYVGALVIISFEDVYQSDSLIVIFRGHITQELHIRFTPLRKHL

SEQ ID NO: 51558 - protein, 43 aa, Zea mays
  Coding DNA Sequence Number=SeqID_9779
MTLNGVGSYSLIEAKDFMFVESTIRTKIWPQHSSSLSRRDRFF

SEQ ID NO: 51559 - protein, 286 aa, Zea mays
  Coding DNA Sequence Number=SeqID_9780
  Pfam annotation: Domain name=PBD; Domain location=13-63; Score=5.9; E_ value=0.05; Accession=PF00786.18; Description=P21-Rho-binding domain
MVRRLKCKLGSRRIVKHVAHIGWDGPGSTNNNNNNNSNNNSGGAPSWMKDYHSAPLDSSSFRSESGGTAAANPWASQGCLRHSQIYTALAGLRSSSSSCCKPINQCGSYIYASNDVALNKNTMRSLMLLLCAQTHGHPRLCLMTEIVMDGASVGETSFRDTKSEAGVDVGGGDSPPSPATRRSRRHRSRGSGTSSMDATGGEGEEKTKEKSKKGTRKNRKKQDKSAGDDASGTCQDLPAVPKKSNRRKNKGSSEGSGSAAAKDTTAAAPEEVAASASATAPAVDDD

SEQ ID NO: 51560 - protein, 122 aa, Zea mays
  Coding DNA Sequence Number=SeqID_9781
  Subcellular localization annotation: CTP_CleavageSite=40; ConfidenceScore=5.42e-01
MAPFLPLSAVHGEQQAPPLVPSSMASLAQGQKQPCNRRCRASRWSVRRNVEPCGQPMRLVPFCSDWSFHERRMYEKKVAWLRRKNWRAVELCLSDVATRIKNVYLIYAEGESVDDCVCRNAL

SEQ ID NO: 51561 - protein, 577 aa, Zea mays
  Coding DNA Sequence Number=SeqID_9782
  Gene Ontology: Mol. function=protein serine/threonine kinase activity; Cellular component=membrane; Biological process=protein amino acid phosphorylation
  Homolog annotation: Hit_ID=Q6K5W7; Match level="QueryCoverage=91%, HitCoverage=76%, E-value=1e-135, Identity=47%"; Hit description =Putative wall-associated kinase
  Pfam annotation: Domain name=EGF_CA; Domain location=267-308; Score =30.2; E_value=7.2e-06; Accession=PF07645.6; Description=Calcium binding EGF domain
  Pfam annotation: Domain name=Pkinase; Domain location=374-574; Score =33.2; E_value=1.5e-10; Accession=PF00069.15; Description=Protein kinase domain
  Pfam annotation: Domain name=Pkinase_Tyr; Domain location=374-560; Score=2.5; E_value=1.3e-12; Accession=PF07714.7; Description=Protein tyrosine kinase
  Pfam module annotation: Pfam domain module=EGF_CA::Pkinase::Pkinase _Tyr; Domain location=267-308::374-574::374-560
MEVYAVGVLRLLPWLALAAALLPLARAASQQPPVRGCRRQCGNVTVPYPFGIGAGCHRGATTGGFRLQCDDAGGRGRPPRLTVAGYGHEVAAISLPTAEATVLLKASRACYDRPGDADGRVVSLQEHPMALNGSCRGDDGCCQSTIPLGLNSYRPYLGSFGRRRRRDQEATFLANSTACSYAFMVDAWWFWFAGSHFNRTGDFAVPVVLDWAIRDAPSCAAAERDSETYACRSAHSVCLESSNGPGYVCNCTGGYQGNPYVTDGCTDVDECRHRDEFPCYGVCVNTPGSFLCTCPNGSSGNATVQDGCRRDDDNKFGLPLKIVTGKRRLLQAKRRFFEQNGGVLLQQQLGSLASSGVAFSIFSGEEIGRATDGFAEARVLGRGGHGVVYKGVLADGSAVAVKKSRVVDARQVKEFAREMLILSQINHRNVVKLLGCCLEVEVPMLVYEYVPNGSLHAYIHGDGDGGGGGGEAKLNLPPGARLRIAAESADALAYMHSSASPPILHRDVKSANILLDGDLAAKVSDFGASRLAPAGEEAVATLVQGTLGYLDPEYLLTSQLTSKSDQGRAWLNSMVFN

SEQ ID NO: 51562 - protein, 407 aa, Zea mays
  Coding DNA Sequence Number=SeqID_9783
  Gene Ontology: Mol. function=DNA binding; Cellular component =mitochondrion; Biological process=DNA integration
  Homolog annotation: Hit_ID=UPI00004C1731; Match level="QueryCoverage =89%, HitCoverage=30%, E-value=1e-157, Identity=68%"; Hit description= UPI00004C1731 related cluster
  Pfam annotation: Domain name=rve; Domain location=103-278; Score =90.9; E_value=3.8e-24; Accession=PF00665.16; Description=Integrase core domain
MFFDGSLMKTGAGAGLLFISPLGKHLRYVLRLHFPASNNVAEYEALLVIDQVMKNSHYSNLKMEAYCDEVRRLEDKFYGLELNHIAWRYNETADELAKIASRRTTVPPDVFSRDLYQPSVKIDDTPEPEAPSAQPEKAPGGYTHMLVAIDKFSKWIEVRPLNNIGFEQAVAFFTNIIHRFGVPNSIITDNSTQFTGRKFLDFCEDHHIRVDWAAVAHPMTNGQVERANGMILQGLKPRIYNNLNKIGKRWIKELPSVVWSLRTTPSRATGFTPFFLVYGVEAILPTDLEYGSPRTKAYADQSNQASREDSLDQLEEARDKALLHSARYQQSLRRYHARGVRSRDLQVGDLVLWLRQDTRGRHKLTPPWEGPFVIAKVLKPGMYKLANSQGEVYSNAWNIQQLRRFYP

SEQ ID NO: 51563 - protein, 176 aa, Zea mays
  Coding DNA Sequence Number=SeqID_9784
  Subcellular localization annotation: CTP_CleavageSite=42; ConfidenceScore=5.00e-01
MAGPRAGRGRGPRPRLGAATPRRGQGGCAGQGGARTGAPWSRRASVSGQGCHGRGGARGEAAPGGRHGWAARTGSSCRAEGAGLGGPRRGQGQRQTATPSRAGGHAERARRGPTGRGCVGVGAPPRTGTVAGEEGKKRGARERREKGLTAWGRGWHLGRRFRAAGAVEEGVELREG

SEQ ID NO: 51564 - protein, 197 aa, Zea mays
  Coding DNA Sequence Number=SeqID_9785
  Subcellular localization annotation: CTP_CleavageSite=52; ConfidenceScore=5.56e-01
MWAAAAPSGGFWMLPVSASSAAAARPAEQPMWSFSGGGGTGTVQAPLQFMSRASYPGGAAGGGGGAMSDTNLGMLAALNAYNRGGSEEQQQTEGEQQHGGDGGVNDDGDEDGDDSAEENNGNNSSHGSKLGRAKDMSLRGFFIGAYAITNIDNQTRSMDYMQSRKRGSQISYRGGSGAKKLLGGVLAKSWFGGAPTS

SEQ ID NO: 51565 - protein, 55 aa, Zea mays
  Coding DNA Sequence Number=SeqID_9786
MAFTGSRSTTVTAESSWLETSGVTYEQVDVAPKLRAGELQLSGGKRNRLKGEKAI

SEQ ID NO: 51566 - protein, 108 aa, Zea mays
  Coding DNA Sequence Number=SeqID_9787
  Homolog annotation: Hit_ID=Q5QMW8; Match level="QueryCoverage=73%, HitCoverage=6%, E-value=3e-27, Identity=73%"; Hit description=HEAT repeat-containing protein-like
MAAVGVGAADERWASLCNCVVNFLLEERYHLTALELLQELQEDGRSAHALRLRAFFSDPALFPPDLVARSSSAPPAPNTQEEPAAVLSGQARDGPRPGAGRSATWRRG

SEQ ID NO: 51567 - protein, 561 aa, Zea mays
  Coding DNA Sequence Number=SeqID_9788
  Gene Ontology: Mol. function=DNA binding; Cellular component=nucleus; Biological process=regulation of transcription
  Homolog annotation: Hit_ID=Q6YZ61; Match level="QueryCoverage=78%, HitCoverage=71%, E-value=1e-143, Identity=61%"; Hit description=MYB transcription factor-like
MVNKSEENDFEKKGTSDPVVYQLVRVEGDGTLVPATEDDVLQFEHFLHNEKVDLPPIEDADHVEEFFNNDCMLLKKPDLEDGSSKLETVEAHTQKLGANLEENILQSLDDSLSPPSDFRIHSQHSDKLLTEQGANVTRQDNASTETTKSTVLNDSCCAEKYKADACSRSVCDTSTDPSVSGVNSSMPDFSILRGEVCLDDLTIRELQEAFRATFGRQTNVKDKIWLKRRITMGLTNSYDVPSSGCVVKDYKIVGKDAKNDMSDMDERAKTGLRATSVVIYPGNEGDSPSSSYYQSEDQEDSSKRVPIHNDEPQGNLLGEQCTDKRTRKPTKRYIEELSDIETHDSTVKNSSPAKRPAHDELLMNPRVAPFNETGSLGTIYPTRKDTFGGFSVHVPYVSRMRRGRPRKDFISFADKGPSVEPKGIQPSVEMILVKDGDKGNHLRKVPEVPLKEARNKLCPTKHINDSKNWVPESPPKKLGWGRKDRPPGIILRRDRNMVPAEKSPEHWLLANLSGVQQQLLVANHIKNLQLEGAQLFQIRFQGENLMVPKNIVVCRLAAIGT

SEQ ID NO: 51568 - protein, 218 aa, Zea mays
  Coding DNA Sequence Number=SeqID_9789
MHAALARPAELRDRSGHAAGTRSASLRAAGVGSPPRRDLEKRGGKGRGRASRATPCFSPQGGAEERRKGGFEKGKGIQPGRGGRAGGRLGWIRDADRTAGCRGAGGDDDDDITILVLLLYPIIFDVIEWMVRGDPKGTHTHMGGRRHGSRTVVRARALEAAAKSRQRRFWSGRKRGNGSCPLGWEGARAQQREIASQTTSAKMPSQGEKVPIQIKKGR

SEQ ID NO: 51569 - protein, 108 aa, Zea mays
  Coding DNA Sequence Number=SeqID_9790
  Gene Ontology: Mol. function=peroxidase activity
  Homolog annotation: Hit_ID=Q00UY7; Match level="QueryCoverage=83%, HitCoverage=36%, E-value=2e-21, Identity=48%"; Hit description =Homology to unknown gene
MPRPGAPAQFRRLFPPTRWACEFNTALTVPFFRWLVGPSEVEVGGLRQRSEVRIEKCRYLESSGCVGMCVNMCKVPTQDFFTNEFGLPLTMDPSSMLTLCAPACPKLQ

SEQ ID NO: 51570 - protein, 60 aa, Zea mays
  Coding DNA Sequence Number=SeqID_9791
MHICEEEWRSDEMKKSGCAGEMVRMTAAPHRPSSVVRVHERGGVASVSSAHFFTAEPYKA

SEQ ID NO: 51571 - protein, 363 aa, Zea mays
  Coding DNA Sequence Number=SeqID_9792
  Subcellular localization annotation: CTP_CleavageSite=79; ConfidenceScore=5.30e-01
MGALSPRYLIPIAHTDLCLVDTHYQRLRGRRTAAAAALSPPGKSTSTRPTSSPVPPCLRTTAPEPRRPGPSRGHQPSFSAALLDAIYHSLEADAEARTSTEARRDAHAGVVPGAASEPTSPDARAVAVAVPVPLLGPVTAAAEGAAAVPRPAGPAAQLQRLPPPASAPSAAPTRTRAVVDRAPPRRGRGEEEGPREEEQEDGAVRVPPQRPALQQEAGEAGRPHAACNGNANANARHRGAGAGVGEVDPLVARLAEPEGVRGGGRVGDGHGHGAGSVGTATTGLRAKESAAEAERRVEELLRALGVADERERAKESTESSSDLFELDSLPAFQDRGTDLPRSRTVADGDDGAGLLARPRPRVQ

SEQ ID NO: 51572 - protein, 282 aa, Zea mays
  Coding DNA Sequence Number=SeqID_9793
  Gene Ontology: Mol. function=transcription factor activity; Cellular component=nucleus; Biological process=regulation of transcription, DNA-dependent
  Homolog annotation: Hit_ID=Q10R12; Match level="QueryCoverage=53%, HitCoverage=67%, E-value=9e-34, Identity=54%"; Hit description=CCAAT- binding transcription factor subunit B family protein, expressed
  Pfam annotation: Domain name=CBFB_NFYA; Domain location=113-169; Score=135.4; E_value=1.6e-37; Accession=PF02045.6; Description=CCAAT- binding transcription factor (CBF-BNF-YA) subunit B
MQPRGPDQRKGRRGGGKAQRAGNSFGKTVNDHLRSTLSFDNKQPPFASQNFDYGQTIACISYPYNRSRSGDVWAAYESRTSTATVLHLKQFRSQIAGGGSSTRIPLPLELAENEPIYVNPKQYHGILRRRQLRAKLEAQNKLVRARKPYLHESRHLHAMKRARGSGGRFLNTKQLQQSHTALTRSTTTSGTSSSGSTHLRLGGGAAAAGDRSVLAPKTMASQDSSKKAVSSALAFTATPMLRRDDGFLQHPSHLFSFSGHFGQASAQAGVHNGSQHRVPVMR

SEQ ID NO: 51573 - protein, 121 aa, Zea mays
  Coding DNA Sequence Number=SeqID_9794
MASTVARGLVISLAQSLDIGDPARMTIVKRDLQVWRLARHGLVRFYPNPYGLRGIEEVSIPNKSKSPPIRIIPLRSIWIENNRTSPKEGHTPEEARGEARPMQIAPYVYTGACPPVGGGDG

SEQ ID NO: 51574 - protein, 85 aa, Zea mays
  Coding DNA Sequence Number=SeqID_9795
MDESGVVWPLVFCFKKEKGDRVMIGPNPTRGCVDGVRPVLNTHAIYCSTTTAALFDRYQSDRQSVYRLESQRELSSGRPHGANSG

SEQ ID NO: 51575 - protein, 189 aa, Zea mays
  Coding DNA Sequence Number=SeqID_9796
  Gene Ontology: Mol. function=hydrogen ion transporting ATP synthase activity, rotational mechanism; Cellular component=proton -transporting two-sector ATPase complex; Biological process=ATP synthesis coupled proton transport
  Homolog annotation: Hit_ID=Q6EPF2; Match level="QueryCoverage=76%, HitCoverage=37%, E-value=2e-24, Identity=44%"; Hit description=Ring zinc finger protein-like
  Subcellular localization annotation: CTP_CleavageSite=60; ConfidenceScore=5.32e-01
MATLRSPSPRGDVLLDSAPLLGGVGRRRAGALRRPSLRGAARLLRRGGRRAMREPSLLVREAAAEQLEERQADWAYSRPVVALDFLWNLAFILVSAVVLVLSHHESPSMPLRFWIAGYTAQCVVHMVCVAIEYRLRYGQLGGSPIPVDEESGSGSASSSSSDDDREHGSHSRSGDCLRRNHISGGDCDC

SEQ ID NO: 51576 - protein, 211 aa, Zea mays
  Coding DNA Sequence Number=SeqID_9797
  Gene Ontology: Mol. function=RNA-directed DNA polymerase activity; Cellular component=integral to membrane; Biological process=RNA -dependent DNA replication
  Homolog annotation: Hit_ID=Q7FS87; Match level="QueryCoverage=96%, HitCoverage=16%, E-value=2e-84, Identity=74%"; Hit description =Putative glycerol 3-phosphate permease
MARAKWPLSGNSPATYDYNSPDCPPVSNLSTLEMPFSRSEIDQIIKNLPSNKSPGPDGFNTDFVRKCWPVIATNFYELCDKFYDGSICMDSINGSYVTLIPKHSSPASVGEYRPISLLNTSMKVLTKLLANRLQLVMTKLVHQNQYGFLKARTIHDYLAWAFEYISICHKSGKEMVILKLDFEKTFDKLEHAAIIDILRHKGFGDKWIHWI

SEQ ID NO: 51577 - protein, 128 aa, Zea mays
  Coding DNA Sequence Number=SeqID_9798
MDDLAALARGEGWTEERHATFLDRLELSFVQQVLGGTDVRQASRRLGVRPAPREEGWRGQVLSSLPLDRHTTRQRRGVQPVGPGRSSATRGKRRAPSSPVDPAAGLVKEAFPSRANVVLVIISMTLTV

SEQ ID NO: 51578 - protein, 41 aa, Zea mays
  Coding DNA Sequence Number=SeqID_9799
MSSMWFLSVLPKIFLSNNLVKARGDAGNMKDFEEFQDYDEF

SEQ ID NO: 51579 - protein, 173 aa, Zea mays
  Coding DNA Sequence Number=SeqID_9800
MVLRAAWRNFWWPGRSASWPTNSGECERREQSAREGELARNEEGERVRVRAVLKRDLGCVGRRRGWGSRCACVLVHGGSWGRQSWQGGPTAQLGKTGVWRKRFIALMKWARKAETEEGRAGEQATGADNPAPLGRGRARKARGERKPPLTGGANCQVMSDNRRRGGRRAQQEQ

SEQ ID NO: 51580 - protein, 153 aa, Zea mays
  Coding DNA Sequence Number=SeqID_9801
MDKSNKRKREPTPPSEDFGDSEYLEEEFSSESEGSPAPVSSPASSDDSDDSQGLAAEVWTYIRAVERSGLEGSDESEYSSDEEDSSDSSEEGGGGDGGDDDDDDDGGDGDDGDDDGDSGSRGGNSDSKGGNGGGKSKGSNGGGSNKGSNKASG

SEQ ID NO: 51581 - protein, 90 aa, Zea mays
  Coding DNA Sequence Number=SeqID_9802
MKLREGQPPWGRRPSRGSSRLGKNSTNHGEQGEEEAPSGREEAGRGYQEAKARAEDRDRRHGERELRGRDEQEIEEEDCAREDIGAERRR

SEQ ID NO: 51582 - protein, 111 aa, Zea mays
  Coding DNA Sequence Number=SeqID_9803
MAHRTVQCTPDMSGAPATSSMPLDSDRWSSDLWARLDVRWRTGHALFTVRCASMGTPDFCARCARIKCSAVTALVPTITGMGDHVSGRVRGKVYCQVQSGFNNIVQRRKLS

SEQ ID NO: 51583 - protein, 70 aa, Zea mays
  Coding DNA Sequence Number=SeqID_9804
MARCPARSPSYSDAPNPLWSSTTQHERQDEQGCDDCFSTRVRDDREEGKAAEAPALSPSSRNGQPQFPWS

SEQ ID NO: 51584 - protein, 1022 aa, Zea mays
  Coding DNA Sequence Number=SeqID_9805
  Gene Ontology: Mol. function=protein serine/threonine kinase activity; Cellular component=integral to membrane; Biological process=protein amino acid phosphorylation
  Homolog annotation: Hit_ID=Q9FII5; Match level="QueryCoverage=91%, HitCoverage=90%, E-value=0.0, Identity=46%"; Hit description =Receptor protein kinase-like protein
  Pfam annotation: Domain name=LRRNT_2; Domain location=36-87; Score =22.9; E_value=0.0012; Accession=PF08263.3; Description=Leucine rich repeat N-terminal domain
  Pfam annotation: Domain name=LRR_1; Domain location=118-140; Score =9.3; E_value=5.1; Accession=PF00560.23; Description=Leucine Rich Repeat
  Pfam annotation: Domain name=LRR_1; Domain location=142-164; Score =14.0; E_value=0.54; Accession=PF00560.23; Description=Leucine Rich Repeat
  Pfam annotation: Domain name=LRR_1; Domain location=167-189; Score =7.9; E_value=9.5; Accession=PF00560.23; Description=Leucine Rich Repeat
  Pfam annotation: Domain name=LRR_1; Domain location=191-213; Score =11.3; E_value=2.2; Accession=PF00560.23; Description=Leucine Rich Repeat
  Pfam annotation: Domain name=LRR_1; Domain location=215-237; Score =15.8; E_value=0.16; Accession=PF00560.23; Description=Leucine Rich Repeat
  Pfam annotation: Domain name=LRR_1; Domain location=239-261; Score =5.3; E_value=29; Accession=PF00560.23; Description=Leucine Rich Repeat
  Pfam annotation: Domain name=LRR_1; Domain location=263-285; Score =6.9; E_value=14; Accession=PF00560.23; Description=Leucine Rich Repeat
  Pfam annotation: Domain name=LRR_1; Domain location=287-309; Score =9.2; E_value=5.3; Accession=PF00560.23; Description=Leucine Rich Repeat
  Pfam annotation: Domain name=LRR_1; Domain location=311-333; Score =15.1; E_value=0.25; Accession=PF00560.23; Description=Leucine Rich Repeat
  Pfam annotation: Domain name=LRR_1; Domain location=335-357; Score =13.2; E_value=0.96; Accession=PF00560.23; Description=Leucine Rich Repeat
  Pfam annotation: Domain name=LRR_1; Domain location=359-381; Score =14.1; E_value=0.5; Accession=PF00560.23; Description=Leucine Rich Repeat
  Pfam annotation: Domain name=LRR_1; Domain location=383-406; Score =6.9; E_value=14; Accession=PF00560.23; Description=Leucine Rich Repeat
  Pfam annotation: Domain name=LRR_1; Domain location=407-429; Score =1.8; E_value=1.3e+02; Accession=PF00560.23; Description=Leucine Rich Repeat
  Pfam annotation: Domain name=LRR_1; Domain location=431-453; Score =9.7; E_value=4.4; Accession=PF00560.23; Description=Leucine Rich Repeat
  Pfam annotation: Domain name=LRR_1; Domain location=455-477; Score =17.9; E_value=0.036; Accession=PF00560.23; Description=Leucine Rich Repeat
  Pfam annotation: Domain name=LRR_1; Domain location=479-502; Score =8.9; E_value=6.2; Accession=PF00560.23; Description=Leucine Rich Repeat
  Pfam annotation: Domain name=LRR_1; Domain location=528-550; Score =14.1; E_value=0.5; Accession=PF00560.23; Description=Leucine Rich Repeat
  Pfam annotation: Domain name=LRR_1; Domain location=552-574; Score =16.5; E_value=0.096; Accession=PF00560.23; Description=Leucine Rich Repeat
  Pfam annotation: Domain name=LRR_1; Domain location=576-598; Score =15.8; E_value=0.15; Accession=PF00560.23; Description=Leucine Rich Repeat
  Pfam annotation: Domain name=LRR_1; Domain location=600-620; Score =1.7; E_value=1.4e+02; Accession=PF00560.23; Description=Leucine Rich Repeat
  Pfam annotation: Domain name=Pkinase; Domain location=706-1000; Score= 140.6; E_value=4.3e-39; Accession=PF00069.15; Description=Protein kinase domain
  Pfam annotation: Domain name=Pkinase_Tyr; Domain location=701-1000; Score=86.5; E_value=8e-23; Accession=PF07714.7; Description=Protein tyrosine kinase
  Pfam module annotation: Pfam domain module=LRRNT_2::LRR_1::LRR_1::LRR_ 1::LRR_1::LRR_1::LRR_1::LRR_1::LRR_1::LRR_1::LRR_1::LRR_1::LRR_1: LRR_
  Pfam module annotation: Pfam domain module=Domain location=36-87::118- 140::142-164::167-189::191-213::215-237::239-261::263-285::287 -309::311-333::335-357::359-381::383-406::407-429::431-453::455
  Pfam module annotation: =552-574::576-598::600-620::706-1000::701-1000
  Subcellular localization annotation: CTP_CleavageSite=62; ConfidenceScore=5.28e-01
MAATTGTSSSPPQLPVHGGLLLLLPLLTITSAASSAPLPLLALLSLKSSLHDPAGALRAWTYAAAASAGATRSLAPPWCAWPGVSCDPATGDVAGLDLSRRNLSGTVSATAARLLARTLTSLNLSANAFAGEFPPSVFLLRRLQSLDVSHNFFNGTFPDGVAGLGGSLAALDAYSNCFVGSLPRGLGELRRLQSLNLGGSFFNGTIPAEIGQLRSLRFLHLAGNALTGRLPSELGGLASLEQLEIGYNAYDGRIPTELGNLTQLQYLDIAVANMSGPLPPELGKLARLEKLFLFKNRLAGAIPPQWSRLRALQALDLSDNLLAGTIPAGLGDLGNLTMLNLMSNFLSGTIPKAIGALPSLEVLQLWNNSLTGRLPESLGASGRLVRVDVSTNSLSGPIPSGMCIGNRLARLILFDNQFDWTIPASLANCSSLCRVRLESNRLSGEIPVGFGAIRNLTYLDLSSNSLTGGIPADLVASPSLEYINISGNPVGGALPNVSWQAPNLQVFAASKCALGGEVPAFRAAGCSNLYRLELAGNHLTGAIPSDISTCKRLVSLRLQHNQLSGEIPAELAALPSITEIDLSWNELSGVVPPGFANCTTLETFDVSFNHLVTAGSPSASSPGAREGTVRRTAAMWVSAVAVSLAGMVALVVTARWLQWREDGTGARGVGSRGGAGARPNVVVGPWRMTAFQRLDFTADDVARCVEGSDGIIGAGSSGTVYRAKMPNGEVIAVKKLWQPSAQKEGGAQAPEEPPKRKDEADADDGNRSMLAEVEVLGHLRHRNIVRLLGWCTDGEATLLLYEYMPNGSLDELLHGAVCRGKQAGLDWDARHRIAVGVAQGMSYLHHDCVPAVAHRDLKPSNILLDADMEARVADFGVAKALQGAAPMSVVAGSYGYIAPEYTYTLQVDEKSDVYSFGVVLLEILIGRRSVEAEYGEGSNIVDWTRRKVAAGNVMDAAEWADQQTREAVRDEMALALRVALLCTSRCPQERPSMRDVVSMLQEVRRGRKILAPGMAKKQPKIN

SEQ ID NO: 51585 - protein, 71 aa, Zea mays
  Coding DNA Sequence Number=SeqID_9806
MRGGHAPVDRENRHDGSGPTYRLAPSPEVGPGATVGTSRQGYPFCSMKTLHQYDTPRSHGEQHPTPPHGQG

SEQ ID NO: 51586 - protein, 68 aa, Zea mays
  Coding DNA Sequence Number=SeqID_9807
MARGTITGEPGAQDASPREALNQSAAISSKLIRIPRPWYVIAIHVFQPVLKPVSTKVVLGSGTVSTGE

SEQ ID NO: 51587 - protein, 201 aa, Zea mays
  Coding DNA Sequence Number=SeqID_9808
MEKELADLSLGEEEEEGVQFELEGTVGMSREEFEQRWARKSLREMLSAVEERVGKLEESMEDVKKSGNALGESIDDLREQSRDFVTTCLTSQRDNVRELLDSQKKKLTERNDALEATMMALKEETMATVRALSTRIEELEGELALCRAAVGKGVSSAVLSNEDVPKPKEFVGTRSAYDVDNFLWRMENYFRAKGIVDDAVK

SEQ ID NO: 51588 - protein, 552 aa, Zea mays
  Coding DNA Sequence Number=SeqID_9809
  Gene Ontology: Mol. function=phospholipase C activity; Cellular component=cytoplasm; Biological process=intracellular signaling cascade
  Homolog annotation: Hit_ID=Q84K11; Match level="QueryCoverage=99%, HitCoverage=99%, E-value=0.0, Identity=77%"; Hit description=Type 5 protein serine/threonine phosphatase 62 kDa isoform
  Pfam annotation: Domain name=Metallophos; Domain location=289-485; Score=123.1; E_value=7.7e-34; Accession=PF00149.18; Description =Calcineurin-like phosphoesterase
  Pfam annotation: Domain name=PPP5; Domain location=111-189; Score =12.9; E_value=9.1e-06; Accession=PF08321.2; Description=PPP5
  Pfam annotation: Domain name=PPP5; Domain location=197-283; Score =86.0; E_value=1.2e-22; Accession=PF08321.2; Description=PPP5
  Pfam annotation: Domain name=TPR_1; Domain location=11-44; Score =28.2; E_value=3e-05; Accession=PF00515.18; Description =Tetratricopeptide repeat
  Pfam annotation: Domain name=TPR_1; Domain location=72-105; Score =43.8; E_value=6e-10; Accession=PF00515.18; Description =Tetratricopeptide repeat
  Pfam annotation: Domain name=TPR_2; Domain location=11-44; Score =25.2; E_value=0.00023; Accession=PF07719.7; Description =Tetratricopeptide repeat
  Pfam annotation: Domain name=TPR_2; Domain location=72-105; Score =37.6; E_value=4.2e-08; Accession=PF07719.7; Description =Tetratricopeptide repeat
  Pfam module annotation: Pfam domain module=Metallophos::PPP5::PPP5::TP R_1::TPR_1::TPR_2::TPR_2; Domain location=289-485::111-189::197 -283::11-44::72-105::11-44::72-105
MENEGSDVSRAEEIKNQANEAFKAHRYGQAIDLYTQAIELNSQNAVYWANRSLAHTKLEEYGSAIQDATKAIEGYYRRGAAYLAMGKFKEALKDFQQVKRICPNDPDATKKLKECEKAVMKLKFEEAISVPESERRSVADSIDYRTISIFFFPLFLPFISELYVFFCLLEMVFHINMIFIRAAISCLYLWVIENFNRMSKYLRAGGIYLEHVIILVIDSLCYIHLVEPQYLGSKIEGDVVTLDFVKKMMDDFKNQKCLHKRYAFQIVLQMREMLQALPSLVDINVPDGSLLTVCGDVHGQFYDLINIFELNGLPSEENPYLFNGDFVDRGSFSVEVILTLFAFKCMCPSAIYLARGNHESKSMNKIYGFEGEVRSKLSETFVELFAEVFCYLPLAHVINQKVFVVHGGLFSVDGVKLSDIRAIDRFCEPPEEGLMCELLWSDPQPYPGRGPSKRGVGLSFGADVTRRFLQDNNLDLVVRSHEVKDEGYEIEHDGKLITVFSAPNYCDQMGNKGAFIRFEAPDLKPNIVTFSAVPHPDVKPMAYANNFLRMFQ

SEQ ID NO: 51589 - protein, 344 aa, Zea mays
  Coding DNA Sequence Number=SeqID_9810
  Gene Ontology: Mol. function=1,3-beta-glucan synthase activity; Cellular component=1,3-beta-glucan synthase complex; Biological process=1,3-beta-glucan biosynthetic process
  Homolog annotation: Hit_ID=UPI000034F02F; Match level="QueryCoverage =95%, HitCoverage=62%, E-value=3e-50, Identity=60%"; Hit description =ATGSL11 (GLUCAN SYNTHASE-LIKE 11); 1,3-beta-glucan synthase/ transferase, transferring glycosyl
MDPASSGRGVRQLKTYLSTKIEEEKDEIKCQLARTDERETQLYYQIFYEKNIKEGQDTKQPEEMAKFYQIAMVLRDVLKTVLPSSQVDYKTVKYVKELESRKEQYEHYNILPLYAVGIKPPIMKLPEITVPFQAIRNVENLPMPIAHSGSDVNLYVNDIFDWLLSLYGFQMADHWDDEIYKAQITKALQGIMDTVTHDVMINGQNVLTPYYSEHILFTDDELNKENEDGISTLFYLQKIYPASREEDSARAQALPDLKFTYVVSCQIYGTLKNSDDSHDQSRQRSILDLMLMHPSLRVAYIDEREETVNGESEKSFYSVLVKGGDKFDGYERLPLAFLLSLVGS

SEQ ID NO: 51590 - protein, 120 aa, Zea mays
  Coding DNA Sequence Number=SeqID_9811
MTELPLQGKMTEIPLKGKITKIPPKGKMIEIPPNGKMTKMPLKGKMIEIPLMGKMTKIPSKGKMIEIPPKGKMIEIPLKALLRHYYWQFFCDIGVLARWVILSHRRFDAARDSEVLVIDI

SEQ ID NO: 51591 - protein, 105 aa, Zea mays
  Coding DNA Sequence Number=SeqID_9812
MDYKKVWKPFLSKKILETSTKEKSINVGKIILKEIHDYAKKKAGSAYFPSLITSLCLRARVKTQAKSKGVTLKKKNLIRNQIVLNQLKELKTLNPGLSQKKNQSS

SEQ ID NO: 51592 - protein, 44 aa, Zea mays
  Coding DNA Sequence Number=SeqID_9813
MGSQTYKGHNKTGSCEGINLTQVIYLATAIRNLLTCKVREEWVT

SEQ ID NO: 51593 - protein, 53 aa, Zea mays
  Coding DNA Sequence Number=SeqID_9814
MKQNIVESLQRVQRCLRMVISGYAWEWMEKKPYISTLGLQWENDGTNFCILVD

SEQ ID NO: 51594 - protein, 473 aa, Zea mays
  Coding DNA Sequence Number=SeqID_9815
  Gene Ontology: Mol. function=nucleoside-triphosphatase activity; Cellular component=nucleus; Biological process=transcription termination from RNA polymerase II promoter
  Homolog annotation: Hit_ID=Q9HFI5; Match level="QueryCoverage=42%, HitCoverage=9%, E-value=1e-33, Identity=43%"; Hit description =Related to SEN1 protein
MHPEICRFPSLHFYDKKLLNGDTVLSKSASFHGTEGLGPYVFYDVVDGLELHGKNSGALSLYNECEADAAVELLKFFRKRYPSEFVVCKIGIITPYKCQLSLLRSRFSSVFGSSVINDIEFNTVDGFQGREVDILVFSTVRASSSSQGVSSSSSIGFVADVRRMNVALTRAKLSLWILGNTRTLQTDRNWSALVKDAKQRNLVLSIKRPYSISFRTNTGKTLVPEGSDNHLSQMKHVEKVRGDGQLAKQNECREKLKFEGKRKHIDSVADCNWSSAGGDIDSVKSKDKHRSKRKAKDDCEPPPGRTILSASANDDRRRPQKVKSRVPEKLLISSGSQEKEGSEVKVKMGENQRSNNDNGGQEVGRSGKNKMSKESKKSSVQEQSSNVSTPRPDGNNEERESNKGGRDPKEVATSQNLFLKRKQQREAVDAILFSGLIPSKKSEQSSKKLHQERSIVPPSVASGSFKPPKKRKG

SEQ ID NO: 51595 - protein, 403 aa, Zea mays
  Coding DNA Sequence Number=SeqID_9816
  Pfam annotation: Domain name=Chromo; Domain location=335-390; Score =22.1; E_value=0.0019; Accession=PF00385.14; Description='chromo' (CHRromatin Organisation MOd
MEIPKGAHNQFDILEGSLADIFDFGDEENVLHEAGPTKFAMHVEEKDYEMLEPIYDEYPEESEENEAYPIKGKSLFVYIMTATTIKEGEDWRRIGNLLDMSYDDFGVKTINPVSVCKSDSAKKKLNIKCIYTDHECGGQTTLDIAKQHAAVVTATLNAVIFSGTCSRETKDGKHAACESKDIAHMSNKTLIENAGDKKDVSQGTLTYDGDQTGMVETFINDSEIKEESLGMTDIDSGIEAKPSSKGYLRACNGNSRSVALKDIAAGTLVFDIFAACLSRVSFDKYDLISIVKRYFIAAVVSKGFKALENTILEGFDGNAAEISDQVQQLPTTKLEVIEDVLDLKKVRSRRGNKYRRFLVKWLGNPASKITWIAEEKLQRVNPEIYAEVVKVFSPELSFPSQGE

SEQ ID NO: 51596 - protein, 444 aa, Zea mays
  Coding DNA Sequence Number=SeqID_9817
  Gene Ontology: Mol. function=DNA binding
  Homolog annotation: Hit_ID=Q1SFS3; Match level="QueryCoverage=63%, HitCoverage=51%, E-value=8e-21, Identity=27%"; Hit description =Lambda repressor-like, DNA-binding
MANNFLDKVEDNAIVCIWSEKVQLEKGDSLAKDYRSELWDYTRISMTQNSLQELSEIWDWWDDETKQLFYSNYGDLPYLLNIKVDERPFHALAQYWNPAYSCFTFGNVDLVPTVEEYTALLHCPRLQVDKAYSEAAYVPAFWKKLMSITGMSEQWITARIKQKGECKCIPWRNLRDLILAHPDGKKKVDVFALSIYELVIFPRALGHVDEAVLDLFDQLGKGVTPVPAILAETFRSLNACRRAGEGRFIGCVQLLIAWFHSHFWKVEKLSYSVFSEHYSPLKEIVATPRRDDISEENWIAILQNLQEDDVEWRAPWLIPDGILYHCRSFDWVPLLGIWGAVRYAPLLVLRQYNSRQFVSATINDNILELNLESVRPMEEYLQVIPSELEIIKQDFEKRNLELEKKIERLEEEKMHLRLDVDVQKLEAEKLKKGKNKVEEDLDNL

SEQ ID NO: 51597 - protein, 74 aa, Zea mays
  Coding DNA Sequence Number=SeqID_9818
MARTRGSGRIIQNIPSRCHEVPNFIYDFSIPEGLNRLSDTNDAKEDTGDVNEIITSSSIVPTALLTVLALGIEY

SEQ ID NO: 51598 - protein, 82 aa, Zea mays
  Coding DNA Sequence Number=SeqID_9819
MTLQSPIPLLAFARPHIRLKRGQEPRAIEQAPELLPTLASDYNNEDLEECGYEACKKIIVSISDGPDPEDGDGDDEKWSRLA

SEQ ID NO: 51599 - protein, 198 aa, Zea mays
  Coding DNA Sequence Number=SeqID_9820
  Homolog annotation: Hit_ID=Q6QP51; Match level="QueryCoverage=26%, HitCoverage=23%, E-value=1e-14, Identity=71%"; Hit description =Putative growth-regulating factor 1
MQAACNRTKGARPFDFDTSSMEAQAHTSCNRRAGYYVQETAPPLRPVPHLLDCGTGAATRGNPARDPTVPTEHIGHGSVNHGRRRDGRYGQKWADSNGGGRTGSTFGRRSRQRFTSAMMTSSKKGPGKGILRKGSFSVKEAGPEPPTDQRFEGWPLGRVQQPPQSTRAPRPLLVRGSKAGPSEGFNGRLRPLGLHAHY

SEQ ID NO: 51600 - protein, 114 aa, Zea mays
  Coding DNA Sequence Number=SeqID_9821
  Homolog annotation: Hit_ID=Q6QP51; Match level="QueryCoverage=45%, HitCoverage=29%, E-value=5e-14, Identity=71%"; Hit description =Putative growth-regulating factor 1
MAAPRATRPVALTLRQDRRHLWQAKHATHHFRHDDRVKKGTGKGDTPKGILLHEGSGPRAPPTDQRFEGWSLGRVQQPPQSTRAPRPLLVRGSKAGPSEGFNGRLRPLGLRAHY

SEQ ID NO: 51601 - protein, 677 aa, Zea mays
  Coding DNA Sequence Number=SeqID_9822
  Gene Ontology: Mol. function=metal ion binding; Biological process =RNA-dependent DNA replication
  Homolog annotation: Hit_ID=Q2QZM2; Match level="QueryCoverage=90%, HitCoverage=98%, E-value=2e-52, Identity=36%"; Hit description =Expressed protein
  Pfam annotation: Domain name=DUF594; Domain location=613-668; Score =73.8; E_value=5.6e-19; Accession=PF04578.4; Description=Protein of unknown function, DUF594
MGLRNTTATIVESLRTVEGQLVRVEVLVLLSNLLLALLVVLSPYRHRAWRTSPSASSCGRSTRSPPSSSPTPLVFGLLEAGPFHDQTFVLWGAALLVQAGADSLSAYNLRDGRNRCYSATIWIFWILSIAKAHAKFQALREASRTDGLMKHTKVVADYMMTEHESGHVFDATNMQGYRYIFHGEDLTLPYLSKPDYRTALAACAFTTVDTVWQWIDSQSVSVFSREHGGILKDIALSFTLFKLLKRRFGKYDHGEAGRPKTRTLIVSGLLREEAGYSRAFRVIEMELTFLYDFFYTRHQSHTQYVGMTVVFVLPVIVWNAISGAFSRHYHRTSLEQTVNGTDVIHCITIVLMVVVVVVLVVESRINDQKWRVVDDLHTLTGASKITWKGEAVPFDDGSRKQATKGIKKRKHRKLTGRNWDRKLGQYSLLHSFDYHPRNVASILSLGLIEPTRDGQKASKKVELPEEVVMHVLSRFKANDGRLADGRAALAVAGNDASRLTWACELPTSVHTVLVWHIATTICDTTTPRQQTGDRLVAKCTSEYCAYLVAFVPDMLPGHAYDTRRIFNAVVMEARDYLAGCDTMRDRCVKLLELQCNELTILGMGAKLGSELRYRVHDRSRRWKVLADFWAELVLFLAPSSNADIHAEKLAAGGEFMTHLWTLLIHAGILERPSSSSP

SEQ ID NO: 51602 - protein, 165 aa, Zea mays
  Coding DNA Sequence Number=SeqID_9823
  Gene Ontology: Mol. function=transcription factor activity; Cellular component=nucleus; Biological process=regulation of transcription, DNA-dependent
  Homolog annotation: Hit_ID=Q94ID6; Match level="QueryCoverage=34%, HitCoverage=30%, E-value=6e-24, Identity=89%"; Hit description =Ethylene-responsive transcription factor 12
  Pfam annotation: Domain name=AP2; Domain location=26-90; Score=131.7; E_value=2e-36; Accession=PF00847.10; Description=AP2 domain
MDPTPRAVLSHSSSGGAKGGGGGGSHAHYRGVRKRPWGRYASEIRDPWKKTRVWLGTFDTPLEAALAYDRAARTLRGAKARTNFPDDHAGQGQLQQQHLRRRQHPPPQHVSFGGVGVDCASPWHFVCFQTPTTAPATETPSTALELGTGRRCGGLPFDLNEAPSC

SEQ ID NO: 51603 - protein, 449 aa, Zea mays
  Coding DNA Sequence Number=SeqID_9824
  Homolog annotation: Hit_ID=Q2R581; Match level="QueryCoverage=38%, HitCoverage=75%, E-value=2e-86, Identity=83%"; Hit description =Expressed protein
MVGSGAAGGGADHARSKEAAGMMALHEALRNVCLSSDWTYSVFWTIRPRPRCRGGNGCKVGDDNGSLMLMWEDGFCRPRVAECLEDMDGEDPVRKAFIKMSIQLYNYGEGLMGKVASDKCHKWVFKEPSECEPNISNYWQSSFDATIAVIQAGHGLLQLGSCKIIPEDLHFVLRMRHMFESLGYQSGFFLSQLFSSSRGASPTPTPPFPLKQPPAAPAARAPPQLFSWPGHHQPQQLPSPAGASPLFPPGPGAFHPSSARPMPPFPGGKDEGHMFHLPPAAHHGTNKQPPQHMDEHHHHQQQPMVGAGGDAPDGDLRWPNGLSFFTALTGRADDAKLLFGGPGAGAGAADDDDKAAPDAHGGAENVEEYLSLESHSNKARKVESPAAQSTNKFKRSFTLPARMSSSSSTSAFPSVSASTAPPQQQQAGMEYRGPHEGGVYSDLMETFLE

SEQ ID NO: 51604 - protein, 52 aa, Zea mays
  Coding DNA Sequence Number=SeqID_9825
MRDSNRDPISDFPRGIPLLGLIRFYPNPYGLRGIEGVSIPMGTDSSRGFPWG

SEQ ID NO: 51605 - protein, 81 aa, Zea mays
  Coding DNA Sequence Number=SeqID_9826
MGSAAELGLSMRNSACTEIPTEKLATTKVSGGYNATPECPTGNPEPVVYMFDGGDLALSFSLGGALAKGWSLLSWETDGQR

SEQ ID NO: 51606 - protein, 73 aa, Zea mays
  Coding DNA Sequence Number=SeqID_9827
MEWDSDESSTDSSFDEDAANIAVNKGFLFSNVCYKYLMAKDSKKKVSSESGYGYTRAWSKQSLTEMEDDHDEG

SEQ ID NO: 51607 - protein, 125 aa, Zea mays
  Coding DNA Sequence Number=SeqID_9828
MAAPSANHGGNLTGAHQLGKLVTKSIVRPVQYIDHAVKKAGHGMMGSVAELGLPTRNSACAEIPTEKLATVKVSRGYGATPECPMGNPEPVVYVFDGGDLVLSFSPDDALAKGWSSLSWETDGPR

SEQ ID NO: 51608 - protein, 148 aa, Zea mays
  Coding DNA Sequence Number=SeqID_9829
MARKGATPPMGSTSAPPSPPSKDFGDSEYSEEVSSEYDRSPASASPMASSDDSDDSMGQSTAERVYIRSVERAGLGGSDDSEEVEESLDSKEGSDSDSDEGEDSLRGGDDSGDGKGNSDGDGGEGNNRGGDGKGGGGAGDAGGRVPPA

SEQ ID NO: 51609 - protein, 72 aa, Zea mays
  Coding DNA Sequence Number=SeqID_9830
MESHQMKEKQKKMKDPKDRQELEEEEDAKAWVVHGSREASHVIMKRLSLAPVHMLLNSTTVAHGKDLGDPLS

SEQ ID NO: 51610 - protein, 123 aa, Zea mays
  Coding DNA Sequence Number=SeqID_9831
MRSLEVGSSTSEVATGLARGDPCFSSCGIIASDLYIKRKVFDSDEGEFEVALGCGQWSDNIEPPPLKLLELAVDDCEVSASVFKPFSFIMIGWMTFRVSVGWCTNYVIKYVGGQDFTLRCCFG

SEQ ID NO: 51611 - protein, 113 aa, Zea mays
  Coding DNA Sequence Number=SeqID_9832
METHALLFCLGTEREKDLNMMDSDCRRTPTCDAAASIQGSSDTLTLPPPSSAIAARQPATAYQVHQPTLPTSAPGQDECPSGRGVTLHKIVTAIGGAISVAKAQRLWKAVVGP

SEQ ID NO: 51612 - protein, 106 aa, Zea mays
  Coding DNA Sequence Number=SeqID_9833
MARSQGTVFLVDLGEIPNWSSLVEDLRYGWPEIGKNTGGCDCGVHRCNGSRLILLRVTRLLPHSNKLRRGATEVTGGSTATLAVRPRRNGYKHGDKLQSAIKSIPP

SEQ ID NO: 51613 - protein, 204 aa, Zea mays
  Coding DNA Sequence Number=SeqID_9834
MQYNGSSSLISCEKQTIRIEFYPCKIRAHRLGVQCLIDPDCRRAVTALVPTITGMGDHVSGRADPLVQALVLDPGLPPEQLLALGGSGGHNDVQFDGGDGRNRSVYVRRRMSSSAEEAICALNRKMAQWLTRSTLAGSRRESDDRGLASPAKQPSIPRSGSFTEARAHTGDTGAARRGAGSGAGVLWRAQSASNTWRFSSARVP

SEQ ID NO: 51614 - protein, 141 aa, Zea mays
  Coding DNA Sequence Number=SeqID_9835
MALFSQRQLSLGAPDSVRWCTGQCPVRQASDCQLAALGKQLTAYGCKSPDCPVVHQTSIEPTVGWANGRPWNPCVTRGRANGQKGAPDSVRCANGSEPPTVGFAKEGKKSAPDSVRWCTGLSGAPGDRRQELPSWNALNGS

SEQ ID NO: 51615 - protein, 124 aa, Zea mays
  Coding DNA Sequence Number=SeqID_9836
  Subcellular localization annotation: CTP_CleavageSite=20; ConfidenceScore=5.20e-01
MGRHGQNSKPRQGDLAHKLNGSTRRGGCGSLPEMRGPNRLSTQTGRFTWSSRAGDLATGPIPPGEARPQKSQKGSQRTRNEELEHAIFTEVVAMEYDRVGDKLCAWERLDHGSDRRVRGCISVA

SEQ ID NO: 51616 - protein, 80 aa, Zea mays
  Coding DNA Sequence Number=SeqID_9837
  Subcellular localization annotation: CTP_CleavageSite=36; ConfidenceScore=5.04e-01
MGMAGSTKRSVMASPGGIGPVAGSPARELHVKRPVRVDSLFGPLISGHLSVIERLGLDLGVVESGPTTFNQTVLISLPIQ

SEQ ID NO: 51617 - protein, 136 aa, Zea mays
  Coding DNA Sequence Number=SeqID_9838
MHVLTTFFGFRPLEMVTHPIGSFLAEKEDDLMCKDRGYHAKDDAKVTIGDKEDLVKGLQTEQMGTQIHELEEQVEEWNHTIEVLENQLQTSQQHLEEVNKHLDMHHQEMHQDMEVDEDVDIDDEDSERLLAWTLLA

SEQ ID NO: 51618 - protein, 188 aa, Zea mays
  Coding DNA Sequence Number=SeqID_9839
  Subcellular localization annotation: CTP_CleavageSite=74; ConfidenceScore=5.38e-01
MSEPLRALLVLGRALLFPGRAPSRSLSSSVRKDHFSLARFAILNRRAAARRAAPHSPRRASRTTAPRCPPARTSCRAARTPLACLTPRHAPSPRRPSARPALAVPTSSPCPIAAPPLGTPGPSPCPPPRRAPSPRRPSPRPGPRCACLLAVPHRRELAAGFHEKQPQEDLRRHRQVTHENTTSDRRPM

SEQ ID NO: 51619 - protein, 72 aa, Zea mays
  Coding DNA Sequence Number=SeqID_9840
  Pfam annotation: Domain name=potato_inhibit; Domain location=6-55; Score=4.2; E_value=0.0074; Accession=PF00280.8; Description=Potato inhibitor I family
MAVPGKTSWPELIGSEIEQAVDTICTERPDVNVICELQDGQPASTEVCTTVSPVTGEDPPVTVYITYVVDDQ

SEQ ID NO: 51620 - protein, 101 aa, Zea mays
  Coding DNA Sequence Number=SeqID_9841
MVDERDSLRVGWVHNRRGSEGSTQFKGTECAFHEFGAKVFTAAFDRVLRGTSSVVIRGTHRVQQITTLVVEVCLKNHGSPGPDQLKVFDIVDHIELQMVPF

SEQ ID NO: 51621 - protein, 163 aa, Zea mays
  Coding DNA Sequence Number=SeqID_9842
  Pfam annotation: Domain name=potato_inhibit; Domain location=6-55; Score=4.2; E_value=0.0074; Accession=PF00280.8; Description=Potato inhibitor I family
MAVPGKTSWPELIGSEIEQAVDTICTERPDVNVICELQDGQPASTEVCTTVSPVTGEDPPVTVYITYVVDDQVLSGAIMSLEIGKQYLTDLWMRSNSPSYAARYQYCDTCTGYHQGDVVMGATRREATWLGEDGGGLKMSKASRRLRLSLVQVCKARLGGCNT

SEQ ID NO: 51622 - protein, 74 aa, Zea mays
  Coding DNA Sequence Number=SeqID_9843
MNALELVEPLDVGPVQLAYFGQRWDTQTYSWMDFGVEVSSRPHSRNGHDVGVIEWPLEEVDVAQETVIVIAFIF

SEQ ID NO: 51623 - protein, 169 aa, Zea mays
  Coding DNA Sequence Number=SeqID_9844
MEEVLQRLTAYSYETWCREKDDVGPEVVARALCTRLGVLEGDIKVSHRRPEDFLITFVHQHHHRGQAGSGFDSCAGFEGAWAQTPIDPAPTLRRDSRCLRASILGGVNRSPSPPTAPCLSILQSAAFPDPPTLCRSAPPTGMDATSLGSPVTASTSAGLRVGGVSNWAS

SEQ ID NO: 51624 - protein, 141 aa, Zea mays
  Coding DNA Sequence Number=SeqID_9845
  Homolog annotation: Hit_ID=Q8L4C2; Match level="QueryCoverage=47%, HitCoverage=36%, E-value=5e-20, Identity=74%"; Hit description =Putative SnRK1-interacting protein 1
MALGALARLLRLAPTPRLARPFAAKVRASRPQEPELPSEDDNDFAGGELTAPTEGIGKPLAEVLKELGKRVPDSLVKTRVENNGFAIKYIPCAIQLFLIIGKTYRERFKYPLLDAWPWNYNLYDWRKMLLLQHNFMGVVAN

SEQ ID NO: 51625 - protein, 112 aa, Zea mays
  Coding DNA Sequence Number=SeqID_9846
MARTKLPDGRRDIPFCTTRLAQRTRTHRDRPFQKIITGLGPTVGVRSVWTADPPADADQSKEPMPSASLDSSSEHARVTEEVATRHSPGSTQKAEAAAVAGRGWPIWPSRRR

SEQ ID NO: 51626 - protein, 62 aa, Zea mays
  Coding DNA Sequence Number=SeqID_9847
MVQTLISDSTVVEHASAELPIRVQSMVLHGYVPTSVVETGQMVPRLPKKRERVRVLPVCQER

SEQ ID NO: 51627 - protein, 169 aa, Zea mays
  Coding DNA Sequence Number=SeqID_9848
  Gene Ontology: Mol. function=nucleic acid binding; Cellular component= nucleus; Biological process=type I hypersensitivity
  Homolog annotation: Hit_ID=Q5N8W4; Match level="QueryCoverage=89%, HitCoverage=50%, E-value=4e-73, Identity=86%"; Hit description =Putative RRM-containing protein SEB-4
  Pfam annotation: Domain name=RRM_1; Domain location=12-82; Score =69.3; E_value=1.3e-17; Accession=PF00076.12; Description=RNA recognition motif. (a.k.a. RRM, RBD, or
MGQFGDTTYTKVFVGGLAWETQKETMRKYFEQFGEILEAVVITDKNTGRSKGYGFVTFRDSDAAMRACVDPAPVIDGRRANCNLASLGVQRSRPPTPQHGGARNFKVMKSFSQQAGIQGGLGAAFPSHATFPHYAIPQGLPYHIYGYPSLPPSLPIRAHIWSESGPRET

SEQ ID NO: 51628 - protein, 381 aa, Zea mays
  Coding DNA Sequence Number=SeqID_9849
  Gene Ontology: Mol. function=nucleic acid binding
  Homolog annotation: Hit_ID=Q5N8W6; Match level="QueryCoverage=18%, HitCoverage=36%, E-value=2e-20, Identity=71%"; Hit description =Galactosyltransferase-like protein
  Pfam annotation: Domain name=RRM_1; Domain location=11-65; Score =11.7; E_value=0.012; Accession=PF00076.12; Description=RNA recognition motif. (a.k.a. RRM, RBD, or
MISGPSGSCVGPSAGHVVDLHVPSDKESNSLKGYAFVEYETEEIAQYAVKLFSGLVRISGKTLKFMIAGYDKPSSNVNTSVMLNPLYQVDKYTAMARLEAVVLTVSSTDATATHARTRAPARLSVHDLAPIRAKNSPPSCVPMEVEADGIQEATAGAGDGGGVDDVFFCVAATSRGNKNSISYFHTNAVGEDAESALALAALCLDHAPDHHRWHHHTVAGAKTFAFLSADDGRTYFAAADPSPGAAEVVRFLERVRDACDAAPRKRLRDEAVAPVARQFARTLRAAAAGPSSGAELPEASLQAKEPSTPLAPVCEKDEEERQRAGERRRAFLQPEESASALPGWRPWWRHASVVIVVDVVLCLVLFAVWMGVCKGFGCLTR

SEQ ID NO: 51629 - protein, 101 aa, Zea mays
  Coding DNA Sequence Number=SeqID_9850
MAAHRCTLVTSKQAHRSGAAAGGTDGHAERQQYTTRHQRGKDFQLRTSISIQEAAVILSCLPAYHVAKEEEHHESIPMTSLPAPALKGEAAARCPLDHECM

SEQ ID NO: 51630 - protein, 273 aa, Zea mays
  Coding DNA Sequence Number=SeqID_9851
  Gene Ontology: Mol. function=RNA-directed DNA polymerase activity; Cellular component=mitochondrion; Biological process=RNA-dependent DNA replication
  Homolog annotation: Hit_ID=UPI00004C1731; Match level="QueryCoverage =99%, HitCoverage=21%, E-value=1e-103, Identity=64%"; Hit description= UPI00004C1731 related cluster
  Pfam annotation: Domain name=rve; Domain location=30-222; Score=83.5; E_value=6.7e-22; Accession=PF00665.16; Description=Integrase core domain
MEAYCDEVRRLEDKFYGLELNHIARRYNETADELAKIASGRTTVPSDVFSRDIHQPSVKTDASPEPEEASAQPEASSAAEEGARGFSHLLVTIDKFSKWIEVRPLTSIRSEQAVAFFTNIIHRFGVPNSIITNNDTQFTGKKFLDFCEDHHIRVDWAVVAHPMTNGQVERANGMLLQGLKPRIYNDLNKFGKRWMKELPSVVWSLRTTPSRATGFSPFFLVYGAEAILPTDLEYGSPRTKAYDNRRNQTSREDSLDQLEEARDVALLHLARYQ

SEQ ID NO: 51631 - protein, 143 aa, Zea mays
  Coding DNA Sequence Number=SeqID_9852
MAEARATLPRYPRTFSRPAGVILLRNPIRGRHRALGPYQTGSGPANHLQEEVFASPDRRARPQPQPRKVVSASPDPQGSASTSASEGGLRLARPQGSASTSASEGGLRLARPVGSASTSTSGGIASSPDPGLGLRRSLRLAQP

SEQ ID NO: 51632 - protein, 401 aa, Zea mays
  Coding DNA Sequence Number=SeqID_9853
MVELGVGWRQEGSLMGSVNRAYIFASVLTIDPTSACRVEVTVNSYFSVRDGRKEYNRGRPVSYVVDSETYSIIDLEKDIASEFKWASEQQANFWVLTGEGSLTCKLASDAQLLDLLRTSRVVKLFMVVGSREQNVREEEMAAAAVNIGDEEMPTAVNIGEEEMLTIVNMEEEAMPIAMDHNLEVHDRGFTWAEVPEYGETIGGPPILEEEEEEHFRTIGCDPDGDEPVGVDEEWRMEGRILASVLHELNMKSRGLQYGIMRTGAMSAEISGITKEERPAGRPRKKRIKASGEAGKRGPYQCKRCFQFGHIEKGCAATQAELEQELPQPRPKKSKRQRKYVSEGVEASAIDAKPSHADPNLTSSPGVKTRSMSSLSPTSPGPTTRRMASISPGGINRRLIIS

SEQ ID NO: 51633 - protein, 167 aa, Zea mays
  Coding DNA Sequence Number=SeqID_9854
  Homolog annotation: Hit_ID=Q9FG95; Match level="QueryCoverage=55%, HitCoverage=28%, E-value=1e-07, Identity=32%"; Hit description =Genomic DNA, chromosome 5, P1 clone:MQD19
  Subcellular localization annotation: CTP_CleavageSite=17; ConfidenceScore=5.04e-01
MLGFSTGQLLVVLGACSVMMKPSDMVKIARTAGRMTGRAVGRLIVARRQLDEILGQSAATQFYVKSEKTFQRLNVKKVHKELKDAMTQLDSIRYEVQNLSRLSPGQFMLKQHNAVLVQVLEGPGAMQVAGSKQSPHLRRRLVLVDSFPKPHSYGSLRLSATGSALLI

SEQ ID NO: 51634 - protein, 96 aa, Zea mays
  Coding DNA Sequence Number=SeqID_9855
MTVDSVEDALTALAHNPASQETVGLAAQRQRRRASGTDRRADTPVGRAERRVFTCDDITDWIKSFLKKDTPSDHFSGALRKCRLRKSFTDDRLQEL

SEQ ID NO: 51635 - protein, 79 aa, Zea mays
  Coding DNA Sequence Number=SeqID_9856
MASYARREQGLMAEGKREDERVPGREERAAISTNNGAEKRNGGVEGMEGAARSALRGVASGFWAPGRLARGGCRGTVGS

SEQ ID NO: 51636 - protein, 450 aa, Zea mays
  Coding DNA Sequence Number=SeqID_9857
  Gene Ontology: Mol. function=catalytic activity; Cellular component =endoplasmic reticulum; Biological process=metabolic process
  Homolog annotation: Hit_ID=Q69UX2; Match level="QueryCoverage=56%, HitCoverage=91%, E-value=1e-83, Identity=59%"; Hit description=Acid phosphatase-like
  Pfam annotation: Domain name=Sterol_desat; Domain location=7-223; Score=77.4; E_value=4.5e-20; Accession=PF01598.8; Description=Sterol desaturase
MEFISDEALAIFVPILVYWVYSGMYMALGQSMDRYRLHPRKEEDSKNLVSKREVIKGVLLQQLVQAGVAAVVFTVTGDSSRVSSSYDNKEAAHQASYYLLLTVARQFGVAMVVLDGWQYAWHRYMHLNRFLYRHIHSWHHRLVVPYAFGSQYNHPVEGLLLDTLGGALAFVVSGMSPRASIFFFSLCTVKGVDDHCGLWLPGNLFHLFFWNNTAYHDVHHQLRGSRFNFSQPFFVTWDKLFGTHMPYVLEERPGGTTTPGRFQETPPPFTFDDGLDVEEPISGEQHMERLAQKQASTQFSSWPRSDDQQAGKKRRMPSPPWPSCIADDDDEHPPPPTKKARTKPKSRSRRKRVAACCPCGPAPAPAPSKEVAQHDCDAHGLTRQPGDRAWMYSAEGHAPPRLAKRAVRSGDTREMVRLYARWRRSVSMPSRFYVQRAVEKGRTMPEYAPK

SEQ ID NO: 51637 - protein, 110 aa, Zea mays
  Coding DNA Sequence Number=SeqID_9858
  Subcellular localization annotation: CTP_CleavageSite=57; ConfidenceScore=5.17e-01
MRSLLPQTLVDAAPFSPAPAIPRPRLFSPDSATTVPRPFVPDIAPEEKSHLGRKNLCSSMKVDPKETKAKVVEAFDINDIANNVYEHNFNHHPYPVLSTLTPKSYTLSQS

SEQ ID NO: 51638 - protein, 83 aa, Zea mays
  Coding DNA Sequence Number=SeqID_9859
MTESSRWFFSLDPVICNEYITFRDKSRVTKVMTKQHDKLLHMDIVDPAQAKDEAFSYARYLILRLQNEFPKNAMRTICSDNDT

SEQ ID NO: 51639 - protein, 74 aa, Zea mays
  Coding DNA Sequence Number=SeqID_9860
MTMRFRGLTKRYTISASGSRINGDDFKQQRSFWIRLILNQGPRYTRPNRHAVSNPGRSGQIQRRGSSEAKVERV

SEQ ID NO: 51640 - protein, 679 aa, Zea mays
  Coding DNA Sequence Number=SeqID_9861
  Gene Ontology: Mol. function=nucleic acid binding; Cellular component= chromatin; Biological process=DNA integration
  Homolog annotation: Hit_ID=Q8W0X4; Match level="QueryCoverage=93%, HitCoverage=43%, E-value=0.0, Identity=94%"; Hit description =Putative pol protein
  Pfam annotation: Domain name=RVT_2; Domain location=258-513; Score =536.2; E_value=3.5e-158; Accession=PF07727.4; Description=Reverse transcriptase (RNA-dependent
MARTMLGEFKTPECFWSEAVNTACHAINRVYLHRLLKKTSYELLTGNKPNVSYFRVFGSKCYILVKKGRNSKFAPKAVEGFLLGYDSNTKAYRVFNKSSGLVEVSSDVVFDETNGSPREQVVDCDDVDEEDVPTAAIRTMAIGEVRPQEQDERDQPSSSTMVLPPTQEDEQVHQQEACDQGGAQDDHVMEEDAQPAPPTQVRAMIQRDHPVDQILGDISKGVTTRSRLVNFCEHYSFVSSIEPFRVEEALLDPDWVLAMQEELNNFKRNEVWTLVPRPKQNVVGTKWVFRNKQDEHGVVTRNKARLVAKGYAQVAGLDFEETFAPVARLESIRILLAYAAHHSFRLYQMDVKSAFLNGPIKEEVYVEQPPGFKDERYPDHVCKLCKALYGLKQAPRAWYECLRDFLLANAFKVGKADPTLFTKTCDGDLFVCQIYVDDIIFGSTNQKSCEEFSRVMKQKFEMSMMGELNYFLGFQVKQLKDGTFISQTKYTQDLLKRFGMKDAKPAKTPMGTDGHTDLNKGDSDYAGCKVDRKSTSGTCQFLGRSLVSWNSKKQTSVALSTAEAEYVAAGQCCAQLLWMRQTLQDFGYNLSKVPLLCDNESAIRMAENPVEHSRTKHIDIRHHFLRDHQQKGDIEVFHSRRRIEREKVDLDHERLPLHSDERAASAEEAALGNLLTAYG

SEQ ID NO: 51641 - protein, 475 aa, Zea mays
  Coding DNA Sequence Number=SeqID_9862
  Homolog annotation: Hit_ID=Q2HSJ5; Match level="QueryCoverage=18%, HitCoverage=18%, E-value=1e-10, Identity=39%"; Hit description=Zinc finger, CCHC-type; Zinc finger, SWIM-type
  Pfam annotation: Domain name=SWIM; Domain location=386-418; Score =16.3; E_value=0.0076; Accession=PF04434.8; Description=SWIM zinc finger
MAINLILLDEIITSAQKEKVDKMMRELQDYRMKPEEDIIQHLITVNQKMQKLPREFLNLIPVIKIEEEEDPEEFPNWIVEDEFEENSEFNIENFPEKDTGSEMEENERIGTKIVRRCGRKISKLFYKFPVSTDPIKFTEMELVDDEDVETMMALYCGNRSDQNVPIQLFAKLASVEPIEDLTALGEEHGTQELCLVASKSYVDSQSTIHRINIDLNVAPDIDVVGDNGYDSSDPCDHKVDSDSDPDVDEVPDEIDDEDVNDDGNINASSVRNQIRCIMIHNNLGTHMSLINPDAVHVAEFPEYPKILPAHQLAVDFDREELFVGQIFKNKEECIFSIQRYNMNISVDYKVGASKLTLYIECWKPTEGYNWPLWRPSIINPISPRSYGVDLRNRRCDCRRFQTLHYPHAHVVAACAIVLLNVEQFIDDVYTLQCTLRVWENEFPVLPNLSTREVPPTTFKLIPDKGLRRNLKGHPQ

SEQ ID NO: 51642 - protein, 124 aa, Zea mays
  Coding DNA Sequence Number=SeqID_9863
  Gene Ontology: Mol. function=transcription factor activity; Cellular component=nucleus; Biological process=regulation of transcription, DNA-dependent
  Homolog annotation: Hit_ID=Q7XAV5; Match level="QueryCoverage=76%, HitCoverage=60%, E-value=2e-25, Identity=67%"; Hit description =Dehydration responsive element binding protein
  Pfam annotation: Domain name=AP2; Domain location=17-59; Score=8.8; E_ value=5.7e-05; Accession=PF00847.10; Description=AP2 domain
  Subcellular localization annotation: CTP_CleavageSite=31; ConfidenceScore=5.27e-01
MTVIASVMSATAISAMRPKMRPRPQFKSLPIAAARAYDTAVFYLRGPSARLNFPDLILQEDDELKDISPASIRKKATEVGAKVDALHTTSLHHHHASNSSESSNPPQVFSKPDLNKYPETFDED

SEQ ID NO: 51643 - protein, 52 aa, Zea mays
  Coding DNA Sequence Number=SeqID_9864
MESMDSNSVWELMPSCKIAKLSKPKLLSNILNMVAQMRKILQEKSEALPPRE

SEQ ID NO: 51644 - protein, 125 aa, Zea mays
  Coding DNA Sequence Number=SeqID_9865
MESDGWKWLQQWLMDIKPWYPEFKVEERVQWSRVFEGHKQVVVVERERWIPGLEMMDDCVNGSMKNVLEKEFQHDAPHSINGDDKAVDWGNNSDGIMEGGLKNRQTVDLVSEGADEMGLIEKMSP

SEQ ID NO: 51645 - protein, 47 aa, Zea mays
  Coding DNA Sequence Number=SeqID_9866
MALRKPRGNLRTRCISSILICSDQAPEPLLGFIKNYALGIFMSSHLL

SEQ ID NO: 51646 - protein, 131 aa, Zea mays
  Coding DNA Sequence Number=SeqID_9867
MEKTNYELELKLKNERRRVCSLLYKIDCRKQQWFEMERKYNKTTATLQGLVDGLIVKINSKDSCLWDWELRYNETVRQLKGENAALRRVFAEGGTMKDILSFDVTRFASRALIDLRVVLSKIERKRLKTLS

SEQ ID NO: 51647 - protein, 104 aa, Zea mays
  Coding DNA Sequence Number=SeqID_9868
MERSLEYIRVSRHGYGGLHKKEKDLVLATLRLNGSIYLDIEYGSTLHASKALEVSKDSLDTSGTLGGEKAINKNCFMEEVASYRDLCTLENLAMRLEEGGLQSC

SEQ ID NO: 51648 - protein, 1173 aa, Zea mays
  Coding DNA Sequence Number=SeqID_9869
  Gene Ontology: Mol. function=nucleoside-triphosphatase activity; Biological process=defense response
  Homolog annotation: Hit_ID=Q1STU5; Match level="QueryCoverage=86%, HitCoverage=95%, E-value=5e-66, Identity=26%"; Hit description =Leucine-rich repeat
  Pfam annotation: Domain name=LRR_1; Domain location=1017-1041; Score =6.5; E_value=18; Accession=PF00560.23; Description=Leucine Rich Repeat
  Pfam annotation: Domain name=LRR_1; Domain location=1074-1099; Score =1.5; E_value=1.5e+02; Accession=PF00560.23; Description=Leucine Rich Repeat
  Pfam annotation: Domain name=LRR_1; Domain location=122-142; Score =0.2; E_value=2.6e+02; Accession=PF00560.23; Description=Leucine Rich Repeat
  Pfam annotation: Domain name=LRR_1; Domain location=144-165; Score =9.1; E_value=5.7; Accession=PF00560.23; Description=Leucine Rich Repeat
  Pfam annotation: Domain name=LRR_1; Domain location=167-187; Score =11.1; E_value=2.4; Accession=PF00560.23; Description=Leucine Rich Repeat
  Pfam annotation: Domain name=LRR_1; Domain location=272-299; Score =4.7; E_value=37; Accession=PF00560.23; Description=Leucine Rich Repeat
  Pfam annotation: Domain name=LRR_1; Domain location=407-430; Score =5.7; E_value=24; Accession=PF00560.23; Description=Leucine Rich Repeat
  Pfam annotation: Domain name=LRR_1; Domain location=549-571; Score =4.7; E_value=37; Accession=PF00560.23; Description=Leucine Rich Repeat
  Pfam annotation: Domain name=LRR_1; Domain location=678-699; Score =0.5; E_value=2.2e+02; Accession=PF00560.23; Description=Leucine Rich Repeat
  Pfam annotation: Domain name=LRR_1; Domain location=790-811; Score =10.0; E_value=3.9; Accession=PF00560.23; Description=Leucine Rich Repeat
  Pfam annotation: Domain name=LRR_1; Domain location=959-979; Score =1.1; E_value=1.7e+02; Accession=PF00560.23; Description=Leucine Rich Repeat
  Pfam annotation: Domain name=LRR_1; Domain location=99-120; Score =7.4; E_value=12; Accession=PF00560.23; Description=Leucine Rich Repeat
  Pfam annotation: Domain name=LRR_1; Domain location=991-1015; Score =0.5; E_value=2.3e+02; Accession=PF00560.23; Description=Leucine Rich Repeat
  Pfam module annotation: Pfam domain module=LRR_1::LRR_1::LRR_1::LRR _1::LRR_1::LRR_1::LRR_1::LRR_1::LRR_1::LRR_1::LRR_1::LRR_1::LRR_1 Domain
  Pfam module annotation: Domain location=549-571::678-699::790 -811::959-979::99-120::991-1015
MVSLRTCYHDKRFDIHDVVWDAAISIALKNYRMLVLRDHAPKEWSDKEKMKTWSVISLRCPQIIANLPKEMECSGLSFFHMAHDGAVKIPLNFFKQTEGLKALDLVGMQFPSLPESIIHLADLRMLCLKRCAVDNITILGELKNLEILDLAASGIKELPKEMAQLTQLRLLDLSWCRELKIIPPNVLSGGLPNLIFFNSGNHNIEFPLLKVLKIQRCPKLIEFINQNSNQSGMHALFSEKVAVPSLEDMNISNLSNVKMIFYNDLAPGSFKNLRKISIGECGSLKNVFPVSIAKDLPQLENLIIINCGVEEIVSKGDGVEEQPVRFEFPQVSYLEVSLVEKLKCFYEGQHTIVWPMLKILRTDGPAVQKIVASEHLRLIQGNERPVLLGEESLTSFCPWYYNFEFPCLEELVVEDCPRLKIFSEGVLSTPQLQRIKQSSYREKWSWTSDLNTTIQQLYTEKDGLYDFNISDTFPESIEIWTRNPQEIFGFKNLSSLQFYKCSSLKYIFTPSMLLSLNRLRRIEVEDCSSMEQVVREEEEAMTHKFTFLSLEFVTIESCSNLTNFHWGSQALEFPELSKIRIAECPKMTAFSSSVSRESGDASENVVGKGGIYDNTATFFSNKVVIPRLKSLDLSSINIHKIWHHSSSPYIGYLNFLRVKRCHNLKYLFPSFLAKDLVQLQLLRISDCNMMEQAIFTDGLVEEHQGRNQMFFSNLHSLWLKDLPKLTSLCFENYFEYHCLADLALRNCPLLKTFISKCVPGDEPQIGQHVQASNLEVHNSSLLNEKVVFPSLKKLQIQNCDSLEEIIELQGLIPDESQSTTAAQSIVAETVTTKFVFPKLIYLRLCKVPRLKSFYSRMHTTQWPSLKQMDIIECPKVQIFTRQCPVSQVGISNQQPLFCVNEDTFPVLEELTLKTNDFVKGICDEQLSLQCFQNLKLLNLHCFLKRSTTLPYCFIRSLPTLQKLIIKNASISEIVRSEGLSDEERHTSAFYQLKELSLTQLPELTLKTFKPSLLSFKNLTTLEVSRCHGFITLIACSTAKCLTLLERLSIDDCEMIEEIIACEAEEIQGGIVFPKLKYLQLSCLPCLATFSLAHHSLEFPVLLMVTVTKCPQMRNFCQGDLSTPRLEQMRLTRDEEGELQWEGDLNTTIKHMFDEMNVQNSEVTEVTDQLPKLE

SEQ ID NO: 51649 - protein, 134 aa, Zea mays
  Coding DNA Sequence Number=SeqID_9870
  Homolog annotation: Hit_ID=Q1SI90; Match level="QueryCoverage=95%, HitCoverage=6%, E-value=5e-08, Identity=29%"; Hit description =Disease resistance protein; AAA ATPase
VVFPSLEKLRIQNCDSLEQIIELQGVIADESQSTSAAQSIMAETETTKFVFPKLVNLGLDKVPRLKSFYSRMHATRWPSLKRMAIIECPKVQIFTPQCPECQVGISSQQPLFSVNENVQNSEVTEVTDRSPKLE

SEQ ID NO: 51650 - protein, 383 aa, Zea mays
  Coding DNA Sequence Number=SeqID_9871
  Gene Ontology: Mol. function=nucleoside-triphosphatase activity; Cellular component=membrane; Biological process=defense response
  Homolog annotation: Hit_ID=Q1STU9; Match level="QueryCoverage=95%, HitCoverage=31%, E-value=1e-57, Identity=36%"; Hit description=H+ -transporting two-sector ATPase, alpha/beta subunit, central region; Disease resistance protein
  Pfam annotation: Domain name=AAA; Domain location=179-362; Score= -28.6; E_value=0.031; Accession=PF00004.19; Description=ATPase family associated with various cellular activities (AAA)
  Pfam annotation: Domain name=NACHT; Domain location=178-327; Score= -33.1; E_value=0.022; Accession=PF05729.3; Description=NACHT domain
  Pfam annotation: Domain name=NB-ARC; Domain location=148-383; Score =62.1; E_value=1.9e-15; Accession=PF00931.13; Description=NB-ARC domain
  Pfam module annotation: Pfam domain module=AAA::NACHT::NB-ARC; Domain location=179-362::178-327::148-383
MDIVIATVGSIVSKAVEYTISPIKNHVKYLSNHQQYVETLKDRAERLKHARDRVQHSVDAAKRNGEEIEGDVGKWLSAVDKKIPEQVEKVMQDEEKAKKKCFIGLCPNFRTRYKLSLKAEEEAKAVAELLEHDKFERVSYRAAPQGIMVAPVKGYEEFESRTSILNGIMEALKDDSVSVVGVHGIGGIGKTTLVKEIARKVKDKLFDSVVIATVTQAIDIEKIQNQIADFLGLKFEEQSMVGKAFRLRERLKKEERILVVLDDIWEKVDIEEVGIPLGDEHKGCKLLLTSRELNVLSNEMDAQKNFPIGFLNEKEAWDLFKKMAGNCDESCDLKPIAMEVAKKCAGLPIAIATVARALRNKKLFEWKMLHENWRCLRQATSRG

SEQ ID NO: 51651 - protein, 595 aa, Zea mays
  Coding DNA Sequence Number=SeqID_9872
  Gene Ontology: Mol. function=metal ion transporter activity; Cellular component=integral to membrane; Biological process=metal ion transport
  Homolog annotation: Hit_ID=Q6PND8; Match level="QueryCoverage=52%, HitCoverage=97%, E-value=2e-84, Identity=50%"; Hit description=Iron regulated transporter
  Pfam annotation: Domain name=XH; Domain location=178-286; Score=57.2; E_value=5.4e-14; Accession=PF03469.5; Description=XH domain
  Pfam annotation: Domain name=Zip; Domain location=321-592; Score =214.9; E_value=1.8e-61; Accession=PF02535.12; Description=ZIP Zinc transporter
  Pfam module annotation: Pfam domain module=XH::Zip; Domain location =178-286::321-592
MENTNYDEELKNDCRLVCSLIYDINCRKERLSQMEREYNEMTATLRGLINGLIAKINSKDSNLWGWELQYNVTVRQLKGKNAALRLSFAEVYSKKKKKKKTNGNVKPFSSQPKENVPCRDLVELEKTTSDQIAALKEQLEETSEALKDMESRYSCLTVQEIPLRNQGLNDVLTSRTTLVVKRMGEIDQKAFEVASSGKFPNKDWQETCAKLCSLWQQNEIVDQDDEKLKELRNEYGDVVYEAVSTALMEMNEYNASGSRLSLTIQRNCKSFLAAMKSVLKSLANSIFLVLFIIFSSSIPLVLAQCEAETKTNGCHNYRESMKLKIIAIVAILLSSMIGVCLPLFSGQVPLLKPDRDLFTIVKAFSSGVILATGYMHVLPDSFNDLMSGCLPENPWRKFPFTTFVAMLSAVLTLMVDSFAMSVYKKRCGKALMADANNGGGLENTNIVPIDNFEHGHSHSLEMNDDVSSQLLRHRVIAQVLELGIVVHSVVIGLAMGASGNQCTIRSLIAALCFHQMFEGMGLGGCILQAEYEIKMKAIMVFFFSATTPLGIVLGIGLSNADFLGPKLQTNMKLQAWSYVAVLLGAGFMSLMAKWP

SEQ ID NO: 51652 - protein, 66 aa, Zea mays
  Coding DNA Sequence Number=SeqID_9873
MSSKLFLGPSLVGIPSLANGDGDEVPPNEEFLPRRFKHTKAGTNALNKRWGRLAWSGRGSILQGPG

SEQ ID NO: 51653 - protein, 956 aa, Zea mays
  Coding DNA Sequence Number=SeqID_9874
  Gene Ontology: Mol. function=protein binding; Biological process =defense response
  Homolog annotation: Hit_ID=Q1STU5; Match level="QueryCoverage=97%, HitCoverage=98%, E-value=2e-59, Identity=24%"; Hit description =Leucine-rich repeat
  Pfam annotation: Domain name=LRR_1; Domain location=143-167; Score =5.2; E_value=31; Accession=PF00560.23; Description=Leucine Rich Repeat
  Pfam annotation: Domain name=LRR_1; Domain location=169-190; Score =2.3; E_value=1.1e+02; Accession=PF00560.23; Description=Leucine Rich Repeat
  Pfam annotation: Domain name=LRR_1; Domain location=278-301; Score =3.0; E_value=80; Accession=PF00560.23; Description=Leucine Rich Repeat
  Pfam annotation: Domain name=LRR_1; Domain location=361-385; Score =0.8; E_value=2e+02; Accession=PF00560.23; Description=Leucine Rich Repeat
  Pfam annotation: Domain name=LRR_1; Domain location=418-440; Score =1.1; E_value=1.8e+02; Accession=PF00560.23; Description=Leucine Rich Repeat
  Pfam annotation: Domain name=LRR_1; Domain location=573-594; Score =8.0; E_value=9.2; Accession=PF00560.23; Description=Leucine Rich Repeat
  Pfam annotation: Domain name=LRR_1; Domain location=742-762; Score =3.5; E_value=62; Accession=PF00560.23; Description=Leucine Rich Repeat
  Pfam annotation: Domain name=LRR_1; Domain location=774-798; Score =2.2; E_value=1.1e+02; Accession=PF00560.23; Description=Leucine Rich Repeat
  Pfam annotation: Domain name=LRR_1; Domain location=800-824; Score =4.3; E_value=44; Accession=PF00560.23; Description=Leucine Rich Repeat
  Pfam annotation: Domain name=LRR_1; Domain location=857-882; Score =3.3; E_value=70; Accession=PF00560.23; Description=Leucine Rich Repeat
  Pfam module annotation: Pfam domain module=LRR_1::LRR_1::LRR_1::LRR _1::LRR_1::LRR_1::LRR_1::LRR_1::LRR_1::LRR_1; Domain location=143 -167::169-190::278-301::361-385::418-440::573-594::742-762::774
MSLGYEFEELDHQRMRSLVQLQCFVIEDCKCLRDIILTEEIEDERKDVICFPRLNSLHIDGLPNLIFFNSGNHNIEFPLLKVLKIERCPKLIEFISQNSNQSGMHALFSEKVVVPSLEDMTISNLSNVNMIFYNDLAPGSFKNLRTISVRGCGSLKILFPVSIAKDLPQLEHLSITDCGVEEIVWKGDGVEEQPVRFEFPQVSYLEVRWVEKLKCFYEGQHTIVWPMLKKLETDSSALLKIVAWEHLRLIQGNEEPVLLGEESLTSFCPRNYSFEFPCLEELVVEGCPWLKIFSVGVLSTPQLQRIKQSRYGEKWSWTSDLNTTIQQLYTEKDEDFNISDTFPESIEIWTRNPQEILGIKNLSSLQFYKCSNLKYIFTPSMLLGLNLLRRIKVRECSSMEQVVREEEEAVTHKFTFLSLLSVTIESCSSLTNFHLGSQALEFPQLRNIRIAECPKMTAFSSSVSRESADASENVVGKGGIYDNTATFFSNKSGVVNLLGKTTTIFFKKQSLADDEANAVKRCHNLKYLFPSFLAKDLVQLRYLRILDCNMMEQASNLEVHNSSLLNEKVVFPSLAKLQIQNCDSLEEIIELQGLIADESQSTSAAQSIVAETVTTKFVFPKLENLGLDKVPRLKSFYSRMHTTLWPSLKQMSIIECPKVQIFTRQCPVSQVGISNQQPLFCVNEDTFPVLEELTLKTNDMVKGICDGQLSLQCFQNLKHLNLRFFPETSTTLPYSFIRSLPKLQKLVINNASISEIVRSEGLSEEERHTLVFYQLKDLRLSQLPQLTLKTFEPSLLSFKNLTTLKVSRCHGFINLIACSTAKCLRLLERLSIDDCEMIEEIIACKAEEIQGGIVFPKLKYLQLSCLPRLASFSLADHSLEFPVLLMVKVTKCPKMRNFCQGDLSTPRLEQMHLTRDEEGELQWEGDLNTTIKHMFDEMNVQNSEVTEVTDQLPKLE

SEQ ID NO: 51654 - protein, 168 aa, Zea mays
  Coding DNA Sequence Number=SeqID_9875
  Homolog annotation: Hit_ID=Q84Q83; Match level="QueryCoverage=32%, HitCoverage=6%, E-value=1e-21, Identity=85%"; Hit description =Protein TOC75, chloroplast precursor
  Subcellular localization annotation: CTP_CleavageSite=48; ConfidenceScore=5.29e-01
MPQSFQFFASCCSALLCFEGLAVAAGNSRTGAGRRRRKMGDATTELVEAFLRAESWRFGGGVSLVAGAGRGLRAGSVRDLIAIKDVKGNPMDFFRRVGHGSSYGVGIKLGLVRGEYIVDHNAGTGTIFFRFGEILSMQHFAIVEGTFEALCLAMLVECHRTQSAMELR

SEQ ID NO: 51655 - protein, 85 aa, Zea mays
  Coding DNA Sequence Number=SeqID_9876
MVMLPMPSVWLLGAQAAPGGSMEREGGVWAIYSELCAPVLNRILLASGADGYEGSRELISEKNSTRKKLTSGTHPSVIQWVNGSA

SEQ ID NO: 51656 - protein, 113 aa, Zea mays
  Coding DNA Sequence Number=SeqID_9877
  Subcellular localization annotation: CTP_CleavageSite=28; ConfidenceScore=5.14e-01
MTQIIMGRSVFASLSRYNPSSQGVLLCRSSLDGPSATKQTPNKRLLGLVAHLIQLAAKFLKIDNLSESVQNESGAPSTIKAQRLSSGPPLQGMEAGSPRMMIVAKAGPPLPLV

SEQ ID NO: 51657 - protein, 235 aa, Zea mays
  Coding DNA Sequence Number=SeqID_9878
MDFFVQASLVSADPNPTTARPHGEVCNGGDDRRQQAHAQLLDVDESWRIEAVPTRWGRCLAWGFVVQGSWLGSPAVMVARSALCASAGRFRLWAPRAHTSQGRKFWKVHRNASKRPRDGLAPGPAGQWATRDLASQPRSHARGGGRSRASDRLGRVRKEWAEHCSGMGQGTQGTGARPQGCYRRGEGGCDRISYERAGTVLSSTPPVAKTATAPVEYDEVVDERPDALAHSTTAK

SEQ ID NO: 51658 - protein, 230 aa, Zea mays
  Coding DNA Sequence Number=SeqID_9879
  Gene Ontology: Cellular component=cytoskeleton
  Homolog annotation: Hit_ID=Q6I588; Match level="QueryCoverage=98%, HitCoverage=87%, E-value=5e-81, Identity=61%"; Hit description =Probable protein ABIL4
MAQELKNLRPQLYTASEYCEKSYLHSEQKQKVLDNLKDYALRAVVNAVDHLGTVAYKLTDLFEQQASEVSTYELKVARLNQQIFTCQVYTDKEGLRQQQMMGANIKHHKHYILPPKTLSWHLSSENSTKANAHKPTFALVDTAPSKPSSGKERSASPMRRPLQFNRSTSSDTTQKVGAKNISGVKELSTFHSFDNPKGRAIQKAPVGTKSMLAALFIRHKSSKAKRIAVR

SEQ ID NO: 51659 - protein, 104 aa, Zea mays
  Coding DNA Sequence Number=SeqID_9880
MAERYQLPRSCVPPTMRQKDGGYPPSGAWKGPGKGDTPKRILPREGTGLRAPLLIRGSKAGPPRGSTAASDRVGPTPTTGQRFEGRPPEGFHGRLRLLGLRAHY

SEQ ID NO: 51660 - protein, 519 aa, Zea mays
  Coding DNA Sequence Number=SeqID_9881
  Gene Ontology: Cellular component=integral to membrane; Biological process=response to tellurium ion
  Homolog annotation: Hit_ID=Q8L4G8; Match level="QueryCoverage=85%, HitCoverage=70%, E-value=1e-131, Identity=54%"; Hit description=C4 -dicarboxylate transporter-like protein
  Pfam annotation: Domain name=C4dic_mal_tran; Domain location=141-406; Score=271.3; E_value=2e-78; Accession=PF03595.8; Description=C4 -dicarboxylate transportermalic acid transport protein
MAAPDGDRLRSTVAEPPYSISIRSEEPPRQQQQGTLARSDSGSTGERDRRFDQFKTFGGRLERQLSSIRGGAQTHPHPAAADVGGGEARDSEADTDDDGELPTADRYFAALEGPELETLRPTEVPVLPEDEAWPFLLRFPISAFGMCMGVSSQAMMWKTLEQEPSTAFLRVSPGVNDALWWLSVALMVVVSATYVLKAVFYLEAVRREFHHPIRVNFFFAPWIACLFLAKGLPEPVTAVHHVVWYALMAPILFLDIKIYGQWMSGGEWRLSRVASPTSHLAVVGNFVGALLGARMGLREPALFFFAVGAVHYVVLFVTLYQRLPTNVPLPRELHPVFFLFVATPSVASVAWARISGEFGLGARVAYYVSLFLYASLVARVSFFFRGVRFSLAWWAYTFPVTSAAIATTVYASAVTNALTQALAVGLSAVASVTVAGVLATTVYHAFVRWDLFPNDVSIAIRRRPRAKFGKILARLRTSSADLKELVISRHGGSASETSSVVSEPPTPMVDGRGRSRAEP

SEQ ID NO: 51661 - protein, 102 aa, Zea mays
  Coding DNA Sequence Number=SeqID_9882
MTLNPCTVQNLLYDVSTEGGKRWDALEATDNEARETGTKSSSSLHGDTPTAEGTGFQPTLAATKRQGERRKAGTGSRRWIPRSATIPKAKAPHPFPWLQQQI

SEQ ID NO: 51662 - protein, 155 aa, Zea mays
  Coding DNA Sequence Number=SeqID_9883
MALGDDAVGDDVKDLGNNSTSKVSHSTDDLTVAVEELKATLDSQDKLLRLASHERKDFKNKYESTLRELESTKASIVVSDETKCDGCALYMSNITTLQTKYATMLDEHDELRSMSSLFGDGDLENTWLMDSSCSCHMVGSLNCFSSLKPMIGKEY

SEQ ID NO: 51663 - protein, 926 aa, Zea mays
  Coding DNA Sequence Number=SeqID_9884
  Gene Ontology: Mol. function=RNA-directed DNA polymerase activity; Cellular component=intracellular; Biological process=RNA-dependent DNA replication
  Homolog annotation: Hit_ID=UPI00005A975E; Match level="QueryCoverage =99%, HitCoverage=53%, E-value=0.0, Identity=88%"; Hit description =PREDICTED: similar to Retrovirus-related Pol polyprotein from transposon 297
  Pfam annotation: Domain name=RVT_1; Domain location=56-225; Score =149.1; E_value=1.2e-41; Accession=PF00078.17; Description=Reverse transcriptase (RNA-dependent
  Pfam annotation: Domain name=RnaseH; Domain location=455-582; Score =12.0; E_value=4.5e-06; Accession=PF00075.14; Description=RNase H
  Pfam annotation: Domain name=rve; Domain location=787-919; Score =84.3; E_value=3.8e-22; Accession=PF00665.16; Description=Integrase core domain
  Pfam module annotation: Pfam domain module=RVT_1::RnaseH::rve; Domain location=56-225::455-582::787-919
MSGIPRDVAEHSLDIRAGARPVRQPLRRFDEEKRRVIGEEIHKLMAAGFIKEVFHPEWLANPVLVRKKGGKWRMCVDYTGLNKACPKVPYPLPHIDQIVDSTAGCETLSFLDAYSGYHQIRMKESDQLATSFITPFGMYCYVTMPFGLRNAGATYQRCMNHVFGEHIGRTVEAYVDDIVVKIRKASDLLSNLEVTFRCLKVKGVKLNPEKCVFGVPRGMLLGFIVSERGIDANPEKIAAITSMGPIKDLKGVQRVMGCLAALSRFISRLGERGLPLYRLLRKTECFAWTPKAEEALGNLKALLTKAPILVPLADGKALLVYVAATTQVVSAAIVVERQEEGHAFPVQRPVYFVSEVLSETKIRYPQVQKLLYAVILTRRKLRHYFESHPVTVVSSFPLGEIIQCREASGRIAKWAVEIMGETISFAPRKAIKSQVLADFVAEWVDTQLPTAPIQPELWTMFFDGSLMKAGAGAGLLFISPLGKHLRYVLRLHFPASNNVAEYEALVNGLRIAIELGVRRLDARGDSQLVIDQVMKNSHCRDPKMEAYCDEVRRLEDKFYGLELNHIARRYNETADELAKIASGRTTVPPDVFSRDLHQPSVKIDDTPEPEAPSAQPEAPSAQPEAPSARPEAPSVRPEVPSAPEGEALHVEEEQSGSTPDRNWQTLYLQYLRRGELPLDQAEARRVARRAKSFVLLGDEEELYHRSPSGILQRCISIAEGQELLQEIHSGACGHHAAPRALVGNAFRQGFYWPTAVADATRIVRTCEGCQFYAKQTHLPAQALQTIPITWPFAVWGLDLVGPLQKAPGGYTHLLVAIDKFSKWIEVRPLNSIGSEQAVAFFTNIIHRFGVPNSIITDNGTQFTGRKFLDFCEDHHIRVDWAAVAHPMSNGQVERANGMILQGLKPRIYNDLNKFGKRWMKELPSVV

SEQ ID NO: 51664 - protein, 657 aa, Zea mays
  Coding DNA Sequence Number=SeqID_9885
  Homolog annotation: Hit_ID=Q67UP1; Match level="QueryCoverage=92%, HitCoverage=90%, E-value=5e-78, Identity=34%"; Hit description =Hydroxyproline-rich glycoprotein-like
MKSSLRKLRGFALQRQEQRVDRDRGRGHATAAATAADELLAAAQDMADMRSCYDNLLSVAAAIANSAYEFSEALQEMGTCLLKRVTPNKDGINARLFNEDENKVLLLLGKSQFELRKLLDSYRVHVLNTITTPSLSLLNELQTVEEMKHQCDEKKELYEFMVNTQKEKGRSKNAKGDNGASEQLKQAQEDYQEEATLFLFRLKSLKQGQFRSLFTQAARHHAAQVHIWSLRNYLLSFMATYLETNLVKHNYHVNQLNLFRKGVKSLEAVEPHVRLAAEQQHIDHQFSALEEEDYLVEDENDDDYNGSHDGELSFDYGENKEVEESGNASRNHTEGFFNRSKEEYSSVPHERQRIVSQSAPLFPEKKLNTEERIKDLRRSATRKLNTYVLPTPNDVGATSQRASGNPTSEPLESKGAFHSSPLHSSADIRDLGDSNLPSPTRLSNVQSVLKDSNTNKTETRKVLPVGDLALPSYHDLKTSDNKKVKRGSFSGPIASRPRSTENIDVISAAPRHSSAHQPVHMRVSPGNSPPPISSPKIKELHELPRPPVNTSKNIAFPSLVAHSAPLAPNPASLTPKVQDHFRTKQTLQRTASPLPTPPPGSIARSFSIPSRGISDSKETEDQHKGAARMSLSSLPSAQTFLEDRQPLSSAAGSVSKT

SEQ ID NO: 51665 - protein, 218 aa, Zea mays
  Coding DNA Sequence Number=SeqID_9886
MADGPSTRCAATREPEVEDAGTNWWRRGHQWPVLVGNEDKPPPLLSAQCRHTAVATCHVCASPGSMRPCSSSSSGRVVVVVEWTVDWHAVGSPASMAIPRCRMAPVCARVLSAGAGACIPSAAAARLSYDGERTVAGMAWLYGRDGRPDGTPIGHRSLQPAGARRLTQSPGTRHLALTGGRTEWESGGRRRIGPPTAGLWTAIEASPHRLAFRLSLTA

SEQ ID NO: 51666 - protein, 177 aa, Zea mays
  Coding DNA Sequence Number=SeqID_9887
MVDQNCGVIHKTLYNQVICDSHIILYPATNQTGDKSKCKARRDRANQIPVTKLSIPDQGTSRGVRGAHLVLADERLAVPEGKGGRNEDEEEEREALARARVDHAAWRSARDPNATRGLHNPDRGKGEGQQRRKLLDEEVVVGGEAKRRRRGPLRDRLQVERKGNWAMLFGPKKHNYK

SEQ ID NO: 51667 - protein, 44 aa, Zea mays
  Coding DNA Sequence Number=SeqID_9888
MGYGAIVRDSDCFVLGRSKSFKETAIDVEWAELISFEENVKVFL

SEQ ID NO: 51668 - protein, 42 aa, Zea mays
  Coding DNA Sequence Number=SeqID_9889
MDKSSLTSISSIGTILEGSVRYRLNMETWNTSWVRYSLQDIR

SEQ ID NO: 51669 - protein, 223 aa, Zea mays
  Coding DNA Sequence Number=SeqID_9890
  Gene Ontology: Mol. function=transporter activity; Cellular component= integral to membrane; Biological process=transport
  Homolog annotation: Hit_ID=Q6D2Y6; Match level="QueryCoverage=99%, HitCoverage=44%, E-value=2e-74, Identity=67%"; Hit description =Putative sulfate transporter
  Pfam annotation: Domain name=Sulfate_transp; Domain location=1-201; Score=11.6; E_value=1.8e-09; Accession=PF00916.10; Description =Sulfate transporter family
MARLMRFVPQAVMTGFVNALGILIFFAQVPHFWSREPLILALFVLTVLIVLWWPRWVKSVPAPLVAIVVLTLFTVLTGQTLPTVGDEGPMQGGLPGFTEWRVPFNLATLGIIWPCALSIAFVGLLESLLTARLVDDLTHTPSSKSRESAGLGIANILAGFYGGIAGCAMIGQDHRQCGNGQRTQPRIHHRGGAGALIAGDGTERGNGGNSDGGPGGHYDHCRL

SEQ ID NO: 51670 - protein, 1785 aa, Zea mays
  Coding DNA Sequence Number=SeqID_9891
  Homolog annotation: Hit_ID=P33941; Match level="QueryCoverage=26%, HitCoverage=87%, E-value=0.0, Identity=72%"; Hit description=ABC transporter ATP-binding protein yojI
  Pfam annotation: Domain name=ABC_membrane; Domain location=846-1110; Score=-29.7; E_value=0.021; Accession=PF00664.13; Description=ABC transporter transmembrane region
  Pfam annotation: Domain name=ABC_tran; Domain location=1180-1365; Score=93.7; E_value=5.7e-25; Accession=PF00005.17; Description=ABC transporter
  Pfam annotation: Domain name=Ada_Zn_binding; Domain location=351-416; Score=149.7; E_value=7.7e-42; Accession=PF02805.6; Description=Metal binding domain of Ada
  Pfam annotation: Domain name=ApbE; Domain location=10-328; Score =488.7; E_value=6.7e-144; Accession=PF02424.6; Description=ApbE family
  Pfam annotation: Domain name=CBS; Domain location=1474-1591; Score =61.2; E_value=3.5e-15; Accession=PF00571.18; Description=CBS domain
  Pfam annotation: Domain name=DNA_binding_1; Domain location=609-700; Score=123.5; E_value=6.1e-34; Accession=PF01035.11; Description=6-O -methylguanine DNA methyltransfera
  Pfam annotation: Domain name=HTH_AraC; Domain location=430-474; Score= 55.5; E_value=1.7e-13; Accession=PF00165.13; Description=Bacterial regulatory helix-turn-helix proteins, araC family
  Pfam annotation: Domain name=HTH_AraC; Domain location=477-523; Score= 23.2; E_value=0.00091; Accession=PF00165.13; Description=Bacterial regulatory helix-turn-helix proteins, araC family
  Pfam annotation: Domain name=Methyltransf_1N; Domain location=529 -607; Score=47.5; E_value=4.6e-11; Accession=PF02870.6; Description=6- O-methylguanine DNA methyltransferase, ribonuclease-like domain
  Pfam annotation: Domain name=MgtE; Domain location=1655-1780; Score =59.2; E_value=1.3e-14; Accession=PF01769.7; Description=Divalent cation transporter
  Pfam annotation: Domain name=MgtE_N; Domain location=1347-1472; Score= 107.3; E_value=4.5e-29; Accession=PF03448.7; Description=MgtE intracellular domain
  Pfam annotation: Domain name=NACHT; Domain location=1181-1311; Score=- 41.5; E_value=0.099; Accession=PF05729.3; Description=NACHT domain
  Pfam module annotation: Pfam domain module=ABC_membrane::ABC _tran::Ada_Zn_binding::ApbE::CBS::DNA_binding_1::HTH_AraC::HTH _AraC::Methyltransf_1N::MgtE::MgtE_N::NACHT; Domain location=846 -1110::1180-1365::351-416::10-328:...
  Pfam module annotation: Domain location=:1474-1591::609-700::430 -474::477-523::529-607::1655-1780::1347-1472::1181-1311
MATTFLRAGLLLALALLNGCDNPASQVEPPTVLEGKTMGTFWRVSAIALSPEKAKSLTQKIQAQLDADDQALSTWKPDSALMRFNHSASLAPWPVSADMADIVTAALRVGAHTQGAMDITVGPLVNLWGFGPDKQPNKVPDQAQIDAAKARTGLQHLKVINEAQQQYLQKDLPDLFVDLSTVGEGYAADHLARLMEREGISRYLVSVGGALVSRGMNGQGQPWRVAIQKPTDQENAVQAVVDINGHGISTSGSYRNYYELDGKRISHVIDPQTGRPIEHNLVSVTVIAPTALEADAWDTGLMVLGTAKAQDIVRKEGLAVYMIMREVKLCLKEEPEMKTSTTLYQQPLTDEQCWQAVCARDASHDGQFVFAVRTTGIFCRPSCRSRRPLRENVGFYPDADTAQAAGFRPCKRCQPERADPQQQRIAKVEKACRLLEQEGSVTLETLADAVAMSPWHFHRLFKSVTGMTPKAWQLAFRAQRLRNALNESATITDAVLAAGFPDNSSYYRQADAALGMTARQYRRGGDDTDVCYALSHCSLGHCLVAQSERGICAILLADNEDALLEELRSIFPGARREQADERFVEQVEEVVRRIDNPASPFTLPLDLRGTAFQLQVWNALRAIPVGETVSYQSLANTLGKPGAVRAVARACAANKLAIVVPCHRVVRSDGGLSEPWQEPLAPGAVVLRRFALANAQALLAGIEAVTQVSPLRHMVTPGGYTMSVAMTNCGEVGWTTDARGYLYSGIDPQTGNPWPAIPDAFATLCHDAAVAADYADFRPDACLINRYVPGAKLSLHQDKDEPDLRAPIVSVSLGLPAVFQFGGLKRNDPIQRLMLEHGDVVYRWPFIAVIALTLLSAALGIGLIAFINLRLIETVDMSLAVLPEFLGLLLLLMAVTLGSQLALTTLGHHFVYRLRGEFIKRILDTPVERIEKLGSATLLAGLTSDVRSITIAFVRLPELVQGIILTIGSSAYLAWLSGKMLVITALWMALTIWGGFILVSRVYKHMATLRETEDKLYNDFQTVLEGRKELTLNRERAGHVYNNLYLPDAREYRHHIIRADTFHLSAVNWSNIMMLGAIGLVFWMANSLGWADTNVAATYSLTLLFLRTPLLSAIGALPTLLSAQVAFNKLKQFSLAPYQPDFPRPQLYPNWETLELRDVTFTYQDKTFSVGPINLTLRRGELVFLIGGNGSGKSTLAMLLTGLYEPVSGEILLDGKPLAKEKPEDYRKLFSAVFTDVWLFDQLLGAEGQQADPALVDHWLQKLKMAHKLELKDGKILDLKLSKGQKKRVALLLALAEERDILLLDEWAADQDPHFRREFYQERARLIWLLTTEKSLTATLLGELTLAEQFDADKLSSDMAEVNALVAHLPAPDLADTLEGLPIDGRLALWRLVEDDKRGKVLLEASENVWEDLIDGMSDKALLDALQTLDIDDQIWLVQHLPRNLTGRLLATLPATDRARVRQVMRYGKDCVAAIMEFEVITVRPNLTLATVQRYLRRLGKMPENTDKLFVTGRDGILLGELALQTILLKGSACRVGEVMNDDPVTFSPDEQAQDAAHTFERDDLISAAVTDTDGKLIGRLTIDDIVDVVYEETDNDLRQMGGLSAEEDVFAPVTRAVKNRWAWLAINLCTAFIASRVIDGFEHTISQLVALAALMPIVAGIGGNTGNQTITMIVRALALQTIQPGNFRFLVLREMGVALVNGLVWGGIMGAVTWLLYDDAALGGVMTLAMVLNLLMAALMGVLIPMTMVRFGRDPAVGSSVMITAITDTGGFFIFLGLATIFLL

SEQ ID NO: 51671 - protein, 1716 aa, Zea mays
  Coding DNA Sequence Number=SeqID_9892
  Gene Ontology: Mol. function=transferase activity, transferring phosphorus-containing groups; Cellular component=membrane; Biological process=two-component signal transduction system (phosphorelay)
  Homolog annotation: Hit_ID=P0AES4; Match level="QueryCoverage=48%, HitCoverage=96%, E-value=0.0, Identity=86%"; Hit description=DNA gyrase subunit A
  Pfam annotation: Domain name=DNA_gyraseA_C; Domain location=512-561; Score=54.1; E_value=4.7e-13; Accession=PF03989.3; Description=DNA gyrase C-terminal domain, beta-propeller
  Pfam annotation: Domain name=DNA_gyraseA_C; Domain location=562-614; Score=61.6; E_value=2.6e-15; Accession=PF03989.3; Description=DNA gyrase C-terminal domain, beta-propeller
  Pfam annotation: Domain name=DNA_gyraseA_C; Domain location=618-665; Score=44.3; E_value=4.1e-10; Accession=PF03989.3; Description=DNA gyrase C-terminal domain, beta-propeller
  Pfam annotation: Domain name=DNA_gyraseA_C; Domain location=666-715; Score=65.3; E_value=1.9e-16; Accession=PF03989.3; Description=DNA gyrase C-terminal domain, beta-propeller
  Pfam annotation: Domain name=DNA_gyraseA_C; Domain location=716-766; Score=59.6; E_value=1e-14; Accession=PF03989.3; Description=DNA gyrase C-terminal domain, beta-propeller
  Pfam annotation: Domain name=DNA_gyraseA_C; Domain location=767-816; Score=62.9; E_value=1e-15; Accession=PF03989.3; Description=DNA gyrase C-terminal domain, beta-propeller
  Pfam annotation: Domain name=DNA_topoisoIV; Domain location=7-489; Score=1129.8; E_value=0; Accession=PF00521.10; Description=DNA gyrasetopoisomerase IV, subunit A
  Pfam annotation: Domain name=HATPase_c; Domain location=1424-1534; Score=151.8; E_value=1.8e-42; Accession=PF02518.16; Description =Histidine kinase-, DNA gyrase B-, and HSP90-like ATPase
  Pfam annotation: Domain name=HisKA; Domain location=1312-1377; Score =82.6; E_value=1.2e-21; Accession=PF00512.15; Description=His Kinase A (phosphoacceptor) domain
  Pfam annotation: Domain name=Response_reg; Domain location=1626-1716; Score=41.7; E_value=2.5e-09; Accession=PF00072.14; Description =Response regulator receiver domain
  Pfam module annotation: Pfam domain module=DNA_gyraseA_C::DNA_gyraseA_ C::DNA_gyraseA_C::DNA_gyraseA_C::DNA_gyraseA_C::DNA_gyraseA_C::DN _topoisoIV::HATPase_c::HisKA::Response_reg; Domain location=512
  Pfam module annotation: Domain location=618-665::666-715::716 -766::767-816::7-489::1424-1534::1312-1377::1626-1716
MSVIVGRALPDVRDGLKPVHRRVLYAMNVLGNDWNKAYKKSARVVGDVIGKYHPHGDSAVYDTIVRMAQPFSLRYMLVDGQGNFGSIDGDSAAAMRYTEIRLAKIAHELMADLEKETVDYVDNYDGTEKIPDVMPTKIPNLLVNGSSGIAVGMATNIPPHNLTEVINGCLAYIDNEDISVEGLMEHIPGPDFPTAAIINGRRGIEEAYRTGRGKIYIRARAEVEADAKTGRETIIVHEIPYQVNKARLIEKIAELVKDKRVEGISALRDESDKDGMRIVIEIKRDAVGEVVLNNLYSQTQLQVSFGINMVALHHGQPKIMNLKDILSAFVRHRREVVTRRTIFELRKARDRAHILEALAVALANIDPIIELIRRAPTPAEAKAGLIAQPWDLGNVSAMLERAGDNAARPEWLEPEFGIRDGKYYLTEQQAQAILDLRLQKLTGLEHEKLLDEYKELLEQIAELLHILGSADRLMEVIREELELVREQFGDERRTEITANTADINIEDLINEEDVVVTLSHQGYVKYQPLTDYEAQRRGGKGKSAARIKEEDFIDRLLVANTHDTILCFSSRGRLYWMKVYQLPEASRGARGRPIVNLLPLEPNERITAILPVREYEEGVSVFMATASGTVKKTALTEFSRPRSAGIIAVNLNEGDELIGVDLTSGQDEVMLFSAAGKVVRFKEDAVRAMGRTATGVRGIKLAGEDKVVSLIIPRGEGAILTVTQNGYGKRTAETEYPTKSRGTQGVISIKVTERNGSVVGAVQVTDTDQIMMITDAGTLVRTRVSEISVVGRNTQGVILIRTAEDENVVGLQRVAEPVDDEELDSIDGSVAEGDDEIAPEVDDGAADDDADDTLKVSRYLFRALALVLWLLIALFSVFYIVNALRDKESEIRQEFNLSADQAQRYIQRTSDVMKELKYIAENRLTAENGILASRGLDAKTDVPDFQPLFPDSDCSKMGTAWRGSLESLAWFMRYWRDNFSAAYDLNRVFLIGSENLCVADFGLRDVPVERDETLKSLHERILKYRNAPQDERGNNLYWMSQGARPGVGYFYALTPVYLGNRLQALLGTEQSIRMENFFTPGSLPMGVTIFDESGRALISLTGAENRIEADPRWLQVRSWFGYTSGFHDLILKKSLPPSPLSIVYSVPVDLVLERIRMLILNAVLLNILVGVALFTLARMYERRIFIPAETDAQRLEEHEQFNRKIVASAPVGICILRTQDGTNILSNELAHNYLNMLTHEDRQRLTQIICGQQVNFVDVLTSNNTNLQISFVHSRYRNENVAICVLVDVSARVKMEESLQEMAQAAEQASQSKSMFLATVSHELRTPLYGIIGNLDLLQTKDLPKGVDRLVTAMNNSSSLLLKIISDILDFSKIESEQLKIEPREFSPREVMSHITANYAPLVVRKQLGLYCFIEPDVPATLNGDPMRLQQVISNLLSNAIKFTDIGCIILHVRRDEHYLSIRVRDTGVGIPGKEVVRLFDPFFQVGTGVQRNFQGTGLGLAICEKLISMMDGDISVDTEPGMGSQFTIRIPLPSTMMVAPLGANDTFITDDELPASWSGRAAVMFCRRHIGIPLERTPNEWLVSVASPHDLIAILGRIHRVEVVVPEVTTALPPPGAAEARNDDMMILVVDDHPINRRLLADQLGSLGYQCKTANDGVDALNVLSKNPIDIVLSDVNMPNMDGYRLTQRIREFGVDLAGYRRDGKCAGRRETALS

SEQ ID NO: 51672 - protein, 673 aa, Zea mays
  Coding DNA Sequence Number=SeqID_9893
  Gene Ontology: Mol. function=protein histidine kinase activity; Cellular component=integral to membrane; Biological process=two -component signal transduction system (phosphorelay)
  Homolog annotation: Hit_ID=Q9X6X6; Match level="QueryCoverage=71%, HitCoverage=53%, E-value=0.0, Identity=76%"; Hit description =Putative regulator YojN
  Pfam annotation: Domain name=GerE; Domain location=605-662; Score =80.6; E_value=4.9e-21; Accession=PF00196.10; Description=Bacterial regulatory proteins, luxR family
  Pfam annotation: Domain name=HisKA; Domain location=402-459; Score =5.6; E_value=0.048; Accession=PF00512.15; Description=His Kinase A (phosphoacceptor) domain
  Pfam annotation: Domain name=Response_reg; Domain location=464-578; Score=-9.8; E_value=0.02; Accession=PF00072.14; Description=Response regulator receiver domain
  Pfam annotation: Domain name=Sigma70_r4; Domain location=604-652; Score=5.4; E_value=0.065; Accession=PF04545.6; Description=Sigma-70, region 4
  Pfam annotation: Domain name=Sigma70_r4_2; Domain location=592-650; Score=11.9; E_value=0.041; Accession=PF08281.2; Description=Sigma-70, region 4
  Pfam module annotation: Pfam domain module=GerE::HisKA::Response _reg::Sigma70_r4::Sigma70_r4_2; Domain location=605-662::402-459::464- 578::604-652::592-650
MHKRIDTWRYATWQIYDNIAAATSGSSSDGLQETRLKQDVYYLEKPRRKTEALIFGSHDSSTLEMTQRISTYLDTLWGAETVPWSMYYLNGQDNSMILISTLPLKDLSSGFKESTIGSIVDSRRAEMLQQANALDERESFSALRRLSWQNGHYFTLRTTFNQPGHLATVVAFDLPINDLIPPDMSLDSFRLDTDNAQNNLRSTDKESTDSVTINFNSSKIEIASSLNSTGLRLVWQVPFGTLLLETLQNILLPLLLNIGLLALALFGYTTFRHQPGRQSDGLAPAGNSNELRVMRAFNEEIVSLLPLGLLVHDQEANRTVLSNKIADHLLPHLNLQNITSMADQHQGVIQATINNELYEIRQFRSQVASRTQIFIIRDQDREVLVNKKLKQAQRLYEKNQQGRAAFMQNIAEALKQPVKALAGEAAALSDKEGNQLADHAEALARLVDEIQLANMLENDTWKGQSTLFSIQDLIDEVVPQAEDRLTFRILDTGNGVSNSEIDNLHFPFLNTTQGDQYGDKYGDGITLIKYIKRHFPNLSIIVLTMNNNPAILSAVLDLDIEGIVLKQGAPTDLPKALAALQKGKKFTPESVSRLLEKISAGGYGDKRLSPKESEVLRLFAEGFLVTEIAKKLNRSIKTISSQKKSAMMKLGVDNDIALLNYLSSVTLTQTEKE

SEQ ID NO: 51673 - protein, 1628 aa, Zea mays
  Coding DNA Sequence Number=SeqID_9894
  Homolog annotation: Hit_ID=P76503; Match level="QueryCoverage=24%, HitCoverage=91%, E-value=0.0, Identity=81%"; Hit description=3 -ketoacyl-CoA thiolase
  Pfam annotation: Domain name=3HCDH; Domain location=1017-1107; Score =12.1; E_value=6.7e-05; Accession=PF00725.12; Description=3 -hydroxyacyl-CoA dehydrogenase, C-terminal domain
  Pfam annotation: Domain name=3HCDH; Domain location=891-985; Score =135.8; E_value=1.2e-37; Accession=PF00725.12; Description=3 -hydroxyacyl-CoA dehydrogenase, C-terminal domain
  Pfam annotation: Domain name=3HCDH_N; Domain location=707-889; Score =293.9; E_value=3e-85; Accession=PF02737.8; Description=3-hydroxyacyl- CoA dehydrogenase, NAD binding domain
  Pfam annotation: Domain name=DUF406; Domain location=1-79; Score =101.8; E_value=2.1e-27; Accession=PF04175.3; Description=Protein of unknown function (DUF406)
  Pfam annotation: Domain name=ECH; Domain location=486-659; Score =223.3; E_value=5.5e-64; Accession=PF00378.10; Description=Enoyl-CoA hydrataseisomerase family
  Pfam annotation: Domain name=MTS; Domain location=1437-1627; Score =9.3; E_value=1.3e-09; Accession=PF05175.4; Description =Methyltransferase small domain
  Pfam annotation: Domain name=Methyltransf_12; Domain location=1455 -1576; Score=15.8; E_value=0.018; Accession=PF08242.2; Description =Methyltransferase domain
  Pfam annotation: Domain name=PGAM; Domain location=1126-1235; Score =19.8; E_value=7e-05; Accession=PF00300.12; Description =Phosphoglycerate mutase family
  Pfam annotation: Domain name=Thiolase_C; Domain location=364-496; Score=90.0; E_value=7.3e-24; Accession=PF02803.8; Description =Thiolase, C-terminal domain
  Pfam annotation: Domain name=Thiolase_N; Domain location=81-357; Score=216.5; E_value=5.9e-62; Accession=PF00108.13; Description =Thiolase, N-terminal domain
  Pfam annotation: Domain name=UPF0020; Domain location=1427-1588; Score=-57.4; E_value=0.025; Accession=PF01170.9; Description =Putative RNA methylase family UPF0020
  Pfam module annotation: Pfam domain module=3HCDH::3HCDH::3HCDH _N::DUF406::ECH::MTS::Methyltransf_12::PGAM::Thiolase_C::Thiolase _N::UPF0020; Domain location=1017-1107::891-985::707-889::1-79::486
  Pfam module annotation: Domain location=1455-1576::1126-1235::364 -496::81-357::1427-1588
ADETPVCCCMDVGTIMDNSDCTASYSRVFTNRTDAEETLAALTARARGVESDPCQITSTFTEVDGGGSVMSQALPLVTRQGDRIAIVSGLRTPFARQATVFHGVPAIDLGKMVVGELLARSEIPPEIIEQLVFGQVVQMPEAPNIAREIVLGTGMSVHTDAYSVSRACATSFQAVANVAESLMAGTIRAGIAGGADSSSVLPIGVSKKLARVLVDANKARSTGQKLKLFSRLRLRDLLPVPPAVAEYSTGLRMGDTAEQMAKTYGITRQEQDALAHRSHQFAAQAWAEGKLADEVMTAYAPPFRDPITQDNNVRQNSSLADYAKLRPAFDRRHGTVTAANSTPLTDGAAAVILMTESRAKELGLQPLGYLRSYAFTAIDVQQDMLLGPAWATPLALDRAGLTMADLTLLDMHEAFASQTLTNLKLMASERFARDVLGRSQATGEVDDSKFNVLGGSIAYGHPFAATGRIMDMTSAFTLVVRPDNVAVVSIDVPGEKMNTLKAEFGSQVRAILKQIRENKQIRGVVFISAKPDNFIAGADINMIDRCKTAKEAEDLARQGQQIMAEIHALSIPVIAAIHGPCLGGGLELALACHRRICTDDVKTVLGLPEVQLGLLPGSGGTQRLPRLVGVSTALDMILTGKQLRARQALKAGLVDDVVPVSILLDAATELAAQGRPASRSLPALRHIFFASTEVKKDPGSPVAAGPLRSVGVLGGGLMGGGIAYVTAVKGNLPVRIKDINPKGINHALKYSWEQLDKKVRRRHLKSAERDAQMARISGTTDYSGFSHRDVVIEAVFEDLTLKQQMVAEIEAQCAPQTIFASNTSSLPIGDIAARAARPGNIIGLHFFSPVEMMPLVEVIPHAGTDEQTISTVVKLAKKQGKTPIVVADKAGFYVNRILAPYMSEAMRLLSEGERIENIDKALVKFGFPVGPIQLLDEVGIDTGTKIIPVLEAAYGDRFSAPASVVSAILNDDRKGRKNERGFYLYGKKGRKSNKQPDPAIYPLVGASGTGKLSAEQIAERCVMMMLNEAARCFAEKVIRSPRDGDIGAVFGIGFPPFLGGPFRYMDTLGAGDIVATLQRLASLYGERFAPCQLLLQMAEQGEKFWDKQETDFAQCPAIDISCRNGTVHAGSVNASASDSVRPLTPCGCDESRQMATWLKGQKVDVERVLVSPFLRAEQTLNEVGECMNLPDNVDVLPELTPCGDVGLVSAYLQALANEGTSSVLVISHLPLVGYLVSELCPGETPPMFTTSAIASVTLDESGKLRRLPLFNFNQHQYCRIATVLFGGLAATRSDNADLSPSSWQTSRRISCERVLEDKMDKIFVDEAVSELHTIQDMLRWSVSRFSAANIWYGHGTDNPWDEAVQLVLPTLYLPLDIPEEMRNARLTSSERHRIVERVIRRVNERIPVAYLTNKAWFCGHEFYVDERVLVPRSPIGELINNHFAGLIDAQPQHILDMCTGSGCIAIACAYAFPEAEVDAVDISPDALAVTEHNIEDHGLIHHVTPIRSDLFRDLPKVQYDLIVTNPPYVDEEDMSDLPSEYRHEPELGLASGSDGLKLTRRILACAPDYLTDNGVLICEVGNSMVHLMEQYPDVPFTWLEFDNGGDGVFMLTKAQLLAAQEHFSIYKD

SEQ ID NO: 51674 - protein, 873 aa, Zea mays
  Coding DNA Sequence Number=SeqID_9895
  Homolog annotation: Hit_ID=P0A9Q5; Match level="QueryCoverage=31%, HitCoverage=89%, E-value=1e-134, Identity=91%"; Hit description =Acetyl-coenzyme A carboxylase carboxyl transferase subunit beta
  Pfam annotation: Domain name=PseudoU_synth_1; Domain location=306 -404; Score=140.5; E_value=4.4e-39; Accession=PF01416.10; Description= tRNA pseudouridine synthase
  Pfam annotation: Domain name=PseudoU_synth_1; Domain location=443 -545; Score=113.3; E_value=7.2e-31; Accession=PF01416.10; Description= tRNA pseudouridine synthase
  Pfam annotation: Domain name=Semialdhyde_dh; Domain location=6-121; Score=135.2; E_value=1.7e-37; Accession=PF01118.15; Description =Semialdehyde dehydrogenase, NAD binding domain
  Pfam annotation: Domain name=Semialdhyde_dhC; Domain location=141 -303; Score=127.6; E_value=3.5e-35; Accession=PF02774.9; Description =Semialdehyde dehydrogenase, dimerisation domain
  Pfam module annotation: Pfam domain module=PseudoU_synth_1::PseudoU _synth_1::Semialdhyde_dh::Semialdhyde_dhC; Domain location=306 -404::443-545::6-121::141-303
MSEGWNIAVLGATGAVGEALLETLAEREFPVGDLYALARNESAGETLRFGGKTVRVQDVAEFDWTQVQLAFFVAGAQATAENIEEATNAGCLVIDTSGLFALEPDVPLVVPEVNPFVLADYRNRNLIAVPDSLTSQLLIALKPLIDEGGLSRIGVTSLLSVSAQGKPAVDALAGQSAKLLNGIPIDEDDFFGRQLAFNMLPILPDREGAVLEERRLVDQVRKILQDDGLMISANCVRAPVFYGHAQMVSFEALRPLAAEEARDAFARGEDIVLSEENEFPTQVGDASGVPVLMSDVVEQPLLKIALGIEYDGSKYYGWQRQQEVRSVQEKLEKALSQVANEPVTVFCAGRTDAGVHATGQVVHFETRAVRKDAAWTLGVNANLPGDIAVRWVKDVPDDFHARFSATARRYRYVIYNHRLRPAVLNQGVTHYHLPLDAERMQRAAQCLLGENDFTSFRAVQCQSRTPWRNMMHINVHRYGAYVVVDIKANAFVHHMVRNIVGSLMEVGANNQPESWIAELLAAKDRTLAAATARAEGLYLVSVDYPDRFNLPRPPMAFNVIGALLWVLLFTYAGYFFGTLPMVQENLKLLIVAIIVVSILPGVLYRAELERNLEVCPKCDHHMRMTARNRLHTLLDEGSLVELGSELEPKDVLKFRDSKKYKDRLATAQKETGEKDALVVMKGTLHGMPVVAAAFEFAFMGGSMGSVVGARFVRAVEQALEDNCPLICFSASGGARMQEALMSLMQMAKTSAALAKMQERGLPYISVLTDPTMGGVSASFAMLGDLNIAEPKALIGFAGPRVIEQTVREKLPPGFQRSEFLIEKGAIDMIVRRPEMRLKLASILAKLTNQPAPSPDAPRESVVVPPVPDQEAEA

SEQ ID NO: 51675 - protein, 205 aa, Zea mays
  Coding DNA Sequence Number=SeqID_9896
  Gene Ontology: Cellular component=flagellum; Biological process=cell division
  Homolog annotation: Hit_ID=Q5PCV9; Match level="QueryCoverage=89%, HitCoverage=55%, E-value=9e-78, Identity=80%"; Hit description=Div protein
MQPIQGTPARPPGQDPTPPTLAAGEQPLSTIQRTVLERLIIRLVALTQQQSAEVWAGVKHDLGLKNDAPLLSRHFPAAEQNLNQRLDTATQNHTTRQVISQLTELLGQGNNRQAVSDFIRQQFGQTALSQLTPEQLKTVLTLLQNNQISVPQPLQRPATDRPLLPAEHNSLNQAVTKLAAATGESGASDIKHPDFPDTAKRANRA

SEQ ID NO: 51676 - protein, 715 aa, Zea mays
  Coding DNA Sequence Number=SeqID_9897
  Homolog annotation: Hit_ID=P0A953; Match level="QueryCoverage=44%, HitCoverage=79%, E-value=1e-160, Identity=89%"; Hit description=3 -oxoacyl-[acyl-carrier-protein] synthase 1
  Pfam annotation: Domain name=Glyco_hydro_1; Domain location=571-715; Score=-291.2; E_value=0.00044; Accession=PF00232.9; Description =Glycosyl hydrolase family 1
  Pfam annotation: Domain name=Ketoacyl-synt_C; Domain location=175 -283; Score=154.3; E_value=3.1e-43; Accession=PF02801.12; Description= Beta-ketoacyl synthase, C-terminal do
  Pfam annotation: Domain name=MFS_1; Domain location=341-550; Score= -16.7; E_value=0.0018; Accession=PF07690.6; Description=Major Facilitator Superfamily
  Pfam annotation: Domain name=ketoacyl-synt; Domain location=1-167; Score=38.2; E_value=7.8e-10; Accession=PF00109.16; Description=Beta -ketoacyl synthase, N-terminal domain
  Pfam module annotation: Pfam domain module=Glyco_hydro_1::Ketoacyl -synt_C::MFS_1::ketoacyl-synt; Domain location=571-715::175-283::341 -550::1-167
MQEAIADAGLSAEVYQNNPRVGLIAGSGGSSKAQVFGADAMRSPRGLKAVGPYVVTKAMGSAVSACLATPFKIHGVNYSISSACATSAHCIGNAVEQIQLGKQDIVFAGGGEELGWEMACEFDAMGALSTKYNETPEKASRTYDAHRDGFIIAGGGGMVVVEELEHALARGAHIYAEIVGYGATSDGADMVAPSGEGAVRCMKMAMHGVDTPIDYLNSHGTSTPVGDVKELGAIREVFGDNSPAISATKAMTGHSLGAAGVQEAIYSLLMLEHGFIAPSINIDEMDEQAAGLNIVTKPTDATLNTVMSNSFGFGGTNATLVMQTQTLSSSSGTGTNALLRLVIAVFLTYMTIGLPLPVIPLFVHNELGYGNTMVGIAVGIQFLATVLTRGYAGRLADQFGAKRSALQGMLACGLAGVAWLLAAWLPVSALAKFGLLIVGRLILGFGESQLLTGTLAWGMGLSFWFAALAAITMVLPLLEWAFNGGAPNAWVAMAGAALTGCGCSLIFPALGVEVVKRVAPQVRGTALGGYAAFQDIANGISGPLTGLLATSLGYPSVFLAAAIAARKERRMPGFKADFLWGGAVAAHQLEGGWQEGGKGVSVADVMTAGAHGVPREITDGVLPGKNYPNHDAIDFYHRYKDDIKLFAEMGFKCFRTSIAWTRIFPKGDELEPNEAGLQFYDDLFDECLKYNIEPVITLSHFEMPYYLVTEYGGWA

SEQ ID NO: 51677 - protein, 576 aa, Zea mays
  Coding DNA Sequence Number=SeqID_9898
  Gene Ontology: Mol. function=transferase activity, transferring nitrogenous groups; Cellular component=membrane; Biological process =biosynthetic process
  Homolog annotation: Hit_ID=Q8GLH6; Match level="QueryCoverage=70%, HitCoverage=93%, E-value=0.0, Identity=89%"; Hit description =Putative aminotransferase
  Pfam annotation: Domain name=Aminotran_1_2; Domain location=44-406; Score=127.9; E_value=2.8e-35; Accession=PF00155.11; Description =Aminotransferase class I and II
  Pfam annotation: Domain name=Beta_elim_lyase; Domain location=72-302; Score=-125.8; E_value=0.031; Accession=PF01212.11; Description=Beta -eliminating lyase
  Pfam annotation: Domain name=HD; Domain location=410-519; Score=52.9; E_value=1.1e-12; Accession=PF01966.12; Description=HD domain
  Pfam module annotation: Pfam domain module=Aminotran_1_2::Beta_elim _lyase::HD; Domain location=44-406::72-302::410-519
KWHSQLKGQRFMSSIEKSSKLDNVCYDIRGPVLKEAKRLEEEGNKVLKLNIGNPAPFGFEAPDEILVDVIRNLPTAQGYCDSKGLYSARKAIMQHYQARGMRDVTVEDIYIGNGVSELIVQSMQALLNSGDEMLVPAPDYPLWTAAVSLSSGKAVHYLCDESSDWFPDLDDIRAKITPRTRGIVIINPNNPTGAVYSKELLMEIVEIARQHNLIIFADEIYDKILYDDAEHHSIAAMAPDVFTITFNGLSKTYRVAGFRQGWMVLSGPQKHAKGYIEGLEMLASMRLCANVPAQHAIQTALGGYQSISEFIVPGGRLYEQRNRAWELINEIPGVSCVKPKGALYMFPKIDAKRFNIHDDQKMVLDFLLQEKVLLVQGTAFNWPWPDHVRIVTLPRMDDLEMSITRFGRFLSDKVAMVAHALAAIKNRKFGGQVNAERIALLAMYHDASEVLTGDLPTPVKYFNSQIAQEYKAIEKIAQQKLVEMVPEELRDIFSELIDEHYYSADEKLIVKQADALCAYLKCLEELSAGNNEFMLAKSRLEKTLDARRSPEMDYFMQVFVPSFHLSLDEISQDSPL

SEQ ID NO: 51678 - protein, 1216 aa, Zea mays
  Coding DNA Sequence Number=SeqID_9899
  Homolog annotation: Hit_ID=P0AG16; Match level="QueryCoverage=41%, HitCoverage=100%, E-value=0.0, Identity=95%"; Hit description =Amidophosphoribosyltransferase
  Pfam annotation: Domain name=Colicin_V; Domain location=252-398; Score=92.7; E_value=1.1e-24; Accession=PF02674.6; Description =Colicin V production protein
  Pfam annotation: Domain name=Flavoprotein; Domain location=821-904; Score=-38.9; E_value=0.028; Accession=PF02441.9; Description =Flavoprotein
  Pfam annotation: Domain name=GATase_2; Domain location=363-572; Score= 220.9; E_value=2.8e-63; Accession=PF00310.11; Description=Glutamine amidotransferases class-II
  Pfam annotation: Domain name=Pribosyltran; Domain location=625-772; Score=50.7; E_value=5e-12; Accession=PF00156.17; Description =Phosphoribosyl transferase domain
  Pfam annotation: Domain name=SBP_bac_3; Domain location=984-1211; Score=318.1; E_value=1.6e-92; Accession=PF00497.10; Description =Bacterial extracellular solute-binding proteins, family 3
  Pfam annotation: Domain name=SPOR; Domain location=169-245; Score =51.1; E_value=3.8e-12; Accession=PF05036.4; Description=Sporulation related repeat
  Pfam annotation: Domain name=TM_helix; Domain location=298-347; Score= 5.7; E_value=0.083; Accession=PF05552.2; Description=Conserved TM helix
  Pfam module annotation: Pfam domain module=Colicin_V::Flavoprotein::GA Tase_2::Pribosyltran::SBP_bac_3::SPOR::TM_helix; Domain location=252
VQFPYRGPHSQWKPMKAGENPVASKFQNRLMGTIVLVALGVIILPGLLDGQKKHYQDEFAAIPLVPKPGDRDEPDMMPAATQALPAQPPEGAAEEVQAGEAAAPSLDASRRAVSGATTPDVTTQPVAPKQVEQPKPIEKPKPQPQKPAEQVAATPPADQPPAADKSAPVGKAWVVQLGALKNADKVNEIVGKLRGAGYRVYTAPTTPVQGKITRILVGPDASKDKLKGSLEELKQLSGLSGVGVNRGTYMVWIDYAIIAVIGFSCLVSLIRGFVREALSLVTWGCAFFVASHYYTYLSVWFTGFEDELVRNGISIAILFIATLIVGAIVNYVIGQLVEKTGLSGTDRSVIALRCGLTRKRRMCGIVGIAGVMPVNQSIYDALTVLQHRGQDAAGIITIDANNCFRLRKANGLVNDVFEARHMQRLQGNMGIGHVRYPTAGSSSASEAQPFYVNSPYGITLAHNGNLTNAHELRKKLFEEKRRHINTTSDSEILLNIFASELDNFRHYPLEADNIFAAVAATNRQIRGAYACVAMIIGHGMVAFRDPNGIRPLVLGKRDIGDGRTEYMVASESVALDTLGFEFLRDIAPGEAVYITEKGQLFTRQCADNPVSNPCLFEYVYFARPDSFIDKISVYSARVNMGTKLGEKIAREWEDLDIDVVIPIPETSCDIALEIAHILGKPYRQGFVKNRYVGRTFIMPGQQLRRKSVRRKLNANRAEFRDKNVLLVDDSIVRGTTSEQIIEMAREAGAKKVYLASAAPEIRFPNVYGIDMPTANELIAHGREVDEIRQIIGADGLIFQDLTDLIDAVRAENPDIQQFECSVFNGIYVTKDVDQGYLDYLDSLRNDDAKAVQMQNDLESLEMHNEGGQRRDLRRALVAAIQSGLLTRAADVVLKERRPLVLCVRETPLHLGHLRLMTQAAELGAVIMPPVPAFYHAPKTLDDIINQTVNRVLDQFDIALPEDLFIRWQGGNASRYVYAALPQTVRIGTDATYAPFSSKDAKGNFVGFDIDLGNEMCTRIKVKCTWVGSDFDALIPSLKAKKIDAIISSLSITEKRQQEIAFSDKLYAADSRLIAKKGSPIVPTLDSLKGKHVGVLQGSTQEGYANDNWRTKGIDVVAYQNQDLIYSDLAAGRLDAAFQDEVAASEGFLKQPAGKDFAFAGPSVKDKKYFGDGTGIGLRKDDTELKAAFDKAFAEIRKDGTYDKLAKKYFDFNVYGE

SEQ ID NO: 51679 - protein, 1087 aa, Zea mays
  Coding DNA Sequence Number=SeqID_9900
  Gene Ontology: Mol. function=citrate transporter activity; Cellular component=integral to membrane; Biological process=potassium ion transport
  Homolog annotation: Hit_ID=P0AFU2; Match level="QueryCoverage=51%, HitCoverage=91%, E-value=0.0, Identity=83%"; Hit description =Hypothetical protein yfbS
  Pfam annotation: Domain name=CitMHS; Domain location=505-1048; Score =198.0; E_value=2.3e-56; Accession=PF03600.6; Description=Citrate transporter
  Pfam annotation: Domain name=DUF412; Domain location=9-151; Score =353.8; E_value=2.8e-103; Accession=PF04217.4; Description=Protein of unknown function, DUF412
  Pfam annotation: Domain name=DctM; Domain location=463-1068; Score= -201.6; E_value=0.0023; Accession=PF06808.2; Description=DctM-like transporters
  Pfam annotation: Domain name=Hydrolase; Domain location=297-478; Score=122.1; E_value=1.6e-33; Accession=PF00702.16; Description =haloacid dehalogenase-like hydrolase
  Pfam annotation: Domain name=Na_sulph_symp; Domain location=456-1084; Score=-306.0; E_value=0.014; Accession=PF00939.9; Description =Sodium:sulfate symporter transmembrane region
  Pfam annotation: Domain name=TrkA_C; Domain location=720-796; Score =50.2; E_value=7e-12; Accession=PF02080.11; Description=TrkA-C domain
  Pfam annotation: Domain name=TrkA_C; Domain location=816-887; Score =37.5; E_value=4.5e-08; Accession=PF02080.11; Description=TrkA-C domain
  Pfam annotation: Domain name=YfbU; Domain location=155-315; Score =319.3; E_value=6.8e-93; Accession=PF03887.5; Description=YfbU domain
  Pfam module annotation: Pfam domain module=CitMHS::DUF412::DctM::Hydro lase::Na_sulph_symp::TrkA_C::TrkA_C::YfbU; Domain location=505 -1048::9-151::463-1068::297-478::456-1084::720-796::816-887::155-
MSTSENRPVNFFGLFRRGQHYAKTWPMEKSLAPLFIENRTIRATRYAIRFMPPVAVFTLCWQIALGGQLGPAVATALFALSLPMQGLWWLGKRSVTPLPPSILHWFYEVRGKLQEAGQALAPVEGKPDYQALADTLKRAFKQLDKTFLDDLSRKMEMTNAQRLILSNQYKMMTMMDPANAERYRRLQTIIERGYGLQMRELDREFGELKEETCRTVIDIMEMYHALHVSWANLKDAQSIDERRVTFLGFDAATEARYLGYVRFMVNIEGRYTHFDAGTHGFNAQTPMWEKYQRMLNCKGFLFDLDGTLVNSLPVVERSWCRWADRFGIDHDEVLNFIHGKQAITSLRHFMAGHSEEDIAAEFTWLEEIEATDTEGVVALPGALELLNHLTESHIPWGIVTSGSIPVAHARHRAAGLPMPDVFVTAEQVKRGKPEPDPYLLGAKLLGLPPQECVVVEDAGAGVLSGLAANCHVIAVNVPADSPRLDEADFVLARLDEVVVTKQPDAVVLFATGKVRMDAVALLVIVAFILSGTLTMTEALSGFSDPNVVLIAALFIIGDGLVRTGVATSMGSWLVKMAGSSEIKMLVLLMLTVAGLGAFMSSTGVVAIFIPVVLSVSMRMQISPSRLMMPLSFAGLISGMMTLVATPPNLVVNSELLREGLAGFSFFSVTPLGLVILLMGIVYMLLMRFMLKSDKDDSQRDGWKRRTFRDLIKEYRLTGRARRLAIRPGSPLIGQRLDDLKLRERYGANVIGVERWRRFRRVIVNVNGVSEFRARDVLLIDMSAADVDLREFCAEQLLEPMILRGEYFSDQALDVGMAEVSPIPETELLGKTVREIGFRTRYGLNVVGLKRDGEAMPGVVVDEPLQLGDILLVVGNWKLISQLGQKGREFLVLNMPVEESAVSPAHNQAPHAIFCLVLMVALMLTDEIPNPVAAITACLLMGKFRCIDAESAYKAIHWPSLILIVGMMPFALALQKTGGVDLVVKALLDFGGSYGPYMMLVCLFVLCATIGLFISNTATAVLMAPIALATAKSMGVSPYPFAMVVAMAASAAFMTPVSSPVNTLVLGPGYPGGSASAGVNFFRRRVTP

SEQ ID NO: 51680 - protein, 1367 aa, Zea mays
  Coding DNA Sequence Number=SeqID_9901
  Homolog annotation: Hit_ID=O86711; Match level="QueryCoverage=23%, HitCoverage=97%, E-value=1e-100, Identity=53%"; Hit description =Putative ATP/GTP binding protein
  Pfam annotation: Domain name=AAA; Domain location=569-756; Score= -12.7; E_value=0.0019; Accession=PF00004.19; Description=ATPase family associated with various cellular activities (AAA)
  Pfam annotation: Domain name=AAA_3; Domain location=569-697; Score =8.6; E_value=3.7e-05; Accession=PF07726.2; Description=ATPase family associated with various
  Pfam annotation: Domain name=AAA_5; Domain location=569-703; Score =27.2; E_value=1.5e-05; Accession=PF07728.4; Description=ATPase family associated with various cel
  Pfam annotation: Domain name=GST_N; Domain location=19-84; Score =24.8; E_value=0.0003; Accession=PF02798.10; Description=Glutathione S-transferase, N-terminal domain
  Pfam annotation: Domain name=Metallophos; Domain location=216-345; Score=70.9; E_value=4.1e-18; Accession=PF00149.18; Description =Calcineurin-like phosphoesterase
  Pfam annotation: Domain name=NUDIX; Domain location=418-547; Score =83.3; E_value=7.5e-22; Accession=PF00293.18; Description=NUDIX domain
  Pfam module annotation: Pfam domain module=AAA::AAA_3::AAA_5::GST _N::Metallophos::NUDIX; Domain location=569-756::569-697::569-703::19- 84::216-345::418-547
MTHPVMLAFADIHPNKPPGKLRFFKKKPLQEKALPFTLKTIDLEHGEQQKTGWTGYHLTRRVPVLEIDGFELSESSAIDEYLEERFAPPEYERIYPHDLQKRARARQVQAWIRSDLMPIREERSTDVIFAGAKKAPLSAAGQQSAAKLFALAGELLTHGKPNLFGEWCIADADLALMINRLVMNGDEVPERLVDYATFQWQRSSIQRYVALSAKLMKLMFASDIHGSLPATERVLALFAESGVQWLVILGDVLNHGPRNALPQGYAPAQVAELLNEHASRIIAVRGNCDSEVDQMLLNFPITAPWQQVLLPDQRLFLTHGHLFGPDNLPPLAQGDVLVYGHTHLPVAQRQGDIFHFNPGSVSIPKGGFDASYGMLEEGVLRVMALNDKRLIAQVAINPEDNEVIAQASREQMRAQCLRHRATYIVVHDGMGKILVQRRTETKDFMPGMLDATAGGVVQADEVLLDSARREAEEELGIAGVPFAEHGTFYFEDEHCRVWGGLFSCVSHGPFALQEEEVSEVWWMTPEEITARCDEFTQDSLKALALWMSPIQLTPDQTFEFLLNVAITRPVFLWGAPGIGKSALVRRFADEVGMECVSLLGSQLAPEDLLGIPQIDGQCSRFYPPANIVRDKPFVLFLDELNASSHEIQKAFYSLILEQRIGEYRLPEGTVVIGAGNRAKDAAIVKPMPSALINRMVHVHLRADHRQWLHWAINESSIHPWVVDWHMLSDALKSFGESISDEMLEALIYGLLSPAHAASFKGFIKQIRQKHTVSSILKGDANWPDDPADRDILYFLAQSFRTHLYKELPETDKALRNEHKQLAMRAKDCLKTLARISVEIAQSVMSEDENGKKLPAWFLLEVARDLPRLAVSAKNWLAISNDGYLWLNAKRHARPEQWARMVAQALAALGKRVFLNRLPAGRPSIAASNVILSTLKNHRAIIPSTGQELLADGLSNSVSQALEQVGGYQPQQGQKYKLTLAQKARQQIMTLYPLLGALAAGFDIEEDAKLCSQYDIAVAAIDVGIGKIWINPTARLNQAEMLFVFAHELLHAGLNHASRRRGRDAELWNVACDFIINDWLIEMQVGAPPELGLLYDAQFKGMSAEEIYDSLAMDMRRSRKLITLRGRAGGDILGEDGDPRFTNAEAYCRRALYQGMERCLYGQSRGALPAGLIEEIRSLAQPPVPWDVALAEWFDEHFPPPERRRTYARPSRRQSATPDIPRPAIQAPSEEERHSRVFGVVLDTSGSMDPLLLGKALGAIASYSLAREVFAVRFICCDAKAYDRGWVQPEQLLHHFTLQGRGGTVLQPGIELLDSLALRGDFPRGGPLLIITDGFCENNVSVKMEHAWLLPQNRRLPFVPRGKVFSLS

SEQ ID NO: 51681 - protein, 345 aa, Zea mays
  Coding DNA Sequence Number=SeqID_9902
  Gene Ontology: Mol. function=sugar porter activity; Cellular component=integral to membrane; Biological process=transport
  Homolog annotation: Hit_ID=UPI00005F8F74; Match level="QueryCoverage =95%, HitCoverage=75%, E-value=1e-138, Identity=70%"; Hit description= COG0477: Permeases of the major facilitator superfamily
  Pfam annotation: Domain name=MFS_1; Domain location=1-299; Score= -14.7; E_value=0.0015; Accession=PF07690.6; Description=Major Facilitator Superfamily
MTIGCVLWVIMHALFMSMGLGMRNYPLMLLFYGIRGLAYPMFIYSFMLMLVQVLPRPNLAAATGWFWAMYSIGIGVVGSYLPSLTIPMFGETGTLWFAIVWVGCGGLVAFFSLRNVPVDRSRVNLPLRDKMTELSRAATILFTNRDIFYACLIRIINTLSLFGFAIVMPLLFVDRLGFSISEWLQIWAVFFFVTIFTNIFWGITGEYIGWIRQVRWFGCLGMAISSLTFYYLPVYAGHNFAVALIPAIMLGIFVAAFVPMTAVFPTLEPHHKGAAVSIYNLSAGMSNFVAPAIASALLPFFDIVGVVWAYTGLYIFAGVLTFIIKVPQPKRVRQGRSAEEVEQSV

SEQ ID NO: 51682 - protein, 486 aa, Zea mays
  Coding DNA Sequence Number=SeqID_9903
  Gene Ontology: Mol. function=xylulokinase activity; Cellular component=integral to membrane; Biological process=carbohydrate metabolic process
  Homolog annotation: Hit_ID=UPI00005F8F75; Match level="QueryCoverage =99%, HitCoverage=99%, E-value=1e-155, Identity=56%"; Hit description= COG1070: Sugar (pentulose and hexulose) kinases
  Pfam annotation: Domain name=FGGY_C; Domain location=246-462; Score =171.4; E_value=2.3e-48; Accession=PF02782.6; Description=FGGY family of carbohydrate kinases, C-terminal domain
  Pfam annotation: Domain name=FGGY_N; Domain location=1-243; Score =376.5; E_value=4.2e-110; Accession=PF00370.11; Description=FGGY family of carbohydrate kinases, N-te
  Pfam module annotation: Pfam domain module=FGGY_C::FGGY_N; Domain location=246-462::1-243
MYLGIDIGTSELKALLIDGDGEIVASAHAALTVQRPHPHWAEQDPQAWWQACGRVVTELRQQHSQQWAAIRAIGLSGQMHGAVLLDNDGNVLRPCILWNDTRSADECAWLSEHHPEMMTISGNMIMPGFTAPKLVWVARHEPDVFSRVAKVLLPKDYLRWRLTGEFVSDPSDAAGTLWLDVEKRDWSDELLAMTDLNRSQMPSLVEGSAPSGTLRAALATEWGLSSSVVVAGGGGDNATSAVGVGAVAPGDAFISLGTSGVIFVVNDALQADPDSGVHAFCHALPGRWHQMSVMLSAASCLRWICNLLSVTESQLMDEIAQLTEEELKRAPVFLPYLSGERTPHNDPLAAGSFFNLRHETSRALLGYAVIEGVTFGLADGLNVLGNASICQCSLTGGGARSPLWAQLIADVLNIPMVTHPASSSGALGAARLAWLADGGDEAKVCLKPPVVTRFTPQPERGQWLAKRLALFRLLYQQQQVARTLLP

SEQ ID NO: 51683 - protein, 1776 aa, Zea mays
  Coding DNA Sequence Number=SeqID_9904
  Homolog annotation: Hit_ID=P77215; Match level="QueryCoverage=21%, HitCoverage=92%, E-value=0.0, Identity=95%"; Hit description =Hypothetical protein yfaW
  Pfam annotation: Domain name=DUF1109; Domain location=1351-1521; Score=-135.0; E_value=0.083; Accession=PF06532.2; Description =Protein of unknown function (DUF1109)
  Pfam annotation: Domain name=HTH_5; Domain location=531-578; Score =6.5; E_value=0.082; Accession=PF01022.11; Description=Bacterial regulatory protein, arsR family
  Pfam annotation: Domain name=HTH_IclR; Domain location=530-616; Score= 64.4; E_value=3.6e-16; Accession=PF09339.1; Description=IclR helix -turn-helix domain
  Pfam annotation: Domain name=HpcH_HpaI; Domain location=1526-1754; Score=326.9; E_value=3.5e-95; Accession=PF03328.5; Description =HpcHHpaI aldolase family
  Pfam annotation: Domain name=IclR; Domain location=642-769; Score =138.1; E_value=2.5e-38; Accession=PF01614.9; Description=Bacterial transcriptional regulator
  Pfam annotation: Domain name=MFS_1; Domain location=1157-1537; Score =170.4; E_value=4.5e-48; Accession=PF07690.6; Description=Major Facilitator Superfamily
  Pfam annotation: Domain name=MR_MLE; Domain location=909-1004; Score =91.6; E_value=2.5e-24; Accession=PF01188.11; Description=Mandelate racemase  muconate lactonizing enzyme, C-terminal domain
  Pfam annotation: Domain name=MR_MLE_N; Domain location=790-894; Score= 14.6; E_value=0.00022; Accession=PF02746.6; Description=Mandelate racemase  muconate lactonizing enzyme, N-terminal domain
  Pfam annotation: Domain name=MoCF_biosynth; Domain location=178-344; Score=171.0; E_value=3e-48; Accession=PF00994.14; Description =Probable molybdopterin binding domain
  Pfam annotation: Domain name=Sugar_tr; Domain location=1156-1552; Score=-110.8; E_value=0.0021; Accession=PF00083.14; Description =Sugar (and other) transporter
  Pfam annotation: Domain name=YfaZ; Domain location=20-198; Score =272.0; E_value=1.2e-78; Accession=PF07437.2; Description=YfaZ precursor
  Pfam module annotation: Pfam domain module=DUF1109::HTH_5::HTH _IclR::HpcH_HpaI::IclR::MFS_1::MR_MLE::MR_MLE_N::MoCF_biosynth::S gar_ tr::YfaZ; Domain location=1351-1521::531-578::530-616::1526-1754::642-
  Pfam module annotation: Domain location=909-1004::790-894::178 -344::1156-1552::20-198
MIVQSAALEHWTIVARIREMKKSIYLGFASLLLASAGANAVSLSGQVGEHYTNLGVGMGTETSGLALSGNWAHNDDDGDIAGLGLGYNIPLGPFMGTVGGKGVYLNPNAGSEGYALAVGGGLAWQVSDSFRLFGEYYYSPDSLSSGVNDYREANAGARLTIIRPLSIEAGYRYVELTEMLSTGDEVLHGQIVDTNAAWLADFFFNQGLPLTRRNTVGDNLDDLVAILRERSQQADILIVNGGLGPTSDDLSALAAATAKGEALVLHEEWLTQMERFFSERGRVMAPSNRKQAEIPASAELVDNPVGTACGFAVQLNRCLMFFTPGVPSEFKVMVEHEILPRIRARFTLPEPPVCLRLTTFGRSESDLAQNLSHLTLPEGVVMGYRSSMPIIELKLTGPAEHREAMEALWPEVKRVAGESLIFEGTVGLPALLAGRLRERQLSLTLSEQFTGGLVALQLSRAGAPLLVSEVIPSQDEALVQTARWAAGLRDRHLAGLALTVTGLEDEHLNFALATPEGLESNMLESSKVPALSRAIEILNLIARIGPCSAAVIIEETGIPKSTAYLILAELKKARLLRIDSNDNYCLWTKLVELAGHALGRMDLREIARPRLTELMDETGLLCHLGIIDDANAYYILKIESSSTISVRSHEGKSLSLYRSGIGKCLLAWQPPATRDEIIRHLHWEKATSSTIANAQQLHDELVLIRSRGWSYDNGEDYPDVRCVAAPVFDARNALTAAISVVGTRLQINEENRDYLAEKGAGGGDYHDQGAHHWIDDHIATPMSKYKAYEQSRQSFGINVLGTLIVEVEAENGQTGFAVSTAGEMGCFIVEKHLNRFIEGKCVSDIKLIHDQMLNSTLYYAGSGGLVMNTISCVDLALWDLFGKVVGLPVYKLLGGAVRDEIQFYATGARPDLAKEMGFIGGKMPTHWGPHDGDAGIRKDAAMVAEYREKCGEDFWLMLDCWMSQDVNYATKLAHACAPYNLKWIEECLPPQQYEGYRELKRNAPAGMMVTSGEHHGTLQSFRTLSETGIDIMQPDVGWCGGLTTLVEIAAIAKARGQLVVPHGSSVYSHHAVITFTNTPFSEFLMTSPDCSTLRPQFDPILVDEPVPVNGRIHKNALDKPGFGVELNRNSLHEVITMNTSLLDSVVKKNRARLIPFMLMLYVLAFLDRSNIGFAKETYQIDTGLSNEAYALGAGIFFVVYAFLGVPANLLMRKFGARYWIGGTTLLWGFLSAAMAWADTEAKFLLVRTLLGAAEAGFFPGMIYLTSQWFPQRNRASIMGLFYMGAPLALTLGSPLSGALLEMHGFMGHPGWFWMFLIEGLLAVSAGIFTFFWLDDTPAQARFLTPQEKGVLEAQLASEEESKVTSRLTDALRNGRVWQLAIIYLTIQVAVYGLIFFLPTQVAALLGTKVGFTASVVTAIPWIAALFGTWLIPRYSDKTGERRNIAALTLLAAGIGIGVSGLVSPVLAIVALCVAAVGFIAVQPVFWTMPTQLLSGTALAAGIGFVNLFGAVGGFLAPIIRVKAETLFASGAAGLLTLAGVAIAATSGYDWLLIDGEHAPNTIQDLYHQLQAIAPYTSQAVIRPVEGSRVLIKQVLDIGARTLLIPMVESAEQAQDVVAATRYPPQGVRGVGASVARAARWGRVENYMARANEELCLLIQVESKAALDNLDAILHVDGIDGVFIGPADLSASLGYPDNSGHPDVQRAIEQAIKQIRDAGKAAGFLAVDPLMAKKVLEWGANFVAVGVDTMLYTNALDERLAIFKGARPSASATKGSY

SEQ ID NO: 51684 - protein, 1147 aa, Zea mays
  Coding DNA Sequence Number=SeqID_9905
  Gene Ontology: Mol. function=2-oxoglutarate decarboxylase activity; Biological process=menaquinone biosynthetic process
  Homolog annotation: Hit_ID=P17109; Match level="QueryCoverage=48%, HitCoverage=99%, E-value=0.0, Identity=80%"; Hit description =Menaquinone biosynthesis protein menD [Includes: 2-succinyl-6 -hydroxy- 2,...
  Homolog annotation: Hit description=4-cyclohexadiene-1-carboxylate synthase (EC 2.5.1.64) (SHCHC synthase); 2-oxoglutarate decarboxylase (EC 4.1.1.71) (Alpha- ketoglutarate decarboxylase) (KDC)]
  Pfam annotation: Domain name=Acetyltransf_1; Domain location=78-157; Score=48.9; E_value=1.7e-11; Accession=PF00583.14; Description =Acetyltransferase (GNAT) family
  Pfam annotation: Domain name=Chorismate_bind; Domain location=333 -572; Score=20.9; E_value=1.7e-15; Accession=PF00425.8; Description =chorismate binding enzyme
  Pfam annotation: Domain name=TPP_enzyme_C; Domain location=965-1101; Score=-6.2; E_value=1.1e-05; Accession=PF02775.11; Description =Thiamine pyrophosphate enzyme, C-term
  Pfam annotation: Domain name=TPP_enzyme_N; Domain location=574-744; Score=-56.1; E_value=0.00021; Accession=PF02776.8; Description =Thiamine pyrophosphate enzyme, N-term
  Pfam module annotation: Pfam domain module=Acetyltransf_1::Chorismate_ bind::TPP_enzyme_C::TPP_enzyme_N; Domain location=78-157::333 -572::965-1101::574-744
MQSNNHRPACVGCCKLSNIAVTLRERVGTPAEDLHHSELTVADLYALLKLRCEVFIVEQTCPYLDVDGDDLVGQNRHLLGWKENQLVAYARILKSEDDLEPVVIGRVIVSEQVRGEKLGYQLMERAVASCQQHWPQHALYLGAQAHLQHFYARFGFVPVTDVYDEDGILHIVALEQLREKLSGIDANSPGFYVFDVAFALNDAFDPLTFLASQPCFPQFYWQQRSGEDEAAALGQVLRFPSLAEARHFLKDNPEHDLRVWGLNAFDPQQGELFLPRLEWRREGGRASLRLIVLNGNAQQNDVAQARSFIDALVRAKSLPDVQMELVSQHHFPQQSGWEALVTQATQAITRGEMDKVVLARATDYHFSQPVNAAAVMAASRRLNHHCFHFFIAFDPHNAFLGSSPERLWRRRGTSLRTEALAGTVANDTDDTRATELGDWLMNDDKNQRENMLVVEDICQRLRHATSTLDVLPPQIVRLRKVQHLRRCIWTEMHHNDDAQCLTLLQPTAAVAGLPRLAARAFITQHEPFEREWYAGSAGYLSLKQSEFCVALRCAKISATILILDKLMSVSAFNRRWAAVILEALTRHGVRHICIAPGSRSTPLTLAAAENSSFIHHTHFDERGLGHLALGLAKASGTPVAVIVTSGTAVANLYPALIEASLTGEKLIFLTADRPPELIDCGANQAIRQPGIFASHPAQSLALPRPSQDIPARWLLSAIDHLMASAQTGPVHINCPFAEPLYGEMDDTGLTWQQAPGDWWQDDKPWLREDLHSGSAKQRDWFFWRQKRGVVVAGRMSASEGKLVAAWAKMLGWPLIGDVLSQTGQPLPCADLWLGNARAVSELQTAQIVVQLGSSLTGKRLLQWQATCEPQEYWLVDSVAGRLDPSHHRGRRLVSGVAEWLELHPAESRAPWCTDIPQLSSQAWQAVASQRETFGEAQLAHRLAKYLPDQGQLFLGNSLVVRLVDALGQLPVGYPVYSNRGASGIDGLISTAAGVQRGTARPTLAIVGDLSALYDLNALALLRQASAPLVLIVVNNNGGQIFSLLPTPQSEREQFYLMPQHVHFEHAAAMFGLKYHHPQNWDELEQALAGAWSKAGATLIELVVKDTDGAHTLQQLLAQPKGLLGVIVEGGAPWPDGCDCTAGAPDIR

SEQ ID NO: 51685 - protein, 596 aa, Zea mays
  Coding DNA Sequence Number=SeqID_9906
  Gene Ontology: Mol. function=enzyme inhibitor activity; Cellular component=cell wall; Biological process=cell wall modification
  Homolog annotation: Hit_ID=Q84MV1; Match level="QueryCoverage=96%, HitCoverage=98%, E-value=0.0, Identity=63%"; Hit description =Putative pectin methylesterase
  Pfam annotation: Domain name=PMEI; Domain location=51-204; Score =49.8; E_value=9.1e-12; Accession=PF04043.6; Description=Plant invertasepectin methylesterase inhibitor
  Pfam annotation: Domain name=Pectinesterase; Domain location=268-572; Score=519.7; E_value=3.1e-153; Accession=PF01095.10; Description =Pectinesterase
  Pfam module annotation: Pfam domain module=PMEI::Pectinesterase; Domain location=51-204::268-572
MSSSDGGQSRKRLVVGVLSVCLLIAMVIGTVVFFVSEKAGYNSELSKRNMSKTMRSVELFCAPADYQGTCHETLEAALSRTDPDEHPHAAAAAAITAVERALAEGFNRSSVLDAVRQSNDTLVWEAIHDCRMLLEDCRGNVERALSSIAWRGVDGPAQDLQAWLSAVITFQGSCVDMFPKGEVRDEVNNTMEKAREVSSNALAIIKQGAALASMLDLHTSLDKGGRQLEEKEKSASSSSSSVPTWVPSEERKLLGAKGERRRAALTPNVTVAKDGSGDFTNISAALDAMPEKYSGRYFIYVKEGVYEETVNITGRMANVTMYGDGSKRSIVTGSKNIVDGIRMWRTATFAVDGDSFMAMKLGIRNTAGVEKQQALALRVKGDKAIFFNCRIEGNQDTLFAQAYRQFYRSCVISGTVDFIMGDASAVFQRCLLVVRKPRPGQPAVVTAQARRDHQQTTGFVIHRSQIVADEQLASSSNSNKSGSAPVNTYLGRPWKEFARTVVMESVIDGFVHRQGYMPWEGKDNLGTAFFGEFRNGGDGANVTGRKEMQGFHVMGKDRALQFTVGHFLHGADWIPETGHAADQNVRPTSRVLQHTG

SEQ ID NO: 51686 - protein, 124 aa, Zea mays
  Coding DNA Sequence Number=SeqID_9907
MGKSKKGGSSSYHSGDKRKREPTPPSEDFGDFEYSEGIAAEVWTYIRVVERSGLEGSDESEVSSDEENSSDLSEEESGGDGDDEGDGNDGGDIDGDGDGGQGDGKGDDKSGNGNSKASGKAPLA

SEQ ID NO: 51687 - protein, 69 aa, Zea mays
  Coding DNA Sequence Number=SeqID_9908
MAGKMTRVLALDVAIQANMGLWRKFPQTQRVAALDGGLIPRVSRASSANRLSEGVRAKLTVGSKSRGQD

SEQ ID NO: 51688 - protein, 173 aa, Zea mays
  Coding DNA Sequence Number=SeqID_9909
  Homolog annotation: Hit_ID=Q8MW55; Match level="QueryCoverage=58%, HitCoverage=11%, E-value=2e-08, Identity=41%"; Hit description =Precollagen-NG
  Subcellular localization annotation: CTP_CleavageSite=24; ConfidenceScore=5.23e-01
MAPPVDVAGDVGVPPKPRLSLPFVAVAEPEPRGRARRKSFGRGQGGVRALGSGGAEFAVFRVLARVRALGSGGAEFAVFRVLARVRALGSGGAEFAVFRVLARVRALGSGGAEFAVFRVLARVRALGSGGAEFAVAPLARPVCLSDSLYRVALQSEWRRRRCPSVRLASGVVE

SEQ ID NO: 51689 - protein, 133 aa, Zea mays
  Coding DNA Sequence Number=SeqID_9910
MEAAAPDRAGKASPDPRGARLAAQALPPRAAASYGTDDPQFLSSIIGDAAAPPPPPADVAARAEAEGGCRPRGKTARARWYRPGPPGKGRTRRRSSAFICFDGGNLVVCDRRGGAPCRALSSLSVDCCTASRR

SEQ ID NO: 51690 - protein, 63 aa, Zea mays
  Coding DNA Sequence Number=SeqID_9911
MGGACRAAARPWREARLLKLRRCHGRNLRTWDEVVHEMKSAVREKDEPVPKLPVKKLWLSDGK

SEQ ID NO: 51691 - protein, 79 aa, Zea mays
  Coding DNA Sequence Number=SeqID_9912
MGPASPGGSASAPKKPKSDEFADLIFSGHTRLSGVHRTIIVHYLVHYQSNGKLSELVVGADHWRTRLSMRPCAESYNNG

SEQ ID NO: 51692 - protein, 36 aa, Zea mays
  Coding DNA Sequence Number=SeqID_9913
MARLAVATRAFSASASNGDTGDGVGDSMGRKTTATW

SEQ ID NO: 51693 - protein, 144 aa, Zea mays
  Coding DNA Sequence Number=SeqID_9914
  Gene Ontology: Mol. function=ribonuclease H activity; Cellular component=mitochondrion; Biological process=DNA integration
  Homolog annotation: Hit_ID=Q1STR6; Match level="QueryCoverage=99%, HitCoverage=22%, E-value=1e-36, Identity=50%"; Hit description =Integrase, catalytic region; Ribonuclease H
MARWQILLSEFDIVYVSQKAIKGSAIADFLASRALEDYKPLDFDFPNEDLMYVANVEEDPRENHSWRLNFDGASNVLGNGIGVVLVSPNEDYHHFTSKLDFDYTNNMAEYEACIMGIRAAIERKIKTLEVYGDSALVIYQLRGE

SEQ ID NO: 51694 - protein, 463 aa, Zea mays
  Coding DNA Sequence Number=SeqID_9915
  Gene Ontology: Mol. function=electron carrier activity; Biological process=electron transport
  Homolog annotation: Hit_ID=Q6EPG5; Match level="QueryCoverage=93%, HitCoverage=92%, E-value=7e-81, Identity=38%"; Hit description =Aluminum-activated malate transporter-like
  Pfam annotation: Domain name=UPF0005; Domain location=59-424; Score =391.7; E_value=1.1e-114; Accession=PF01027.11; Description =Uncharacterised protein family UPF0005
MAPRKEVFEGVEWRIRVAADGSSEALVPATGLARKAWLGIKGLISGFALKVRMFVKKAWDVGTNDPRKVIHCIKVGLALAIVSLFYFMRPLYDGVGGNAMWAVMTVVVVFEPTVASAATFSRLIPSVKSRFDYGALIFILTFSFVAVSGYRVDKLFELAHHRISTIIIGSSLCILVIMLVCPIWSGQELHSLIVRNMDKLADSLDGCVTQYFNQSGEGTNSKEEATDNKLQGYKCVLSSKASEESMANFGRWEPSHGQFNFRHPWKQYLKIGASMRSCAYCIEALNSCIKSENQAAITCFKQAAKLIKQHLGSGCLKVSSSSSNVIRELAETVKTMKKKSSTTDLLAEEMKSAVQGLQNDLKKIPHLLNPSAIPGNKTLETACSEATTPTVTLMELVPVVTLASILIEISGRIEALFDAVEELAKLADFGINDDKSKHSKMTDKTVSDAKQQTEGTMKALQRV

SEQ ID NO: 51695 - protein, 596 aa, Zea mays
  Coding DNA Sequence Number=SeqID_9916
  Gene Ontology: Mol. function=oligopeptide transporter activity; Cellular component=integral to membrane; Biological process =oligopeptide transport
  Homolog annotation: Hit_ID=O82485; Match level="QueryCoverage=81%, HitCoverage=78%, E-value=1e-155, Identity=73%"; Hit description =Oligopeptide transporter 7
  Pfam annotation: Domain name=OPT; Domain location=45-583; Score =368.7; E_value=9e-108; Accession=PF03169.6; Description=OPT oligopeptide transporter protein
MEESEDEIRAPLISKDEDDSNLSSSRSEALASKSEAEIKEVEEEENSPFFWYRTEPLTITAISAQIAVVPLGQLMAAKITKRVFFKGSRWEFTLNPGPFNVKEHVLITIFANSGAGSVYAIHVVTVVKVFYKQHITFFVSLIVILTTQVLGFGWAGIFRRYLVEPAAMWWPANLVQVSLFRALHEKEERAKGGVTRTQFFLIAFICSFAYYVFPGYLFQMLTSLSWICWIFPKSVVAQQLGSGLYGLGIGAIGLDWSTISSYLGSPLASPWFATANVAAGYIFVMYVLTPICYWLNVYSAKTFPIFSDTLFTSTGQEYNITAIIDSNFHLDVAAYEKEGPLYLSTFFAMTYGVGFAALTATIVHVGLFHGRHQAITFLQDFKLGHYMKIPPRTMFMAQIVGTLIACFVYLGTAWWLMENIPDICDTTASNSVWTCPSDTVFYDASVIWGLIAPRRIFGDLGTYEAVNWFFLGGAVAPLLVWLASKAFPSQEWIRLINMPVLIGATGMMPPATAVNYTTWIIVGFLSGFVPRRFDIGAPNHPVPIGTNEGFGCGFNQVQRTETDVAVRRWPWLGRAALCGGEPAGCGAENSGNPRGF

SEQ ID NO: 51696 - protein, 182 aa, Zea mays
  Coding DNA Sequence Number=SeqID_9917
  Gene Ontology: Mol. function=protein serine/threonine kinase activity; Biological process=protein amino acid phosphorylation
  Homolog annotation: Hit_ID=UPI000034F1DC; Match level="QueryCoverage =92%, HitCoverage=23%, E-value=3e-41, Identity=57%"; Hit description =ATP binding / kinase/ protein kinase/ protein serine/threonine kinase/ protein-tyrosine kinase
FRDCLDEKSKASLVQIKGRFSVTSENLDLVKFQTSPIRKSASVGDWILESKQVAINHAPKDLTNGSVSTSILTTHLQNLFQRTSLQQDLIVNLLNSLQPAEVVDASQNGKLPVLPRSESNGNVELETAASERERLLLGKILELQSRMMNLRDELNAEKWRYEELQQELRLMAGAEENGDDAA

SEQ ID NO: 51697 - protein, 108 aa, Zea mays
  Coding DNA Sequence Number=SeqID_9918
MTRVRVLTGNYTTRMYFRQNLPYVKEGGAVNDEVGGALSSNMNGKEEVLKGRFKESVKVIMDRDVEKKVNRHKTKDISTIKDGVKIGLANGKGEGTSKGQICKLTLSK

SEQ ID NO: 51698 - protein, 110 aa, Zea mays
  Coding DNA Sequence Number=SeqID_9919
  Subcellular localization annotation: CTP_CleavageSite=22; ConfidenceScore=5.02e-01
MAGQGQTTLVHVEGRSLRAVVTAASNSPTAPTPDPNRRRDRLPWKITTPLGHPPRQNCPHRRGSPTAQQILPGGVNSFPRLSHSPQRSGSRGSTTEYWGNREAPRGFLSK

SEQ ID NO: 51699 - protein, 201 aa, Zea mays
  Coding DNA Sequence Number=SeqID_9920
MAGHTDYHAGRAAGCRARQLGHAGHVQGLGPTEQGHGPRRLRTGSHGCTPWRGTGSPSSLPDQGDRGRGERSGGWRLRELGRGTRHGEAGRKDGKGREMDGGFHSTATRHDVRLALPTRAGLATRTAQGEGAATLGQARCQGGNGVGPRSSVGRLGHTRGGGGLRARLRGVTGGPRLGRAAARGSEPRVGKMARCRMGQGA

SEQ ID NO: 51700 - protein, 45 aa, Zea mays
  Coding DNA Sequence Number=SeqID_9921
MTSAACVRGQGSSDHLRCRPAHQHDRRNLLDVTNHPAGALLPPRT

SEQ ID NO: 51701 - protein, 76 aa, Zea mays
  Coding DNA Sequence Number=SeqID_9922
MANGARTSFSEPVSAKTRNVAMEEERGGGAYRRRDCSDEVVEDVGEVLRVTTMCWSPLGMVGVGRSMCTGGDAHRR

SEQ ID NO: 51702 - protein, 147 aa, Zea mays
  Coding DNA Sequence Number=SeqID_9923
MSVFPHGPRSPRADARRWSRHPCNDRGAFPEYKYVASDSLLTFPLDSSLRTVTRKPARGERNCRCGRRRRAPSWSPWLTLVPTGKASAGLYGGDRRPGLEKGPWATPEFHAGARRPPLLVDGRDYLTIAEETLEDLRINPPSHATAL

SEQ ID NO: 51703 - protein, 83 aa, Zea mays
  Coding DNA Sequence Number=SeqID_9924
  Subcellular localization annotation: CTP_CleavageSite=14; ConfidenceScore=5.14e-01
MKLWKETSRSFKTTTSSRRGLAATPSRLPVKAAFIYVSFPHFDLFPPAAIPAAELRPLPVGSPLPTLSGQIEPTIRIASLHPC

SEQ ID NO: 51704 - protein, 133 aa, Zea mays
  Coding DNA Sequence Number=SeqID_9925
MGFRNVRCWTRQKLETRNGRTTTVCIWSIIRSERPREGSLRNGAIIRSERPSARSCLADESHIRLVPIWSSFGSHRNQSDEHEPDAVAIDTAPACRVSDVGGSMGAPLWLQLPPGAPSSWSSPWATARRRRPA

SEQ ID NO: 51705 - protein, 104 aa, Zea mays
  Coding DNA Sequence Number=SeqID_9926
MRGNARLWRRWPPGASYDGCVQARSRLRILSLDIHLFICFHVLMHLLVMHVQVLVCLLELLLGILELVFQNLNGVVPFFHFLYKFMDSGTHLLSLEILLHQLGR

SEQ ID NO: 51706 - protein, 119 aa, Zea mays
  Coding DNA Sequence Number=SeqID_9927
MVKRPSSRYASSAVIATRYDPLTTLHYIALACLFVAGGLATSSTQHTHPCLRLSTREPQFETSPKSVQSTVLSELAVAQHSTGVELGVNLFRAPVIAYLGWYRLAGATAPPFSIVDLAL

SEQ ID NO: 51707 - protein, 76 aa, Zea mays
  Coding DNA Sequence Number=SeqID_9928
MAMMGSTSEKMYLCQIPNFGFEMIKLRLGGLVDRGLFNWSHASSWVKKQQTFVASVPRWCPKKKIKTKAAGGRVLR

SEQ ID NO: 51708 - protein, 128 aa, Zea mays
  Coding DNA Sequence Number=SeqID_9929
MWSLAARSDSGGFKEVRRALVHPIAIGRARSAQPNRHSNPSPSCPREINGQWPSSPTAHQGTTALSRDSGAIVGNYGINAQAYQTVYRYLLNAAKDIMNSMRASYQWIARRRSTDHGGGRLRINDKLW

SEQ ID NO: 51709 - protein, 87 aa, Zea mays
  Coding DNA Sequence Number=SeqID_9930
MARVACTLRGKRLDGGYSFVVLLMVLSAGGLGLLVISGLFGVLGTLEQILLSYLVHMHSRMRSLGQAQVHVGPITWEVLPQLVSELD

SEQ ID NO: 51710 - protein, 99 aa, Zea mays
  Coding DNA Sequence Number=SeqID_9931
MSIKNYFCQNLRKIRKVMKNNNQRMTIFFQVYRSDKEHRKNTENPGPEIVQDCNLADREYVLIPEQGAAQEEVQEPAPEHAIEDLPAAPAFEGKPRFYA

SEQ ID NO: 51711 - protein, 120 aa, Zea mays
  Coding DNA Sequence Number=SeqID_9932
MVPIDELCFIGLSPSVRHMCGRRMRSLLNPVVLELMISLSSEFSLDSCPRQLAPDSISSSFGHPTSMSVPTCCLRLMLAPTKESQEDVEKQAPGRCPKCSTESSNKSSIVILVHAKIWED

SEQ ID NO: 51712 - protein, 56 aa, Zea mays
  Coding DNA Sequence Number=SeqID_9933
MAMMGSTSQKMYLCQVPNFGFEMIKVRKQQTFIASVQRWYLKMSTKTRAGGGKALR

SEQ ID NO: 51713 - protein, 211 aa, Zea mays
  Coding DNA Sequence Number=SeqID_9934
MSPGRWVPTVGALTCGPAWLSGGAPDKSCRLSAKIHHLTSNAKVALAKFVWAATSYGGERLVECYIVFQQFKLKKGDKNEDALQRATRTSSGCDLVEEFIACGVWPLAHGWDVGAVKLRLMPFLENRMVMSLAFAIELRGRDSAAFVREVEAEAVRIDGKYSARTKMTRSWDIRGSNVKLNYVFELNGLHYGMYLEEGSTEARMNEGRKKW

SEQ ID NO: 51714 - protein, 43 aa, Zea mays
  Coding DNA Sequence Number=SeqID_9935
MKSMHTYHERVKATTRAGMDRAHTLFVDVYHDLGAETAPFDKR

SEQ ID NO: 51715 - protein, 162 aa, Zea mays
  Coding DNA Sequence Number=SeqID_9936
  Homolog annotation: Hit_ID=Q2QWE5; Match level="QueryCoverage=93%, HitCoverage=88%, E-value=4e-17, Identity=32%"; Hit description =Expressed protein
  Pfam annotation: Domain name=DUF538; Domain location=20-161; Score =17.5; E_value=7.6e-07; Accession=PF04398.3; Description=Protein of unknown function, DUF538
MCRRHHHHQHVLVAAIALMAAFILQGVSSTTNFTGYAATTAYDVLELNNMPRGLLPLGVQSFVLDAGGALELTLPGECNFFVEVAGKQIKFRFDSSVSGAIRSGSISRLSGAWIQVEFALVGFNQVSRAGDQLNFRLEKKSTQSFPTSAFAESVPCSGLLAP

SEQ ID NO: 51716 - protein, 668 aa, Zea mays
  Coding DNA Sequence Number=SeqID_9937
  Gene Ontology: Mol. function=RNA-directed DNA polymerase activity; Biological process=RNA-dependent DNA replication
  Homolog annotation: Hit_ID=UPI00004C1732; Match level="QueryCoverage =92%, HitCoverage=75%, E-value=2e-88, Identity=57%"; Hit description =UPI00004C1732 related cluster
  Subcellular localization annotation: CTP_CleavageSite=13; ConfidenceScore=5.45e-01
MGAPARRHGTYTVASWRMPKPPHPPALNRAQSNPRSSNNLAPHHARTPLPPKDGASTTNFESSWNAPLSSRPRVQHLDFRSLPRVIKWDPLVLKGRPWSTPGPLKRGQLRCVIASRTTVSMGAFDTTTDFTRHITNTLGREAVITTRRIGTPLPNHRGTYVRMGNLWDLRSCRQKQDKSLREYICRFSKQHIELSNVTDSDVIGASLTGTSYRDLSRPSPQGQGRREAKRGHPPKKGRKKKAQQGLHEALATELITAAEKPTPIYRDWSNHTITFDRDDHPNYMPNPRRYPLIIDPIIGNTRLTKEVLTFEVVGFRGTYHAMLGRPCYTKFKAVSNYTYLKLKRLGPVGVITIGPTYRHAYECDIKCVEYIKAIVNSEALIADLENLAGEVPDPRSMPTTLSRSKPRRLSPSIPTTLAKSLSNMLGIPREVTEHSLDIQANSRPVRQYLRMFDEEKCRDIGEDIHKLLATGFIKEVFHPEWLANPVLVRKKGDGGCSTVEAFVDDIVVKTRKADSLIADLETIFACLRAKSVRLNPEKCIFGVPRGMLLGFIVSKQGIEANKEKENRALHLDARSQKALKNLKKLLSNTPILVPPSEGEPLLLYVVVATQVVSAEIVVERKEEGHILQYIIRLHFVASNNVAEYEALINGLRITTELGVRRLDVRGDS

SEQ ID NO: 51717 - protein, 121 aa, Zea mays
  Coding DNA Sequence Number=SeqID_9938
  Subcellular localization annotation: CTP_CleavageSite=62; ConfidenceScore=5.35e-01
MPHGSYPGPPETFFPTFSPLRPQIRGLFPTIEFVVAFSPSLSNSGDPGATLARACPKSGDLTAAERSSTARIRSPLPGLIPSVRSSSHDPDHGIPLCARTHDALARLLAPKSPGAGPARSL

SEQ ID NO: 51718 - protein, 184 aa, Zea mays
  Coding DNA Sequence Number=SeqID_9939
MAWGAITSHARGGGTRRVDVGAAGSSPGVVLMLARSLERDSTSSVILGVLPGHGVQWVARLRLFRLASYDEKDSDGCSDASEGQVCALKAGVPHWPSGALCPPRLRWAWARRIWRLQGEVPSSEVETKDLSCERLGRDRDLPEAVILEGPRGGGSVRMALLWGRPLRWASGEEVTWPLAFGDYV

SEQ ID NO: 51719 - protein, 121 aa, Zea mays
  Coding DNA Sequence Number=SeqID_9940
  Gene Ontology: Mol. function=hydrogen ion transporting ATP synthase activity, rotational mechanism; Cellular component=proton -transporting two-sector ATPase complex; Biological process=ATP synthesis coupled proton transport
  Pfam annotation: Domain name=DUF1253; Domain location=1-120; Score= -292.3; E_value=0.032; Accession=PF06862.2; Description=Protein of unknown function (DUF1253)
MVTEYAGVLPKIQLEVRQVYERFDASSIAEADGARFDYFCNKVYPKIQDLDEIRGTKHLLVYSLPGRKEFYPELVNMLGESENRKCNVLFSRLDLLKLERIVGKSSARRLISSEKGMFVFC

SEQ ID NO: 51720 - protein, 258 aa, Zea mays
  Coding DNA Sequence Number=SeqID_9941
MSGICKYGEQASPNVMGIGQRRTVTRVEVNRGSTAPPNLANGDGEFGHPRSTAAHGPVPRWRCWRSGGGALTWLTAKRRPQPRAVLGARRSVAADPVARAARRRAGPSRPDRGTTLGAAVDQAMPSAHRHDGRPRARTLMRRHWRPCRRDDMDVPGTAAQSRCGLTGGESRGWKPSHGITGGEKTAQPRCPPSRAHCGPTCTATHASVRRRRRSRETRSEQQYHLCTVLAFDSNPSRGLIRYFGTNSGGSKIDSSGGY

SEQ ID NO: 51721 - protein, 152 aa, Zea mays
  Coding DNA Sequence Number=SeqID_9942
  Gene Ontology: Mol. function=metal ion binding
  Homolog annotation: Hit_ID=Q8LR61; Match level="QueryCoverage=54%, HitCoverage=18%, E-value=1e-36, Identity=91%"; Hit description =Putative WD repeat domain 45
MAAGGGAACAPQPDETARVERFRRCPGGDGKSVFCLEGKASQDHPTMDNNRGASSAMLAPTCSPAGTPHTLSNPKGLCAVSQQPGSIVLVCPGVQKGQVRVEHYKARKTKFINAHTSCIACFALSQNGRLIATASTKGTLVRIYNAAEGNLL

SEQ ID NO: 51722 - protein, 450 aa, Zea mays
  Coding DNA Sequence Number=SeqID_9943
  Gene Ontology: Mol. function=lithium ion binding; Cellular component =integral to membrane; Biological process=calcium ion transport
  Homolog annotation: Hit_ID=Q2HTM6; Match level="QueryCoverage=82%, HitCoverage=99%, E-value=1e-104, Identity=49%"; Hit description =Sodium/calcium exchanger membrane region
  Pfam annotation: Domain name=Na_Ca_ex; Domain location=302-442; Score= 96.8; E_value=6.3e-26; Accession=PF01699.14; Description =Sodiumcalcium exchanger protein
  Pfam annotation: Domain name=Na_Ca_ex; Domain location=52-185; Score =75.8; E_value=1.4e-19; Accession=PF01699.14; Description =Sodiumcalcium exchanger protein
  Pfam annotation: Domain name=TatC; Domain location=161-352; Score= -84.5; E_value=0.077; Accession=PF00902.8; Description=Sec -independent protein translocase protein (TatC)
  Pfam module annotation: Pfam domain module=Na_Ca_ex::Na_Ca_ex::TatC; Domain location=302-442::52-185::161-352
MATPGATCAISSALARPPALLDYAAIHACLLRGDARRSLPLLALLLLLHFRLLAAAASARFTPAVSRLAARLRLSPSMAAVTLLALGNGAPDAFASAAALGGPRGMPRAGLAAVLSAGAFVSAFVVGAVALVAAPFAVPPPSFARDVFFYLLAASALFYVYLSAEIFLWQAVGFVLFYAFFRGASLLHGFGERGREEGEVWEWPIALVLKLTIPSTLPSEWSKVYISANIGLCPLLILYSFSSFIPLDTRIVFLLPQVRFPLWSVVLFASLCLALSHYLLEKEAPETETIASTIISFIMSVFWISTTAGELLSCLAAVGAIMDFPPAILGMTVLAWGNSVGDLVADVALARAGQPTIAVAGCFAGPMFNMLVGLGTALVVQTARVYPGAFVLEFHVGIVVAFVFLLLSLMGTLLVVTWARFRVPRFWGYCLMGMYILFTVVSIAIASYSG

SEQ ID NO: 51723 - protein, 316 aa, Zea mays
  Coding DNA Sequence Number=SeqID_9944
  Gene Ontology: Mol. function=hydrogen ion transporting ATP synthase activity, rotational mechanism; Cellular component=proton -transporting two-sector ATPase complex; Biological process =intracellular signaling cascade
  Homolog annotation: Hit_ID=Q2RAK5; Match level="QueryCoverage=94%, HitCoverage=64%, E-value=1e-143, Identity=78%"; Hit description =Expressed protein
  Pfam annotation: Domain name=DUF231; Domain location=119-283; Score =157.9; E_value=2.6e-44; Accession=PF03005.6; Description=Arabidopsis proteins of unknown function
MLEKLRNKRVVFVGDSIGRNQWESLLCMLSSAVHNKSSIYEVNGSPITKHMGFLIFNFSDYNCTVEYYRSPFIVLQGRAPAGAPEIVRYSIRVDAMDWMSDRGKWKDADVLIFNTGHWWNNEKTIRGGAYFQVGDEVKMGMNVADAYRRSIQTLSDWLRKEVNPSKTHVIYRTYAPVHFRGGDWKTGGSCHLETLPDVMPVKSLDEWADLLQPVDDFLGSNLRSKLAGLDLLNVTRMTAQRKDGHLSVYLSPSGPVPRYKQDCSHWCLPGVPDAWNELLYALVMRRHKKMGQNASLAGARTPNTEEGDGDVFSRPS

SEQ ID NO: 51724 - protein, 152 aa, Zea mays
  Coding DNA Sequence Number=SeqID_9945
MPWWLGRGGGGGGAGPRGCAGERGCRALGRSRPSRQGCGAGPAEFEWAAGRPREGKRARGELGRSAGPWEEVSASPDPRARPPPRPRKVVSASPDPRARPQPRPQKMVSALPDPGLGLNLDLRKESRPRPTPALASGGVSASPDLGLRPTAP

SEQ ID NO: 51725 - protein, 802 aa, Zea mays
  Coding DNA Sequence Number=SeqID_9946
  Gene Ontology: Mol. function=protein transporter activity; Cellular component=endoplasmic reticulum; Biological process=ER to Golgi vesicle-mediated transport
  Homolog annotation: Hit_ID=Q6H8D5; Match level="QueryCoverage=86%, HitCoverage=71%, E-value=0.0, Identity=72%"; Hit description =Putative coatomer protein complex, subunit beta 2
  Pfam annotation: Domain name=Coatomer_WDAD; Domain location=454-802; Score=158.9; E_value=1.3e-44; Accession=PF04053.4; Description =Coatomer WD associated region
  Pfam annotation: Domain name=WD40; Domain location=103-141; Score =18.3; E_value=0.028; Accession=PF00400.22; Description=WD domain, G -beta repeat
  Pfam annotation: Domain name=WD40; Domain location=182-220; Score =8.0; E_value=4.3; Accession=PF00400.22; Description=WD domain, G -beta repeat
  Pfam annotation: Domain name=WD40; Domain location=224-262; Score =44.4; E_value=3.7e-10; Accession=PF00400.22; Description=WD domain, G-beta repeat
  Pfam annotation: Domain name=WD40; Domain location=267-306; Score =49.0; E_value=1.5e-11; Accession=PF00400.22; Description=WD domain, G-beta repeat
  Pfam annotation: Domain name=WD40; Domain location=310-350; Score =39.1; E_value=1.5e-08; Accession=PF00400.22; Description=WD domain, G-beta repeat
  Pfam annotation: Domain name=WD40; Domain location=354-392; Score =51.8; E_value=2.2e-12; Accession=PF00400.22; Description=WD domain, G-beta repeat
  Pfam module annotation: Pfam domain module=Coatomer_WDAD::WD40::WD40:: WD40::WD40::WD40::WD40; Domain location=454-802::103-141::182 -220::224-262::267-306::310-350::354-392
MGRFGHAPSLCLCVPSRRTWWRMPRLGYLNDEEFRSEILDNQGPYCGSSRHIPTELVVVLCHLVRFAKNARSRCDLVTSYPAGRIDAFRAEIPIQILFLPLQLEIKRKLAQRSERVKSVDLHPTEPWIMSSLYSGSVCIWNYQTQVKLMTAVIVHLKMIPNFMHGDCDDLLKRRAVVGLSRKTSHITMVKSFEVIRSAKFIAQKQWVVAGADDMFIRVYNYNTMDKVKLFEAHTDYIRCVAVHPTLPYVLSSSDDMLIKLWDWDKGWMCTQIFEGHSHYVMQVTFNPKDTNTFASASLDRTVKIWSLGSPDPNFTLDGHSKGVNCVDYFTGGDRPYLITGSDDQTAKVWDYQTKSCVQTLEGHAHNVSAVCFHPELPIIMTGSEDGTVRLWHSTTYRLENTLNYGLERVWALGYMKGSRRVVIGYDEGTIMIKIGREAPVASMDSSGKIIWAKHNEVQTVNIKAVGADAEVIFIADGERLPLAVKELGSCDLYPQVGSSFLFLLYVAYTFLISKSLRHNPNGRFVAVCGDGEYIIYTALAWRNRSFGSALEIVWSTEGEYAARESTSKIKIYSKNFQIQQQCPNVLGIVSWDYWTLYASIFIITQGTRYHRLQHHVEFLEVWDLILEVELHEQIEECRLIRRIDVNVKNVYWADSGDLVTIASDSSFYILKYNRDLVSSHLDGGASVGEEGVEDAFELLHEINERVRTGLWVGDCFIYNNSSWRLNYCVGGEVTTMFHLDRPMYLLGYLANQSRVYLIDKEFNVAHFLESRGMLEEALDIATDPNYRFDLAVQLGSLEVAKA

SEQ ID NO: 51726 - protein, 100 aa, Zea mays
  Coding DNA Sequence Number=SeqID_9947
MCCSSRSNVDLLGLGAFLPFPRTRRLRRGPETLIKFSSEPRLPHPVAPDLATKAVRCLLPTEPLSSATVSLFLALADGSPVLALNARAAVGVPRLKGYSI

SEQ ID NO: 51727 - protein, 38 aa, Zea mays
  Coding DNA Sequence Number=SeqID_9948
MACNPNTWGLDHLPIRVIIECLAPQALTTAPPEISELQ

SEQ ID NO: 51728 - protein, 99 aa, Zea mays
  Coding DNA Sequence Number=SeqID_9949
MGCSDLVTHEGTQNALACEGCHHFEPLGCIDKVFERSVYAIEGDRIVGLSAEECLEAEADESDNSDTKSDLLVPIASVKAAVQAPSSKVAKGTILGVFR

SEQ ID NO: 51729 - protein, 73 aa, Zea mays
  Coding DNA Sequence Number=SeqID_9950
MGSTLTAAFANIAHQINIEGEQALELHSLFLSVQHNLGVSFDYACSNAESPKFAESEYDCFVFRYVIGALVCF

SEQ ID NO: 51730 - protein, 117 aa, Zea mays
  Coding DNA Sequence Number=SeqID_9951
  Gene Ontology: Mol. function=ferric-chelate reductase activity; Cellular component=integral to membrane; Biological process=electron transport
  Homolog annotation: Hit_ID=Q8W5L0; Match level="QueryCoverage=72%, HitCoverage=37%, E-value=2e-34, Identity=80%"; Hit description =Putative cytochrome b561
MWSSFGYFGSPKFCENSVLPMLLQIVLIRRVHWLMAFVYFVFPGAVMTMRADYAPWHIFFGLAIFLMAICTAETGLAKFVSAFIAYPGEVFVVNFTGIAILMFGVAVVLAVILPSRY

SEQ ID NO: 51731 - protein, 447 aa, Zea mays
  Coding DNA Sequence Number=SeqID_9952
  Gene Ontology: Mol. function=helicase activity
  Homolog annotation: Hit_ID=Q1SF68; Match level="QueryCoverage=86%, HitCoverage=27%, E-value=1e-46, Identity=32%"; Hit description=AAA ATPase; DEAD/DEAH box helicase, N-terminal
MGSRGRMLFDLNELPAEVEEAAAAVVPKESAAVVPKESAAVVPQEAVVVALQEAAVVVSQPQKSLRVPTTYAPTLFQRGEGSQSQGILNNNAFKHASIGSGFQPFVRNSKDSNNTKEPMKVEDNHNSSIASLSMVNNQITDSAASKVETCNKVSQAIEREEGEWSDADGISENAGSSNKDEFTGTASTNLKKESQESEPHLIKSGDVTKDDTAAECSDAEKVDASEDRVHGSTGSDNMQNSECKGNQPGDDLDLCNRSRDVKGVEANYALRFASNPAKRPKLNEHKEAMLGKKRARQTVFINVEDAKQAGTMKTSTPRRQSSFPAPIVTRTVKEASRGAGEKAAEKQSQQAIRDQRQPEMMGSERSNSADPSDQYTESNGDAELGTQGRSKKMNAEDPASDGYQQPVQRQASFKQSMDLKQPKSRSFSSQRTFLTGTNNADQKPASK

SEQ ID NO: 51732 - protein, 95 aa, Zea mays
  Coding DNA Sequence Number=SeqID_9953
MRNEVVMDQLIPFYKPNKKKKMGPHDTNFLPSKHVQYLCCFIDKIIRECYVANQIHSLRDCGFNMVNHEMLDAGSMCKHYPTATSCLLLRTRPRQ

SEQ ID NO: 51733 - protein, 430 aa, Zea mays
  Coding DNA Sequence Number=SeqID_9954
  Homolog annotation: Hit_ID=Q9LWV8; Match level="QueryCoverage=98%, HitCoverage=59%, E-value=1e-114, Identity=51%"; Hit description =Putative SEU1 protein
MTKPNEFQLPNGLMVLEHTKVVQKSVYEHLHVIHEGHLRIIFTPELKVNNLLQVAQKFQTAATENGPAGVSNNDAQTICNMFVAASRQLAKNLEHHTLNEHGLSKRYVRCLQISEVVNNMKDLIEFTNRNNFGPIEGLKNYPKPNVSELPGQNPRETKQTTAAGGLPNDQNNTEAMGTKQETSARVDNGASVAGAVGNSAPQNAAALNGYQNLPRSSSANQSQLQQGASGAFKGPAATRNGMQMEASRSFCGPNQVQLARFQHPGSFQHPMPQHNNLQGLGLQNNHRGLGVSPQYQQHALNQLIQEVKNAKRHTLPQQPPLDIPNISSGITSGGANTNSAGTGDQGQRMAVNGAATIYTGPTSVINNSTARSNNFKSVSSNLAVAAAPAGGNAATLKAKPFHEFDDLEHLIANELVGSGLLNGNELAWNS

SEQ ID NO: 51734 - protein, 148 aa, Zea mays
  Coding DNA Sequence Number=SeqID_9955
  Gene Ontology: Mol. function=kinase activity
  Homolog annotation: Hit_ID=Q6QP54; Match level="QueryCoverage=57%, HitCoverage=30%, E-value=2e-22, Identity=67%"; Hit description =Putative kinase
  Subcellular localization annotation: CTP_CleavageSite=78; ConfidenceScore=5.65e-01
MTNSASPDPRARTRAQPRKTTNPASPDPRARTQPWPQPTVSASPDPGARARLRPRKTDSTSTSEEPPHRATQGTDRPRRQEAPSLPYPKLTQATGNKTGVPSGSLRQTSYLSGQLKVRRHERQRRGRHVEGGDRHRPEQPYRVVMGVH

SEQ ID NO: 51735 - protein, 72 aa, Zea mays
  Coding DNA Sequence Number=SeqID_9956
  Gene Ontology: Mol. function=small conjugating protein ligase activity; Cellular component=nucleus; Biological process=protein modification process
  Homolog annotation: Hit_ID=Q3HRZ2; Match level="QueryCoverage=71%, HitCoverage=34%, E-value=7e-17, Identity=80%"; Hit description =Ubiquitin-conjugating enzyme-like protein
MERGSKMRLKGWNVAKDLALNISAWKTVVYSLLCDPNPNSPANSEAARLFSENKREYNRKVREIVEQSWTAD

SEQ ID NO: 51736 - protein, 906 aa, Zea mays
  Coding DNA Sequence Number=SeqID_9957
  Gene Ontology: Mol. function=protein-tyrosine kinase activity; Cellular component=integral to membrane; Biological process=protein amino acid phosphorylation
  Homolog annotation: Hit_ID=Q7XBA0; Match level="QueryCoverage=84%, HitCoverage=95%, E-value=0.0, Identity=69%"; Hit description =Transmembrane protein kinase
  Pfam annotation: Domain name=LRR_1; Domain location=204-226; Score =4.4; E_value=42; Accession=PF00560.23; Description=Leucine Rich Repeat
  Pfam annotation: Domain name=LRR_1; Domain location=228-250; Score =11.8; E_value=1.8; Accession=PF00560.23; Description=Leucine Rich Repeat
  Pfam annotation: Domain name=LRR_1; Domain location=252-274; Score =8.1; E_value=8.7; Accession=PF00560.23; Description=Leucine Rich Repeat
  Pfam annotation: Domain name=LRR_1; Domain location=276-298; Score =12.2; E_value=1.5; Accession=PF00560.23; Description=Leucine Rich Repeat
  Pfam annotation: Domain name=LRR_1; Domain location=300-321; Score =11.9; E_value=1.7; Accession=PF00560.23; Description=Leucine Rich Repeat
  Pfam annotation: Domain name=LRR_1; Domain location=323-341; Score =6.8; E_value=15; Accession=PF00560.23; Description=Leucine Rich Repeat
  Pfam annotation: Domain name=LRR_1; Domain location=344-367; Score =4.7; E_value=37; Accession=PF00560.23; Description=Leucine Rich Repeat
  Pfam annotation: Domain name=LRR_1; Domain location=369-391; Score =11.3; E_value=2.2; Accession=PF00560.23; Description=Leucine Rich Repeat
  Pfam annotation: Domain name=LRR_1; Domain location=393-412; Score =8.4; E_value=7.6; Accession=PF00560.23; Description=Leucine Rich Repeat
  Pfam annotation: Domain name=LRR_1; Domain location=417-439; Score =12.8; E_value=1.1; Accession=PF00560.23; Description=Leucine Rich Repeat
  Pfam annotation: Domain name=LRR_1; Domain location=726-748; Score =0.1; E_value=2.8e+02; Accession=PF00560.23; Description=Leucine Rich Repeat
  Pfam annotation: Domain name=Pkinase; Domain location=592-868; Score=- 23.5; E_value=3.7e-07; Accession=PF00069.15; Description=Protein kinase domain
  Pfam annotation: Domain name=Pkinase_Tyr; Domain location=592-866; Score=-46.0; E_value=1.2e-09; Accession=PF07714.7; Description =Protein tyrosine kinase
  Pfam module annotation: Pfam domain module=LRR_1::LRR_1::LRR_1::LRR _1::LRR_1::LRR_1::LRR_1::LRR_1::LRR_1::LRR_1::LRR_1::Pkinase::Pki ase_ Tyr; Domain
  Pfam module annotation: Domain location=:369-391::393-412::417 -439::726-748::592-868::592-866
  Subcellular localization annotation: CTP_CleavageSite=71; ConfidenceScore=5.38e-01
MAPGSHLLVLLPTAVVQLNPLWPLPHAPSQPVMLGDSRVVLVLSPSPSPSQADLCVPSALALAVRRCAAPVAVAVRCVGDYQEAGDSHSLRFQLEVEKRHPLLAVLLPLLLVLAMVPESAQLQSSQTWSLLKIQQLLSYPPVLRTWGNGTDFCYGGDYKTASAFVECYGDSVTQLHIMGPGGAPPLPKTFNLDALFTTLTRLPDLRVLTLTGLGLWGPLPGKVSRLASLEIVNVSGNYLYGQLPEGLSRLGGLQTFIADDNMLSGELPGWLGRLASLAVLSLRNNSLQGAVPESVRDMGSLRSLALACNNLSGQVPDLSALTNLQAVDLSNNSLGPAFPRLGRKVASVVLSGNRFGNGVPAEEVASLYLLERLDVSRNRFVGPLPPALLALPSIEYLSVAGNRFTGLLAANMSCGENLRFVDVSSNLLTGTLPSCLKTLPSSSNSKQVTVLAASNCLSGGAGSTQHPALFCQNQALAVGIVPVQARGGGKAKGKAGAVAGAVAAALAAALLAGVAAFLFARRAAVRRAKARPPRRLVEHAASSMSVGGGGAYPSQLFADARYISQTVKLGALGVPAYRSFSLVELEAATNDFEVSRLMGQDAHGQMYRGTLGNGTAVTIRSLRVRRSQTSQAFNRHVEMISRLRHRHLVSALGHCFECSPDDATVTRLYLVFEYVHNGNLRSRISQGTEGRKLPWVQRISAAIGVAKGIQFLHGGIMPGLFANNLKITNILLDQNLVAKIGSYNIPILAETAKSEGGGGGGGSKYPSDSRVPPNGDKIDIYDFGVILLEVVTGRPITSIHEVEVMKEQLQSALTSESPGRRRALVDQAVSRACSDESARTVMEICLRCLAKEAEQRPSVEDVLWNLQFAAQVQDDWRGDSRSSASEESPLSPSQIPPRRDRETSAW

SEQ ID NO: 51737 - protein, 428 aa, Zea mays
  Coding DNA Sequence Number=SeqID_9958
  Gene Ontology: Mol. function=protein binding; Cellular component =nucleus; Biological process=ubiquitin cycle
  Homolog annotation: Hit_ID=Q8LI88; Match level="QueryCoverage=89%, HitCoverage=88%, E-value=1e-168, Identity=80%"; Hit description =Putative zinc finger POZ domain protein
  Pfam annotation: Domain name=BTB; Domain location=209-338; Score =102.1; E_value=1.6e-27; Accession=PF00651.21; Description=BTBPOZ domain
  Pfam annotation: Domain name=MATH; Domain location=56-185; Score =55.7; E_value=1.5e-13; Accession=PF00917.16; Description=MATH domain
  Pfam module annotation: Pfam domain module=BTB::MATH; Domain location= 209-338::56-185
  Subcellular localization annotation: CTP_CleavageSite=32; ConfidenceScore=5.37e-01
MDEDAGGASPPPVPLAHVPPLQQPTTAAPSHRDMAASPTSSRSVTETVNGSHRFVIQGYSLAKGMGVGKHIASETFSVGGYQWAVYFYPDGKNPEDNSVYVSVFIALASDGTDVRALFELTLLDQSGKGKHKVHSHFDRSMESGPYTLKYRGSMWGYKRFFRRTALELSDYLKDDCLKINCTVGVVVSTIDYSIPHSIHVPDSDIGYDFGSLLDSQEGADVILNVGGERFHAHKLVLAARSHVFGSQFFDDESDGEKSEVNETDELKEFSIDDMEPNVFKAMLHFIYRDTLVDDDELGASSSDGSIFDTPAAKLLAAADKYHLARLKSLCESYLCKGISVASVASTLALADRHHAMELKAVCLKFAAENLSERQRTGFDESVMKDNEGSDRDICALKVVAVAIAVEAVAVSASAGRRGLFGLRPARQV

SEQ ID NO: 51738 - protein, 75 aa, Zea mays
  Coding DNA Sequence Number=SeqID_9959
  Gene Ontology: Mol. function=small conjugating protein ligase activity; Cellular component=nucleus; Biological process=protein modification process
  Homolog annotation: Hit_ID=Q10C79; Match level="QueryCoverage=55%, HitCoverage=41%, E-value=2e-17, Identity=97%"; Hit description =Ubiquitin-conjugating enzyme E2-17 kDa, putative, expressed
MSTPARKRLMRDFRRLQQDPPAGISGAPHDNNIMLWNAVIFGWNRRNSWGVKIFGCHRNRDSSGTKTHLGTSGLF

SEQ ID NO: 51739 - protein, 124 aa, Zea mays
  Coding DNA Sequence Number=SeqID_9960
MARGSTPDQSRQMAVSRSPLNCKIEEKEGLQPAGLKGRGGAAGFEGKGRATEIVQDRIGREGEELQAARERGGRTGWVPDEKKGDVSSWKLAPAAAGRGGMRRQLKEEQQIGPQEGQVYISMMP

SEQ ID NO: 51740 - protein, 125 aa, Zea mays
  Coding DNA Sequence Number=SeqID_9961
MGGPRFPALEGVSCTGAEREGGAMAETEGRQSSLAALLRAAGFLGKMVWAAARHGQQRKENLLVAVAVCVLELGGGRRCAGRRPEVEERVPWGRRGGAELPACCRGAGRKKGCPAAARGRRRKRE

SEQ ID NO: 51741 - protein, 338 aa, Zea mays
  Coding DNA Sequence Number=SeqID_9962
  Homolog annotation: Hit_ID=Q6Z8D3; Match level="QueryCoverage=32%, HitCoverage=25%, E-value=2e-34, Identity=78%"; Hit description =Putative WD-40 repeat protein
  Subcellular localization annotation: CTP_CleavageSite=50; ConfidenceScore=5.51e-01
MPHAPRQPSPPGIPPPSPRPLPSPTRPPPPAARAPAALPPRHALPTEHARAGSRGSYRILPTPEQAGRDLAHAGSGRRGSRPRCAPDAWLLAPTVSRLRGHGSRQHAGGSLPSPVVPQALVRESGEASVGSFRIGSSMLLGRGVMLCVLLFSSLWRLRARAYATISCVRSAALPVAASWLRLRNTHVLLLMVVLFALFLRKLSGRAVLGDAHASVQAIRKAHLILRALTRSPRRRATPPCPGRRRRRRASAPTCHAELEILFIPDRSAMDMDMAHYLLTEPRKDKENVAGMVASPSKEAYRRLLAGKLFNNRTQILAFRNKLPEPENMSITNVASSNL

SEQ ID NO: 51742 - protein, 140 aa, Zea mays
  Coding DNA Sequence Number=SeqID_9963
  Subcellular localization annotation: CTP_CleavageSite=56; ConfidenceScore=5.73e-01
MGRGGLRSTACTFPACTLAAGGRVRGGRARAGRARQRGGPRARSRAGRARRWARSRASARARARRRPREGCGAAAARGVGCGDVGPRARRREGRGRGDVVAEGSGGVEQRAALAEGVGAEGRRARRRGAEASGGRVRVRE

SEQ ID NO: 51743 - protein, 130 aa, Zea mays
  Coding DNA Sequence Number=SeqID_9964
  Homolog annotation: Hit_ID=Q41695; Match level="QueryCoverage=32%, HitCoverage=10%, E-value=1e-09, Identity=66%"; Hit description =Pectinacetylesterase precursor
MGVHGAVAKRPCSRQHLLLLVVAILIGSYFAAAAAAAADEQKSRNRGAGRRSRRRRAAAAVTSPPAPLMVPITILESAVDLGAVCMDGTPPAYHLHPGSGAGNNSWIVNLEVMSYYLQLFYHPLNACTSR

SEQ ID NO: 51744 - protein, 125 aa, Zea mays
  Coding DNA Sequence Number=SeqID_9965
  Gene Ontology: Mol. function=RNA-directed DNA polymerase activity; Cellular component=mitochondrion; Biological process=RNA-dependent DNA replication
  Homolog annotation: Hit_ID=UPI00004C1731; Match level="QueryCoverage =99%, HitCoverage=8%, E-value=2e-49, Identity=76%"; Hit description =UPI00004C1731 related cluster
MILQGLKPRIFNDLNKFGKRWLAELPSVIWSLRTTPSRATGFTPFFLVYGVEAILPIDVEYGSSRLQAYNESNNKVDREDSLDQLDEARDVALLHSAKYQQSLRCYHERRVRPPRFQEGDLVLRL

SEQ ID NO: 51745 - protein, 122 aa, Zea mays
  Coding DNA Sequence Number=SeqID_9966
  Subcellular localization annotation: CTP_CleavageSite=38; ConfidenceScore=5.26e-01
MDNGLKEAYPRGFYNWLPLHYTPRLWSPPLRSSPPPSRSAAASCSNGFTFDPSPPLPCSTNPSTDYGQGHPDGFHVRKTERFAWTPEAEEALENLKKLLSNAPILVPPAEGEPLLLYVAATI

SEQ ID NO: 51746 - protein, 57 aa, Zea mays
  Coding DNA Sequence Number=SeqID_9967
  Homolog annotation: Hit_ID=Q153F8; Match level="QueryCoverage=93%, HitCoverage=15%, E-value=4e-11, Identity=53%"; Hit description =Pectin acetylesterase
MGGGWCNNVRACQFRKASRRGSSDLMEKEIPFSGIMSSSPVDNPGPYAVSRSRHRLI

SEQ ID NO: 51747 - protein, 173 aa, Zea mays
  Coding DNA Sequence Number=SeqID_9968
  Gene Ontology: Cellular component=cellulose and pectin-containing cell wall
  Homolog annotation: Hit_ID=Q153F8; Match level="QueryCoverage=99%, HitCoverage=65%, E-value=1e-33, Identity=57%"; Hit description =Pectin acetylesterase
  Pfam annotation: Domain name=PAE; Domain location=1-159; Score=-13.5; E_value=4.9e-15; Accession=PF03283.4; Description=Pectinacetylesterase
MAAADQVLLAGCSAGGLAVILHCDQFQAFFPRSNNAAAAGGTTTTTTVKCLADAGLFLDAYYLLHCSINISGAWCSIDVSGGRSLRSYYSDIVAMQGVGPNLPPACTARLDTASCFFPQNVIDGVNTPIFLLNAAYDAWQGIAKSVGDWYFGRAQVKAIDCPYPCDGTCRNII

SEQ ID NO: 51748 - protein, 266 aa, Zea mays
  Coding DNA Sequence Number=SeqID_9969
MPYPLRLAVTAACAIILMWVVLVANPTDAALDDICKAKCETPQPAVCLRCTGGVRIEDGKVVTTEVVPCSDGCIPATTRLQCDLACHFGGLLSSSPRTGCVRCPGPVPDPGLPDCAVQAALCRPLSAAERCQECLDACDRHCNSTAAAFCKDRCETRQEVCLACSRRIVDARLLTTVVVPCRDDCVPASSVAECEGACSLFGSLLSNSPTGCARCPEVRFDPLDCEACKSRLIKDCNAREAECVTNACVLDNVCPAPPPPPVVQEP

SEQ ID NO: 51749 - protein, 72 aa, Zea mays
  Coding DNA Sequence Number=SeqID_9970
MSLTHVDPHRRFGWPTDLREPQDPRRQGPSRESIEKSSRFYMSHAGTRDPFQKLYALIADGMVTYRGWSANQ

SEQ ID NO: 51750 - protein, 113 aa, Zea mays
  Coding DNA Sequence Number=SeqID_9971
MGGVANTVVVDTVLSMRKGFLRDVSVNVSDGIGASFVTDIEGRTGLSSKEWTFAGFLGEQCPSGGLPQASSFLPEMGSSEADIASQGWGSLGRDEDLLILMSRPKSGSGEAEF

SEQ ID NO: 51751 - protein, 124 aa, Zea mays
  Coding DNA Sequence Number=SeqID_9972
MNLGEEAVKAWEEAEFDGLESWTILWSISASANPYCRLVMILLGPKFSWMLGGALWMRCSRTEEGWTASRWAMGMWRHDVVLALGMRGADGRRGHTELRCHSRFWDHELRKLWESGKERGKEKH

SEQ ID NO: 51752 - protein, 151 aa, Zea mays
  Coding DNA Sequence Number=SeqID_9973
MDSGSRSSKKSKLKLGPSSSSESKHPEGKGSPTYILVMELVGGLVWLVLLAQRHGELALPIPEEVVPRKLMQKAPGSSFYSHKEEVQEYKGVCAAVVIRGDVSEPYSGMACGMALVLVSEPCSGMRAEARLGSMGMCPSPSMYRGGGVELE

SEQ ID NO: 51753 - protein, 371 aa, Zea mays
  Coding DNA Sequence Number=SeqID_9974
  Gene Ontology: Mol. function=O-methyltransferase activity; Biological process=lignin biosynthetic process
  Homolog annotation: Hit_ID=Q75IK0; Match level="QueryCoverage=92%, HitCoverage=95%, E-value=8e-60, Identity=37%"; Hit description =Putative o-methyltransferase ZRP4
  Pfam annotation: Domain name=Dimerisation; Domain location=45-93; Score=57.3; E_value=5.1e-14; Accession=PF08100.2; Description =Dimerisation domain
  Pfam annotation: Domain name=Methyltransf_2; Domain location=108-348; Score=232.4; E_value=9.5e-67; Accession=PF00891.8; Description=O -methyltransferase
  Pfam module annotation: Pfam domain module=Dimerisation::Methyltransf_ 2; Domain location=45-93::108-348
MAHQDAGVGGKDHRELQAQHTTDTEELLAAHRELWSHALGYVKSMALKCALDLGIPDTIQRYGGGATVGELAAASNLPASSLPFLRRLMRTLTAMRIFAVHRDDDPSDDPADDAAAVVSYQLTATSRLLVNGCRLPHVQHERVDEAAPPPRARHDSPRDGARRTVWESFRANPAIRAWFYDAMDADARLVMHVVLSECPAVFHGLASLVDVGGGHGTAAAAIARAFPHIKCTVMDLPHVVAEAPAGTGLCFLAGDMFDHIPPADGILLKWILHDWDDAKCIKIMERCKEAIGGKERGGKVIIIDTVIGSRPNEEDMIRREAQVLCDLGMMTTSNGAEREEHEWRRIFLAAGFRDYKITDTRGIPSIIEVYP

SEQ ID NO: 51754 - protein, 58 aa, Zea mays
  Coding DNA Sequence Number=SeqID_9975
MTKVNHTGKVYHMRAKRQMAQSLGQIAKFKRRYEQEAEKSKDKFCGFSLRLHKARTKS

SEQ ID NO: 51755 - protein, 108 aa, Zea mays
  Coding DNA Sequence Number=SeqID_9976
MQGSCLTAIAAKSTQGPPYTDHSPTALAPFGIPRSTANIPRPRWKGQDPIAAVHSEINSPHYTAPHSNLDPWSEMNGSEGFFPSTSAAVMWHCCGGTPATNRERSEES

SEQ ID NO: 51756 - protein, 165 aa, Zea mays
  Coding DNA Sequence Number=SeqID_9977
  Subcellular localization annotation: CTP_CleavageSite=33; ConfidenceScore=5.15e-01
MVAARLSSSRWWPAPQQAGKPSLARLRGVVWVAAAAVAAPADAHAGAVGWRSLRCHLSPHGLYCCYGGVTTSFGRLARGVRAGRGGTRDGGAHVLWLLADDGGNIDSVQLCEAAMVVARRSGVGVAALEVAHFFAFDGCFRFSASGMRVKMGLCKVKSKLLHQGL

SEQ ID NO: 51757 - protein, 85 aa, Zea mays
  Coding DNA Sequence Number=SeqID_9978
MPNDGDGGSSKSMGEATLDGLDGIQMLDPNTLRTLRIYLLETLARWDFFGLRFKDMGGSSISRSRAIADAAKPAEQQNERKKKIP

SEQ ID NO: 51758 - protein, 267 aa, Zea mays
  Coding DNA Sequence Number=SeqID_9979
  Gene Ontology: Mol. function=actin binding; Biological process=actin cytoskeleton organization and biogenesis
  Homolog annotation: Hit_ID=Q1SZ88; Match level="QueryCoverage=94%, HitCoverage=14%, E-value=6e-69, Identity=51%"; Hit description=IMP dehydrogenase/GMP reductase
MATTLAGMPRKRPMTSIQLHLHRHTLLFDCCFSTDSMGEDEYQDYSSGIVAQLTNCRIFFPDTSLMASNFWSGDKRSRISDISSEYDMTVMDYPQQYEGCPLLQLEMIHHFLKSCENWLSVEGQHNMLLMHRERGSSPVLEFMLAGLLLYCKIYIGEQRTLEMVYKQARRDFIQQFFPLNPQPSHLRYLHYITRQRGGSEWPPISRPFILDSIVLHIVLWFDADGGCRPYLIVHGQDSSPGNKSAKVLYEMPNAKKHLQRYGQVTVS

SEQ ID NO: 51759 - protein, 535 aa, Zea mays
  Coding DNA Sequence Number=SeqID_9980
  Gene Ontology: Mol. function=ATP-dependent helicase activity; Cellular component=nucleus; Biological process=rRNA processing
  Homolog annotation: Hit_ID=Q5VRY0; Match level="QueryCoverage=80%, HitCoverage=74%, E-value=0.0, Identity=81%"; Hit description =Putative VASA
  Pfam annotation: Domain name=DEAD; Domain location=117-300; Score =191.5; E_value=2.1e-54; Accession=PF00270.19; Description=DEADDEAH box helicase
  Pfam annotation: Domain name=Helicase_C; Domain location=319-405; Score=83.3; E_value=7.5e-22; Accession=PF00271.21; Description =Helicase conserved C-terminal domain
  Pfam module annotation: Pfam domain module=DEAD::Helicase_C; Domain location=117-300::319-405
  Subcellular localization annotation: CTP_CleavageSite=27; ConfidenceScore=5.29e-01
MAGAAAAAAGRCLLLSRPSPLRLRLLHAALSTAAPTLGPTSTPAPPPRHELLLERLRLRHLKDASSPGAPRPTSRSSERSSQQGKGKRVEAAESFEELGLGEEVMSALGEMGISKPTEIQCVGVPAVLAGTSVVLGSHTGSGKTLAYLLPLVQLLRRDEAMLGMSMKPRRPRAVVLCPTRELTEQVYRVAKSISHHARFRSTMVSGGTRLRPQEDSLNMPVDMVVGTPGRILDHIKDGNMVYGDIKYLVLDEADTMFDQGFGPDIRKFLAPLKNRAAKPDDQGFQTVLVTATMTKAVQKLIDEEFEGIVHLRTSSFQKRVSTARHDFIKLSGAENKLEALLQVPAEERVENLNKFRNEEGDCPTLVCTDLAARGLDLDVDHVIMFDFPSNSIDYLHRTGRTARMGAKGKVTSIVAKKDVALATRIEEAMKKNESLEALTTNNVRRPTSSQSVNTKGRPSRLVKTSNALKVVSQKGRRGVSLSSRSSRAPQGYNFNPKALATEEPGKGNKIVSPSESQAGETHSEQRKGLEEQSKT

SEQ ID NO: 51760 - protein, 205 aa, Zea mays
  Coding DNA Sequence Number=SeqID_9981
MAPRARSALYFFLSVSTRFLHWMSRRRNERVNRCGGGDGGDEAGVVNRRRERGWSARGEERRAVGHDDRDAARGGAVQMHGCCLDPRVGRGRFDRDTKPARDYRISDSLAQARASIVRACTVAVTPSELGAPNCTPNPYPFILTVNRRRHGRHDRAHGGVQILLLLLPWSVTPDLAVSRSTRDCISYNVLPFIFLNPTICHIMFL

SEQ ID NO: 51761 - protein, 214 aa, Zea mays
  Coding DNA Sequence Number=SeqID_9982
  Homolog annotation: Hit_ID=Q5ZDR4; Match level="QueryCoverage=22%, HitCoverage=14%, E-value=2e-09, Identity=61%"; Hit description =Putative mitochondrial carrier protein
MAIMTHHDNKQLANRRMRGPWPPPSGHRLPQRRAWQLVEWVLRRCRRCLPHEAEETCHTFPFQNQTSQASSSVPGNNITAMTSLVSCAILETGTDDQVIDNYGKGRPSVMKTTRLLLDDYGWRGFYRGMYTTGIGCFAECLKHSTNPEKHSAKYLPSVALGKVFVECRTRQRELGEQCIGKGFFAEYFLSGTRQRLCQVPDGTQQRKATVIALG

SEQ ID NO: 51762 - protein, 93 aa, Zea mays
  Coding DNA Sequence Number=SeqID_9983
MAHQSYSGPLETFSPPFSLLYPWIHGLFPAIEFAVVPSPSLLNSGDPRATLARASLNSGYLTATERSGATRSRLFPPGLISSIRFRSNGSDHG

SEQ ID NO: 51763 - protein, 448 aa, Zea mays
  Coding DNA Sequence Number=SeqID_9984
  Gene Ontology: Mol. function=hydrolase activity, hydrolyzing O -glycosyl compounds; Cellular component=anchored to membrane; Biological process=carbohydrate metabolic process
  Homolog annotation: Hit_ID=Q5NKS6; Match level="QueryCoverage=67%, HitCoverage=76%, E-value=1e-135, Identity=76%"; Hit description =Putative beta-1,3-glucanase
  Pfam annotation: Domain name=Glyco_hydro_17; Domain location=30-324; Score=287.4; E_value=2.8e-83; Accession=PF00332.9; Description =Glycosyl hydrolases family 17
MALRLTLAAVALAVLAAAAASGASAPASALGINYGQVADNLPPPQAALVLLRALNATRVKLYDADARVLRAFAGSGVDFTVGVPDRLVPRLAADRGAAAAWVRGSLLPHLPATSITAVTVGNEVLSGTDAAMHRALLPAMEALHAAVAASNLTSRVAVTTAHSLAVLSSSFPPSAAAFRREVVPYMAPLLGFLAPHGRAVPGGVADAATGLRYDNMLHAQVDAVRAAICAANYGRALEIRVSETGWPSQGDDDEAGATPENAARYNGNLMRLVAQGKGTPAAPDEPLQVYVFALFNEDQKPGPASERHYGLFKPDGTPAYNVGVKAPTITVPKGSGSGNGTGTGGLVVAQGPGGADGVGPGTGCLRPPVFKITGEEQTAAAAEPGGGGCRPGHGVRALVVWDWERTDDERQSMKGQDRPATIVGASATNNANPCMQVVRKGCVLHASL

SEQ ID NO: 51764 - protein, 155 aa, Zea mays
  Coding DNA Sequence Number=SeqID_9985
  Subcellular localization annotation: CTP_CleavageSite=37; ConfidenceScore=5.30e-01
MSGAPEDSNSNSSPSGNSRGNSAIIHQTVRCTSDSVRCSKEEQPQELASFGNSFQLLRYNSPDCPVYLRDNGYLQRIYCAPARAEVRHAHAGAPDTLQYMSELAKKEMETGDKPATSHGKASSEESRNKEKRKEKKKEKKTSSHKSHRSGDNESS

SEQ ID NO: 51765 - protein, 139 aa, Zea mays
  Coding DNA Sequence Number=SeqID_9986
MASVVAPPPPYQTESDLRRAEAYSKLLHTAKSILDCLQKPPAATRSRGTSAIHADIPLGADRLFRTAWFVAHFVTHRVQVVECGVEGDDEGGHERGVVLAAPQVEHDYSMHLNPLRTKVHQAHHDLVIDMLESAMKDLL

SEQ ID NO: 51766 - protein, 367 aa, Zea mays
  Coding DNA Sequence Number=SeqID_9987
  Gene Ontology: Mol. function=DNA binding; Cellular component=nucleus; Biological process=regulation of transcription
  Homolog annotation: Hit_ID=Q5NKS7; Match level="QueryCoverage=99%, HitCoverage=99%, E-value=1e-113, Identity=56%"; Hit description =Putative NAM (No apical meristem) protein
  Pfam annotation: Domain name=NAM; Domain location=11-145; Score =288.4; E_value=1.4e-83; Accession=PF02365.6; Description=No apical meristem (NAM) protein
MSISVNGQSVVPPGFRFHPTEEELLTYYLKKKVASERIDLDVIRDVDLNKLEPWDIQDKCRVGSSSGPQNDWYFFSHKDRKYPTGTRTNRATAAGFWKATGRDKAIYAAGGAARRIGMRKTLVFYQGRAPHGHKSDWIMHEYRLDAADADHHHPCCYPSPPPLPTAIVRGAAGPGDQVPQEQEGWVICRVFKKKNLVHHGAAQSSGGGGTAAAASKMESSPTSTTIIGDHASDDALDHILQYMGGGDTKPALLNHNQHLAAAADATTTTTAACPAAATSAGLYGNNKFMKLPPLEHAGGWLPPSPGPCEYGASGIADWDALDRLAAYELNGLSDASKNMAAFFDGDLWSMARSVSALHAADLAMNNA

SEQ ID NO: 51767 - protein, 124 aa, Zea mays
  Coding DNA Sequence Number=SeqID_9988
MGTRPTRTIRRKAEKWRLKRHAAALKRRLNRHTDVIKRKATEASSSTLVAIIVHQPTSVLDLLEDDSSHGSTEANSDADEALERACFMATPSRNDNGRGDKVSPNPEEEYKRQACILAREASLC

SEQ ID NO: 51768 - protein, 62 aa, Zea mays
  Coding DNA Sequence Number=SeqID_9989
MVLFLILKNDMRCVAFANQKLLGIHLTKKELSRFRPIKGVNGTHTKQEEIGTPRGWRSRHKK

SEQ ID NO: 51769 - protein, 121 aa, Zea mays
  Coding DNA Sequence Number=SeqID_9990
MKSILAPMLPLWREPEATEGLHDGVEIVGWKSLCFWGPGHLPLVANDGAKAPGTDGRSKGPNNIVVGHPELERSVNVTDITFHYVDDGYTMSRLLTIFATTLRQSNNSQDLALALSSTTPL

SEQ ID NO: 51770 - protein, 182 aa, Zea mays
  Coding DNA Sequence Number=SeqID_9991
  Subcellular localization annotation: CTP_CleavageSite=90; ConfidenceScore=5.63e-01
MPQRPHTDGKRGGQRRGTRPTRPPPLPNAPSPSRPPAPPPPPTTSHLSSSHSQRHQPQRPVVASSSGIPSSRVAPHRIRPGRPRGPCPASAAALREHHHLRHTHLRRGQCPTALHVPPPSRRAEKTPFAVTSSQAGTSTTNCATSAAATRSAATRRRVTLAGAAGGSARPFSPSAVSQMAGW

SEQ ID NO: 51771 - protein, 90 aa, Zea mays
  Coding DNA Sequence Number=SeqID_9992
MGLPLEQWRGGEADGRKVVDGDATAAGCRTPDAANGQAAGRRAGGGDCPAAPRKRRAAPAAAGVVAQQQQRRRDYYTGDDVEAFFAAHNL

SEQ ID NO: 51772 - protein, 912 aa, Zea mays
  Coding DNA Sequence Number=SeqID_9993
  Gene Ontology: Mol. function=protein phosphatase type 2C activity
  Homolog annotation: Hit_ID=Q1S8C9; Match level="QueryCoverage=98%, HitCoverage=91%, E-value=1e-65, Identity=38%"; Hit description =Protein phosphatase 2C, putative
  Pfam annotation: Domain name=PP2C; Domain location=587-912; Score =5.8; E_value=2.8e-06; Accession=PF00481.12; Description=Protein phosphatase 2C
MGNSTSRVVGCFAPPDKAGGVDLDFLEPLDEGLGHSFCYVRPGGGAAADSPAITPSNSERYTLDSSVMDSETRSGSFRQEPADDLAAAAAAAAGLQRPCRSFGETTFRTISGASVSANASSARTGNLAVSLAGDVQEPAAAFESTASFAAVPLQPVPRGSGALNTFLSGPLERGFASGPLDKGSGFMSGPLDKGAFMSGPIDGGSRSNFSAPLSYGGRKARLGRLVHRISRPMKTALSRTFSRSSQNPGWVQKFLSHPMTQLPWARDAKSRSEGSQNGLEPGIPEHEYNVTRNLQWAHGKAGEDRVHVVLSEEQGWLFIGIYDGFSGPDAPDFLMSTLYKAIDKELEGLLWVYEDSSERSDHVSTHEEGESVAASVDAPHGDSDQFQSDSGKQEQVGNFGKQNISPGKGCDESVLQVQPNCTSSEEKNLATQGSTSEKLARDEIVEEMAGADLGNDLQSRESQNSNRGLSDTDLNNNCSCATETTSYCDQHAKFLKENRKSKRLFELLEMELLEDYNKRLSKASPKERKIPNLHVTQAGTAEVFSRNTAEVSRCSLAATGECFDDSEDLGSSRHADSVLGIDIKECTGCSISTSSSGHKQVTRRFVFGSKLRKMYKKQKMLQKKFFPWNYDWHRDQPHVDESVIKSSEVTRRCKSGPVEHDAVLRAMSRALETTEEAYMDIVENELDRHPELALMGSCVLVMLMKDQDVYVMNLGDSRAILAQDNDQYNSSSFSKGDLRHRNRSRESLVRVELDRISEESPMHNPNSHLNSNTKAKELSICRLRMRAVQLSTDHSTSIEEEVLRIKVEHPDDPHSVFNDRVKGQLKVTRAFGAGFLKKPKFNEALLEMFSIDYVGTSPYISCNPSVLHHRLCANDRFLVLSSDGLYQYFSNDELLELMDIIHWKLSGNEKGS

SEQ ID NO: 51773 - protein, 111 aa, Zea mays
  Coding DNA Sequence Number=SeqID_9994
  Homolog annotation: Hit_ID=Q6QNH2; Match level="QueryCoverage=29%, HitCoverage=3%, E-value=1e-09, Identity=87%"; Hit description =Minichromosomal maintenance factor
  Subcellular localization annotation: CTP_CleavageSite=38; ConfidenceScore=5.23e-01
MAMDDLVGASSSSSMAAASSSSYGCVTITKDDIKVFVMVPSKSSTEFPNAAWWMNAEGIDAMGHGTHLNYVLFFFPDCSDYRRMDEHDQYESVGLDDSLEDERNLDETMAD

SEQ ID NO: 51774 - protein, 77 aa, Zea mays
  Coding DNA Sequence Number=SeqID_9995
MAPRGSYPRARLRLRVSGNGWLRWPALGWLGRVAQSSPELRVVPGQRRDEYNKVSGLDNAKQIWIPSKSLKRVMMPP

SEQ ID NO: 51775 - protein, 157 aa, Zea mays
  Coding DNA Sequence Number=SeqID_9996
MALKGGDREGEGQGFLTLEQMTGSTEMVVVAARVARASCVATARRANDKRRNADADSEHHGRAMGHWEADDVEAVLDGGGESRDRCFERATVVEAPLIAAGLGGIMGEEVTEKEMRARATCRRPSERTQVAALSTTARAQGAVQGQSNDAIRGKLDP

SEQ ID NO: 51776 - protein, 155 aa, Zea mays
  Coding DNA Sequence Number=SeqID_9997
  Gene Ontology: Mol. function=DNA binding; Cellular component=nucleus; Biological process=DNA integration
  Homolog annotation: Hit_ID=O24587; Match level="QueryCoverage=92%, HitCoverage=14%, E-value=3e-59, Identity=71%"; Hit description=Pol
  Pfam annotation: Domain name=rve; Domain location=18-155; Score=98.3; E_value=2.2e-26; Accession=PF00665.16; Description=Integrase core domain
MSGRKAGRTNHPSKNGRKRSRPLELLHMDLFGPIAYLSIGGSKYGLVNADDFSHFTWRFLRRAQNEFELKVKKIRSDNGSEFKNLQVEEYLEEEGIKHEFFAPYTPQQNGVIERKNRMLIDMAWTMLGEYKTPKRFWSEAMNAACYGGTARIIPA

SEQ ID NO: 51777 - protein, 156 aa, Zea mays
  Coding DNA Sequence Number=SeqID_9998
MAGARMGANHAGGGAHTPAAKSSDAGGVASPEKQRCGTACQHTTLRVYHCYCATSGEERGRRRSDIGQQMALKGGDREGEGQGFLTLERMTGSTEMVAVAARVARASCVATARRANDKRRNADADSEHHGRAMGHWEADDVEAVLDGGGGGDCYAL

SEQ ID NO: 51778 - protein, 624 aa, Zea mays
  Coding DNA Sequence Number=SeqID_9999
  Gene Ontology: Mol. function=protein serine/threonine kinase activity; Cellular component=spindle; Biological process=protein amino acid phosphorylation
  Homolog annotation: Hit_ID=Q6TQF8; Match level="QueryCoverage=75%, HitCoverage=96%, E-value=0.0, Identity=93%"; Hit description =Ribosomal protein S6 kinase
  Pfam annotation: Domain name=Pkinase; Domain location=290-545; Score =293.7; E_value=3.4e-85; Accession=PF00069.15; Description=Protein kinase domain
  Pfam annotation: Domain name=Pkinase_C; Domain location=565-609; Score=42.8; E_value=1.2e-09; Accession=PF00433.14; Description =Protein kinase C terminal domain
  Pfam annotation: Domain name=Pkinase_Tyr; Domain location=290-524; Score=9.9; E_value=4.5e-13; Accession=PF07714.7; Description=Protein tyrosine kinase
  Pfam module annotation: Pfam domain module=Pkinase::Pkinase _C::Pkinase_Tyr; Domain location=290-545::565-609::290-524
  Subcellular localization annotation: CTP_CleavageSite=65; ConfidenceScore=5.12e-01
MGMKIDPNPYPNGALAHCLTLTGGPSSQRYKLDGLTRKRRGVLPNVRRFGSHTPTAPPFRFPLPPSFLLPGTPHSPPPLPTNQPTRAPPKEKSWGRRPQVGAERAPISRRREETAHRVASDSAGEARTIGSISLDLCFMSSGKALASNISYSTGPNHCPVNILLPTGPPDVVSSDNVEYDFSDVFGSTPVQTPTNLCGFGPESPAPTVESNEEFYSDPVVIINRSHSLVGPTSLVSRSLRLSKLSLGKNEGSSELVKCLSEEKEGDQGQLSDEDLGNAMTEDEGIGLDDLEILKLVGQGAFGKVFQVRKKNTSEIYAMKVMRKDRILEKNHSEYMKAEREILTKVDHPFIVQLRYSFQTKYRLYLVLDFINGGHLFFQLYKQGLFREELARIYTAEIVSAVAHLHANGIMHRDLKPENILLDADGHAMLTDFGLAKEFCENTRSNSMCGTLEYMAPEIVLGRGHDKAADWWSVGILLFEMLTGKPPFVGNREKVQQKIIKDKLKLPSFLSSEAHSLLRGVSFYIHFISAEACPGGSNEIKNHKWFKPINWRKLEARQIQPSFRPNVAGLTCIANFDECWTKTPVLDSPVSTPAGGGHSNFAGFTYVRPAPILEEVNASGSRLKD

SEQ ID NO: 51779 - protein, 739 aa, Zea mays
  Coding DNA Sequence Number=SeqID_10000
  Gene Ontology: Mol. function=protein kinase activity; Cellular component=integral to membrane; Biological process=protein amino acid phosphorylation
  Homolog annotation: Hit_ID=Q7XHW7; Match level="QueryCoverage=68%, HitCoverage=78%, E-value=0.0, Identity=70%"; Hit description =Putative receptor-like protein kinase
  Pfam annotation: Domain name=LRR_1; Domain location=20-42; Score =16.7; E_value=0.081; Accession=PF00560.23; Description=Leucine Rich Repeat
  Pfam annotation: Domain name=LRR_1; Domain location=44-65; Score =14.5; E_value=0.39; Accession=PF00560.23; Description=Leucine Rich Repeat
  Pfam annotation: Domain name=LRR_1; Domain location=66-88; Score =16.9; E_value=0.072; Accession=PF00560.23; Description=Leucine Rich Repeat
  Pfam annotation: Domain name=Pkinase; Domain location=216-486; Score =94.7; E_value=2.7e-25; Accession=PF00069.15; Description=Protein kinase domain
  Pfam annotation: Domain name=Pkinase_Tyr; Domain location=215-486; Score=40.2; E_value=6.1e-15; Accession=PF07714.7; Description =Protein tyrosine kinase
  Pfam annotation: Domain name=eIF-5_eIF-2B; Domain location=652-739; Score=102.4; E_value=1.3e-27; Accession=PF01873.8; Description =Domain found in IF2BIF5
  Pfam module annotation: Pfam domain module=LRR_1::LRR_1::LRR _1::Pkinase::Pkinase_Tyr::eIF-5_eIF-2B; Domain location=20-42::44 -65::66-88::216-486::215-486::652-739
METSSTGINIPQFVHGMAPNLSVIDFSYNSFTGEVPASLQNLTQLTVLNLQDNSFSGSIPDLKLHSLKLLNLSNNELKGSIPRSLQKFPKGSFSRNPGLCGLPLAECSHPSPARSPESSPSPQSPPLTHHDKKLGTGFIVAVAVGGFALLTLIVVVCFSKRKGKDEIDVESKGKGTATRSEKPKQEFSSGGQIAEKNKLVFLEGCTYSFDLEDLLRASAEVLGKGSYGTAYKAVLEDGTVVVVKRLKDVVAGKREFEQQMELIERLGKHANLLPLRAYYYSKDEKLIVYDYIDTGSVSAMLHGIRGVTAKTPLDWNSRMKIILGTAYGIAHIHSEGGAKLTHGNVKSTNVLVDQDHNPSVSDYGLSALTSVPVNASRVVVGYRAPEIVENRKITQKSDVYSFGVLLMEMLTGKAPLQTQGNDDVVDLPRWVHSVVREEWTAEVFDVELMKHQNIEEELVQMLQIAMVCTAKSPDRRPTMEEVIRMIEGLRQSTSESRASSDEKSKESNPPSVDRSESRGVSAVKATASAMADEEHSERREEASELAPFDPTKKKKKKKVVIQEPSDEVDKLAEKTETLAVAEPAELNFTGMKKKKKKPVDLDSTLDELGDGEDTQDDQAVEEQGEGIVLGSVPTYPWEGTDRDYKYEELLDRVFNILRENNPDLAGDRRRTVMRPPQVLREGTKKTVFVNFMDLCKTMHRQLEHVMMFLLAEMGTSGSLDGQQRLVIKGRFAPKNSKQS

SEQ ID NO: 51780 - protein, 71 aa, Zea mays
  Coding DNA Sequence Number=SeqID_10001
MASSGGHMTVSHARNLCLLLVTDGGTSSLTLLLKGKCAPWAISKYFGDRMSTQVLQCESMPMDEQSANLEQ

SEQ ID NO: 51781 - protein, 176 aa, Zea mays
  Coding DNA Sequence Number=SeqID_10002
ADQGCRATGRSRRKPPVVGVHHQLLGQNTCRDPSTIPLVIPDDTAPPPPDCANLISFGGSTVVGGGASPSANTTTTVPTTMLSRFGYSSSLPTQTQAQAQLAAAVVGPPGTTMTASWATVGSAPAEYWPGGTTSDMACGPAGTASFPSSPSSLGFMTGSPFGNAGDDDLFLFGFDP

SEQ ID NO: 51782 - protein, 71 aa, Zea mays
  Coding DNA Sequence Number=SeqID_10003
  Subcellular localization annotation: CTP_CleavageSite=48; ConfidenceScore=5.06e-01
MALPASSSGLFRFVSPRSRPQSTDIVAAASWGVFAGTAGLYLVQGCVVCDWIRVLRVNFVVPMDLRMLDRS

SEQ ID NO: 51783 - protein, 111 aa, Zea mays
  Coding DNA Sequence Number=SeqID_10004
MDDEARRVRVAGGLGVTVKLPGPEHAYACVVRCRHPPGAPQTDSFHAGRTPCPCVVEKKYPCPVVDTLSLPNLNRGNISINVDISTPVSTLKNGEEQVSSEEDYYNEFYEI

SEQ ID NO: 51784 - protein, 622 aa, Zea mays
  Coding DNA Sequence Number=SeqID_10005
  Gene Ontology: Mol. function=calcium ion binding; Cellular component =membrane; Biological process=protein transport
  Homolog annotation: Hit_ID=Q7XHX6; Match level="QueryCoverage=95%, HitCoverage=96%, E-value=0.0, Identity=78%"; Hit description =Putative vacuolar targeting receptor
  Pfam annotation: Domain name=EGF_CA; Domain location=506-548; Score =3.6; E_value=0.071; Accession=PF07645.6; Description=Calcium binding EGF domain
  Pfam annotation: Domain name=PA; Domain location=58-168; Score=89.2; E_value=1.3e-23; Accession=PF02225.12; Description=PA domain
  Pfam module annotation: Pfam domain module=EGF_CA::PA; Domain location=506-548::58-168
MASTAARRLLLPLLLVALIAAHRAAARFVVEKNSLRVTSPAVLRGVYECAIGNFGMPQYGGTMHGVVVYPKADAKACRPFADSGLSFKPRSGGLPVFLLVDRGDCYFTTKGWNAQNAGAAAVLVADDRVEPLITMDSPESSGTEHIENITIPSALVTKRFGEDLRKALQSGDMVNVLLDWRESLPHPDERVEYELWTNSNDECGAKCDMQMSFVRSFRGIAQALEKRGYTQFTPHYITWYCPEAFVLSKQCRSQCINHGRYCAPDPEQDFSTGYDGRDVVLQNLVQICVFRVANGTRRPWMWWDYVHDFAVRCPMKEKKYTRLDIEKINKCVGDPEADKENPVLKAEQDAQIGHGSRGDVTILPTLVVNNRQYRGKLEKTSVLKAVCSGFEETTEPDVCLREDIETNECLENNGGCWLDKATNVSACKDTFRGRVCECPIVNGVKFIGDGYNHCEASGLGRCQINNGGCWNETRNGKSVSACSNQEAKGCKCPAGFKGDGANSCEDVDECKEKLFCQCKDCACENTWGSYECSCGGGNSLYIREHDTCISKHSSSTPSWGFLWVVFLGLALAGAGAYAVYKYRLRSYMDSEIRAIMAQYMPLESQDMPSQQHHLVPVDRADV

SEQ ID NO: 51785 - protein, 824 aa, Zea mays
  Coding DNA Sequence Number=SeqID_10006
  Homolog annotation: Hit_ID=Q10LU7; Match level="QueryCoverage=41%, HitCoverage=54%, E-value=2e-54, Identity=40%"; Hit description =Expressed protein
  Subcellular localization annotation: CTP_CleavageSite=28; ConfidenceScore=5.06e-01
MASPSAPPPLFIFYCSPGAGPGLHPRIRGGGGAAAQRTRRAHPVSPLAIHSAAQTHRESEPEEGGVLESVQGAVGDDGRRSTRATYEGKGKQRVRRVRCPRCHSVLEEPSAPVYQCGGCGTSLRAKNRTGTGTGSTGDAAGASPARSWLPPQSRHLDASDVASTSRSSTPTPPRVASTSRSGTPTPPDVGTSWHRDTDATGTRHGSGDLALVSAGTRGSGDVASTSSTPVATARSRRRQGTDATSRGSGDVASTSSTPDTTARIRRQDTDATTRGSGDVASTSSTPDASADTTRRGESGGPVPARNRVPEQAAAALIEKRGREQSAAGQEVRDDSEGRGTRDASGAESGVGGVGFSGGNRDATPELQDDTEKGMKRHDESNDAARKERRGEAAEQPRYDHDRRQELAPKSSAQPAAAQLAREDEAATAGEKAPSPSRHEVQEEHLRPLRKKILKTVDELKGDLSELFSKSPELNAPRARPPRLPRQEAYVSHAVAGAASGLPARARHVASAAEGHRGSVARAAKPRPAAAPPRGLPSRRYRQCRAHPCCHDVDPRPCHHGHGCCGHHGKPECSSCRGYCCRPRALEPSAPRKPPAAKEPKRRLPPRNHCRPVLKGAPFIVCSSCFKLVQVPADFAVSTRMVRRMRCGSCSTVLSYSYRDPARKKAYQDSVNRCSTDGSELHGGTGDQRSDPFAPFIDGFGLSSYSTEDERRLPVSRNTSFDTLDGTKGVGRLHRLMGYGSASELLRHSPDLYESFSERTTPDVRQHDTKGKGVCIDDDDYDYDLDDTDDEDIGALKRSARKGSGWTLPWIPGKRQGDSGAIRIK

SEQ ID NO: 51786 - protein, 241 aa, Zea mays
  Coding DNA Sequence Number=SeqID_10007
  Gene Ontology: Mol. function=nucleic acid binding; Cellular component= nucleosome; Biological process=nucleosome assembly
  Homolog annotation: Hit_ID=Q7XJP0; Match level="QueryCoverage=98%, HitCoverage=13%, E-value=3e-65, Identity=52%"; Hit description =SNF2/SWI2 family global transcription factor
  Pfam annotation: Domain name=SNF2_N; Domain location=16-233; Score= -99.7; E_value=0.0088; Accession=PF00176.13; Description=SNF2 family N-terminal domain
MKSGFRRKKKPRCSIVETEDKYICALCLELIEATQTNILSHATLIVCPAPILAQWHSEITRHTRPGSLKVCIYEGARNLDPSTIQKNDMTEIITADVVLTTYDVLKEDLSHDFDRHDGDRRFLRFQKRQVMFSFHFSQRRYPVIPTVLTRIHWWRLCLDEAQMVESGRTSVTEMALRLNAQHRWCITGTPIQRKLDDLFGLLRFLRTNPFDTYRWWVDIIRDPYEAVSDRSCQWPHNRFAL

SEQ ID NO: 51787 - protein, 922 aa, Zea mays
  Coding DNA Sequence Number=SeqID_10008
  Gene Ontology: Mol. function=nucleic acid binding; Cellular component= nucleosome; Biological process=nucleosome assembly
  Homolog annotation: Hit_ID=Q7XJP0; Match level="QueryCoverage=91%, HitCoverage=51%, E-value=1e-163, Identity=41%"; Hit description =SNF2/SWI2 family global transcription factor
  Pfam annotation: Domain name=Helicase_C; Domain location=673-764; Score=22.5; E_value=0.00012; Accession=PF00271.21; Description =Helicase conserved C-terminal domain
  Pfam annotation: Domain name=TPR_1; Domain location=33-66; Score =15.8; E_value=0.069; Accession=PF00515.18; Description =Tetratricopeptide repeat
  Pfam annotation: Domain name=TPR_2; Domain location=33-66; Score =18.3; E_value=0.028; Accession=PF07719.7; Description=Tetratricopepti de repeat
  Pfam module annotation: Pfam domain module=Helicase_C::TPR_1::TPR_2; Domain location=673-764::33-66::33-66
MDEILQCCQLYVCIQVLIGKAKIEGEEELRKIVVALNGLAGLAVIEQRNQEAISLYKEALALAHENINDFRVDPLLNLHINYNLAELLRISSEYLQECPLKNPAFEVAISRKRKEIDTVETNVLSVKRNKICENSVLSLTANGLETSEDKNTIGQTCMTRDVDVENVTGCHSSFECFADDCLRKTCNTITEKYLSTFTSRLVVAQKDFNASFTEVLNITKELQSEYMNWWLYALDCIEENNISADDLIKKIDNSSSKSTTGLGSWGISSRVKSIAGLKYAIQADIDSLQSSRQHLMDRLLEVDKTMANPRDEDIEGQRYCPNCYDGTGSLCIQCELDELFQRYESRLFLVKKSNNGSVIDSVEEAHDLLRRKYELNHFFRNRKSKEGPEPDYDNNNPRSARENIQVYRHPSRTETALRVIWNHSKTVLGKQYSTMAKKHLLLFEAMRKEFPQARFLSIAQTQLLRAHDEIKMSISRLQLKEKEDDPSAANIVTREELIPYNVQFTSEKFMSLSSLARVRGQLRYLKGLAVCNKKTHNQHDESLAKAGDAVDTATSCSATGQTVSDFRNEPCPICQEKNKLQHNSESVNNGLCAPHAASEQILRTLLFVVEKPWDKHEKSIEDLAESTISVQGSYGTKFEAVTRRILRITSTDGTAKVLVFSSWNDVLDVLEHSLAANNISYVRMKGGRKSQAALSQFKGQESNINVDKVNRAACKMQPVQVLLMLIQHGANGLNLLEAQHVILVEPLLNPAAEAQAISRIHRVGQDKSTFVHRFIVKKTIEESIYKLNRSRAVCSTINRKSKNFKDEPVLTLKDVESLFPMAGPDEPLEQADQNYGDSLRSLPPSVAAGCAGWSVRKMQQGFLIASASGPLLCQARRRASAHDIRVRVHEQSMAMTAGRRHHHVLVEVHSTIFSSLPITILL

SEQ ID NO: 51788 - protein, 149 aa, Zea mays
  Coding DNA Sequence Number=SeqID_10009
MASSAGGGLRSPAATAAPRVVMDSLIEVREGATRLQTMLLEESPTPSIAAAAAAAGATSEVRQTLDGMMSSLSSAMSALDTTGGGGGGQGQQGRRRKRGGAAAARSGPLRRSSNRRRVANCTIPGTKVRGTSALSLGTVQIWETSQLAA

SEQ ID NO: 51789 - protein, 269 aa, Zea mays
  Coding DNA Sequence Number=SeqID_10010
  Gene Ontology: Mol. function=acid phosphatase activity; Cellular component=intracellular; Biological process=translation
  Homolog annotation: Hit_ID=Q7XHW6; Match level="QueryCoverage=83%, HitCoverage=95%, E-value=6e-70, Identity=64%"; Hit description =Putative syringolide-induced protein
  Pfam annotation: Domain name=Acid_phosphat_B; Domain location=42-260; Score=-8.1; E_value=8.5e-08; Accession=PF03767.5; Description=HAD superfamily, subfamily IIIB (Acid
MTTTTSARLRPLAVGVALFVFLPWLSYVLEAAEEGRAAAPWFWPPQIGGDDPYYYCLSWRLMVEAGNAKGWRAVPAQCVGYVRVYMAWGQYHRDVGAVAELAAAGADGLIDAWVLDVDDTCLSNQPYYQVKQFGAYDPVAFRAWASWATCPGDTCDAMAVPDAERQRVQGVPRDWEGRGDPGLKHGRQSRRRRLLRKRGVPWAERGGVQVGGAEEAGGGGGVPDPGQRGRPVERPAGRMRRGPRLQGAQPHVPGPMIDHLLSSYSLRFF

SEQ ID NO: 51790 - protein, 135 aa, Zea mays
  Coding DNA Sequence Number=SeqID_10011
MAPNDVGRSFVGVIEDEAMLGRGRSLPEAMTEPALGLIVVQETFKGMSSYGICGEQVAEAELERGGVCSEAEVRALNAHVSCNLWLMLGSRLSFLSKTGSGEAETTVPWRGYLRRDKDFPEYIPGPRAGSGKAEL

SEQ ID NO: 51791 - protein, 44 aa, Zea mays
  Coding DNA Sequence Number=SeqID_10012
MGVTHSSQTGLKERGGFYRISSRVKGDNGQGYERKDEGIRVPVV

SEQ ID NO: 51792 - protein, 104 aa, Zea mays
  Coding DNA Sequence Number=SeqID_10013
MVGPRALAAGRQPGIRVPPWTLPPDHLWGLAASVDGRIADSLPGTILHGVVLRAGLRSGGRRVEKGRGPSRPLLPAISAPFRLLPADKRHGVTGRRQVAEQPRD

SEQ ID NO: 51793 - protein, 174 aa, Zea mays
  Coding DNA Sequence Number=SeqID_10014
MKEDEEMMCRCRIGERGRGRLVSWSSGRVSREQQGVRRLQERAWGEVEASALAGGPQAAARRARLGERGGRDERERLGRRPLRRATRAGAPRDLGAWTRRGAGTSSTGSGRVPGASKEAGRAVAWARMASRAERRRLGRTRGEGRRRRGWGPLASERRQEWEARGRSAGPNGPV

SEQ ID NO: 51794 - protein, 300 aa, Zea mays
  Coding DNA Sequence Number=SeqID_10015
  Homolog annotation: Hit_ID=Q6EPW3; Match level="QueryCoverage=92%, HitCoverage=92%, E-value=3e-30, Identity=62%"; Hit description=F-box protein-like
MVTTTIEDLHGDVLGCALRRLDGRSLAAASCATVALRALATDPETWRALCVAEWPSLALALAAQRRLLEAVAPQRLFADAHPLPSADTGGTGDPDPEPVPAGRAGLRGGRLLQGRPPAVPHDGDARVLTAVERKRPASAARVPLAGGARAELNGRGPRPAAARSTSPARRPRGRWPGTGTRARRWRGSPWCWEGASSRPPSPCSEGADGHVSEVSLAVEDADGAAVSGEGTLRLLAAAMEAPRKGGAREPEEARRRYLDFVKRKKGRKESKARREALVDLCCSAASAVVVLTCLAAVALR

SEQ ID NO: 51795 - protein, 567 aa, Zea mays
  Coding DNA Sequence Number=SeqID_10016
  Homolog annotation: Hit_ID=UPI00005A5C77; Match level="QueryCoverage =46%, HitCoverage=43%, E-value=4e-42, Identity=36%"; Hit description =PREDICTED: similar to CG6091-PA, isoform A isoform 5
  Pfam annotation: Domain name=OTU; Domain location=243-384; Score =111.4; E_value=2.7e-30; Accession=PF02338.9; Description=OTU-like cysteine protease
MTRIFVQRGTAGSSSSSGRSDTQPVQPAAAAREEELPLQPQPQLPELLAIDDTTDNLNEGSENISNKPLRTDDTISESSSSAEERAAREKPLKDDSNVINPTFLSRGPVGIQIPDQIEHENSVLSVTGSSQMAGAASHPPPPPAPPPKPLLGNNGLRRMGPGSSNSVRIGSSRRPVAWPLVAARTSASGSRPSSPRSLVDGEGYNSADEQGPCYALSYDDSERERMFDHDLRRVKGLEIRKMAEDGNCLFRAVADQVYGDAEAYDMARQMCVDYMVTRDIQGDIPWYMFLADDVVLVDESWIGERERDHFSQFITEIESFTLYCKRKRRDKVYGNNVEIQAFAEMYNRPIHIYSYSTEPINIFQGSYNTDVPPIRLSYHHGNHYNSVVDPRRQTVGAGLGFSSLRGTNNVDRDQVKAAIKAQQDQQIENALLAEGRFYSDLELTEREIERMVMESSRSEYLAKEKKLNIRESSTSRAEPSSSAAISGSSRSVAGADRGKEDYFVLPDTALTRSMQLLLAMGFSYIQVMEAYSIFGEDVDSMVCYLLETGGTGASAGGSNRRKGKAAE

SEQ ID NO: 51796 - protein, 556 aa, Zea mays
  Coding DNA Sequence Number=SeqID_10017
  Homolog annotation: Hit_ID=Q10SR6; Match level="QueryCoverage=52%, HitCoverage=75%, E-value=2e-12, Identity=27%"; Hit description=F-box domain containing protein, expressed
  Pfam annotation: Domain name=DUF295; Domain location=261-311; Score =48.2; E_value=2.9e-11; Accession=PF03478.8; Description=Protein of unknown function (DUF295)
  Pfam annotation: Domain name=F-box; Domain location=2-53; Score=17.6; E_value=0.045; Accession=PF00646.23; Description=F-box domain
  Pfam module annotation: Pfam domain module=DUF295::F-box; Domain location=261-311::2-53
MADWSSLPAHLVNRIADRLLATDELDYYMDLRAVCRGWRSSTTDPKSRPLDPRFRPHQWAMLHEVHQSDERLFVNAGTGRFVRRYLPLLRRYIVVAGAAGGSVVLAERTAPHAARVLNPFTGAMISFDAPVPPNLWQVAAHVIGSSPTLVLLCKDSCTIYWADPCSGSFMEHNEGRFARPLVRLALESRVYAAAREGGPLVLFFVPDASKVLDIAAKLLAEYFSGGNQRFFLVESGGEILIVVKLIHGVVVFKIDTGTGQLELVKNLGSRALFVGDCRCLSVDADKFASVEANCVYYVVEEPWFDVCVYSLSDKTEVRAGGAIDSLNPITLSVDPPFSEVQLLCCYTFMVQEVFAMLLVDELIERNSYWHRSAEWAFPPVLAHPVGRPLPYIPRDNLPAGVLPLRSGLGGDYAPTEMSPLFPGCESPRIPLSFSVRGTNFFLSALPVRLSVPAWEIGFPSFLWQTRSWVTPWPSSALCALAVRPSSRTLRWMLFSSSMLSRTWPDPGVLRRSLLGVAPALRPNKTGRQLLKIYARGILDQLDEGDYERWDWEQGLG

SEQ ID NO: 51797 - protein, 73 aa, Zea mays
  Coding DNA Sequence Number=SeqID_10018
MAVVSGKRRDLFFHFFTFRTVSPGEATSEDFQVQQQAESAVPDGLQQQQSNAKTGEPQEEATVGPIRRSCQRK

SEQ ID NO: 51798 - protein, 102 aa, Zea mays
  Coding DNA Sequence Number=SeqID_10019
  Subcellular localization annotation: CTP_CleavageSite=43; ConfidenceScore=5.21e-01
MEVVREHVAADPKAAVAAVVPRSRVVAVAPRFGGAVGAAPNRRASGVGPRGAQAVVTPGLPGDDTLEAGGQAATSLPSDGAHPDTCDIDGSRERAAATDPQG

SEQ ID NO: 51799 - protein, 384 aa, Zea mays
  Coding DNA Sequence Number=SeqID_10020
  Pfam annotation: Domain name=DUF295; Domain location=278-329; Score =43.5; E_value=7.4e-10; Accession=PF03478.8; Description=Protein of unknown function (DUF295)
  Pfam annotation: Domain name=F-box; Domain location=2-53; Score=19.8; E_value=0.01; Accession=PF00646.23; Description=F-box domain
  Pfam module annotation: Pfam domain module=DUF295::F-box; Domain location=278-329::2-53
MANWSSLPSYLVNRIADILLATDDLDYYMNLRAVCRGWRSSTADPKSRPRDTRFRPRQWAMLHEAGKTFSAKIFRENRKSRLSVHQSDARLFVNAGTGRFVRRDLPLLRRYNVVASAAGGLVVLAERSAPHAARVQNPFTGAMISFVAPVPCLYDPAAHVIGSLPTLVFISKDDSPTIYWADPDSKSFVEDNEGHFTHLLVRLPFERRVYPTTLQGWLFDPSFVIDFFNHHFDGNAECPLVNKRCFQVESAGEMLAVYLCLHGHGVDVFKIDTGSDLLDRVNNLGSRAIFVGERRCLAVDADKFASVEANCIYYVRKETSWYDVSLYRLKDETGVRAVGAIYSFGSSFLSDDPPFSDVQLLCYYTFEVQKMFPQLQQDCFFSES

SEQ ID NO: 51800 - protein, 160 aa, Zea mays
  Coding DNA Sequence Number=SeqID_10021
MCSGWRSSTADPKGSPRDPRFWPHQWAMLDEVYQSDTRPFVNVATDRFVRKDLPLFCMCDVVTGAGGGLVVLAERTAPYAARVLNPFTGTMISFDAPVPCLYEPAAHVMGSLTTLVLTSNASGTIYWADPDSKSFTEDNDGHFTHGLAAGFLLFYRCVLV

SEQ ID NO: 51801 - protein, 364 aa, Zea mays
  Coding DNA Sequence Number=SeqID_10022
  Homolog annotation: Hit_ID=Q10SR6; Match level="QueryCoverage=32%, HitCoverage=28%, E-value=2e-11, Identity=37%"; Hit description=F-box domain containing protein, expressed
MGCCSTCCCTTSFCYASSFVLRVLPLLVLDPSPTIFVQPSVIITLEPLSHPVCVFDQWQRSFLSYIRSTVVTSSMASSMCNSGPASTMNVALITATYLGHQTCEHGSTTVDERDLSRESISEEDEVDKRDSHTTKALFGYSSMDFNLHVLRWIESSLPADIINRIADRILSTDDIDYYMDLRAVCSGWLSSNADPKGSTQDPRFRPRQWAMLDEVYQSDTRPFVNVATGRFIHKDLPLFCMCDVITGAGDGLVVLAERTASYAARVLNPFTGTMISFDAPVPCLYEPTAHVMGSLPTLVLTSNASGMIYWADPDSKSFTEDNDGHFTHGLAAAGRIPPILPLRSSLGGDYAPTEMSPLFLGCGR

SEQ ID NO: 51802 - protein, 350 aa, Zea mays
  Coding DNA Sequence Number=SeqID_10023
  Homolog annotation: Hit_ID=Q84QU5; Match level="QueryCoverage=88%, HitCoverage=82%, E-value=8e-09, Identity=25%"; Hit description=F-box domain containing protein-like
  Pfam annotation: Domain name=DUF295; Domain location=259-309; Score =51.0; E_value=4e-12; Accession=PF03478.8; Description=Protein of unknown function (DUF295)
MASWSSLPADLVNRIADLLLATDDLDCYMDLRAVCRGWRCSTADPKNMPRDPRFRPRQWAMLDEVHQSDARLFVNVATGRFVRRDLPLLRRYDVVAGAAGGLVVLAERTAPYTARILNPFTGAMISFDAPMPCLYDPAAHVIGSLPTLVFISKDDSPTFYWADPDSKSFTEDNDGQCTHPLVRLPFEFSVYAAAREGGPLESFSVLEGPIPKYLTGNAEWPYLNKRCFQVESAEEMLVVVFQRLHGVDVFKINTRSCLLERVKNLGSRAIFVGERRCLAVDADKFASVEANCIYYVMDEPWYDVCVYRLKDETGVRAGGAIDSFSSSFLCDDPPFSDVQLLCYYTFEVRV

SEQ ID NO: 51803 - protein, 264 aa, Zea mays
  Coding DNA Sequence Number=SeqID_10024
  Homolog annotation: Hit_ID=Q8S7Q9; Match level="QueryCoverage=27%, HitCoverage=12%, E-value=3e-08, Identity=43%"; Hit description =Putative F-box domain containing protein
  Pfam annotation: Domain name=DUF295; Domain location=159-209; Score =47.9; E_value=3.5e-11; Accession=PF03478.8; Description=Protein of unknown function (DUF295)
  Pfam annotation: Domain name=F-box; Domain location=2-53; Score=17.4; E_value=0.051; Accession=PF00646.23; Description=F-box domain
  Pfam module annotation: Pfam domain module=DUF295::F-box; Domain location=159-209::2-53
MASWLSLPADLVNRIADLLLATDDLDCYMDLRAVCRGWRSSTADPKNMPRDPRFRPRQWAMLDEVHQSDARLFVNVATGRFVRRDLPLFRRVYAAAPEGGPLDPDFVVEDFIQYLKGDGEYPVVNKRCFQVESAGEMLAVYQCLHGVDVFKIDTGSGLLDRVKNLGSRAIFVGERRCLAVDADKFASVEANCIYYVMDEPWYDVCVYRLKDETGVRAGGAIDSFNSSFLCDDPPFSDVQLLCYYTFEVWKMFPQLQLNCFFSQT

SEQ ID NO: 51804 - protein, 303 aa, Zea mays
  Coding DNA Sequence Number=SeqID_10025
  Homolog annotation: Hit_ID=Q8S7Q9; Match level="QueryCoverage=33%, HitCoverage=17%, E-value=2e-08, Identity=45%"; Hit description =Putative F-box domain containing protein
  Pfam annotation: Domain name=DUF295; Domain location=197-248; Score =43.5; E_value=7.4e-10; Accession=PF03478.8; Description=Protein of unknown function (DUF295)
MADWSLLPSYLVKRIADRILATDDLDYYMDLPRRVPRLALLHCRPQELAAGHALPAAPVGYARRGPPERRAPLRQRRHRTLRSQGPAAAPQDDSPTIYWADPDSKSFVEDNEGHFTHLLVRLPFERRVYPTTLQGWLFDPSFVIDFFNHHFDGNAECPLVNKRCFQVESAGEMLAVYLCLHGHGVDVFKIDTGSDLLDRVNNLGSRAIFVGERRCLAVDADKFASVEANCIYYVRKETSWYDVSLYRLKDETGVRAVGAIYSFGSSFLSDDPPFSDVQLLCYYTFEVRKMFPQLQQDCFFSES

SEQ ID NO: 51805 - protein, 279 aa, Zea mays
  Coding DNA Sequence Number=SeqID_10026
  Homolog annotation: Hit_ID=Q8S7Q9; Match level="QueryCoverage=30%, HitCoverage=14%, E-value=4e-10, Identity=46%"; Hit description =Putative F-box domain containing protein
  Pfam annotation: Domain name=DUF295; Domain location=187-237; Score =47.1; E_value=6e-11; Accession=PF03478.8; Description=Protein of unknown function (DUF295)
MADWSSLPADLVNRIADRILSTDDIDYYMDLRAVCSGWRSPTADPKSSPLDPRFRPRQWAMLDDVYQSDTRLFVNVSTGRFVRKDLSLLCMCDVVTGAAGGLVVLEERTAPLPFESRVYAGAREGVPLESFSVLEAPVPQYLTGNDEWPVLNKRCFQVESAHERLVVVFQHRHLVDVFKIDTVSALLERVKNLGSLALFVGDRRCLAVDADRFASVEANCIYYVLEEPWYDVCMYSIKDETGVRAGGAIDSFGSSFLSDDPPFSDVQLLCYYTLSLSMS

SEQ ID NO: 51806 - protein, 57 aa, Zea mays
  Coding DNA Sequence Number=SeqID_10027
MADWSSLPADLVNRIAERLLATDDLDYYMDLRAGWAKSGTVIIGQGSEARWNRVSFI

SEQ ID NO: 51807 - protein, 408 aa, Zea mays
  Coding DNA Sequence Number=SeqID_10028
  Pfam annotation: Domain name=DUF295; Domain location=326-376; Score =50.3; E_value=6.5e-12; Accession=PF03478.8; Description=Protein of unknown function (DUF295)
MADWSSLPADLVNRIADRILSTDDIDYYMDLRAVCSGWRSSTADPKSTVAEVDFTSCRLPSTVTEPRPVAGRQSPLPTGLEYRLSGLHSRRPGPEQYHMCRRRRADEDTEAELQSSVMWDSDSQFMNKDGELVSSDTRLFVNVSTGRFVRKDLSLLCMCDVVTGAGGGLVVLAGRTAPYAARVLNPFTGAMISFDAPVPCCLYEPAAHVIGSLPTLVLTSNAFGVVYWADPDSKSFMQNNDGHFSHPLVRLPFDSRVYAGAREGVPLESFSVLEAPVPQYLTGNAEWPVLNNRCFQVQSAEERLVVVFQRRHRVDVFKIDTGSGLLERVKNLGSLALFVGERRCLAVDADKFASVEANCIYYVLVEPWYNVCMYSLKDETGVRAGLLSDDPPFSDVQLFCYYTLSLSR

SEQ ID NO: 51808 - protein, 114 aa, Zea mays
  Coding DNA Sequence Number=SeqID_10029
MTPANGDGACPECHKVTLGKDSLFADCPLYRHSAKSSPWAPLPGGWTKIVGDGSRRGSTRMTKEEAQQNDVVQQQVEQQATVDAAQQDDDDAQQDAFGASGSTHIYLQGPASLP

SEQ ID NO: 51809 - protein, 364 aa, Zea mays
  Coding DNA Sequence Number=SeqID_10030
  Homolog annotation: Hit_ID=Q84QU5; Match level="QueryCoverage=85%, HitCoverage=82%, E-value=2e-09, Identity=25%"; Hit description=F-box domain containing protein-like
  Pfam annotation: Domain name=DUF295; Domain location=259-309; Score =52.6; E_value=1.4e-12; Accession=PF03478.8; Description=Protein of unknown function (DUF295)
MASWSSLPADLVNRIDDLLLATDDLDCYMDLRAVCRGWRCSTADPKNMSRDPRFRPRQWAMLDEVHQSDARLFVNVATGRFVRRDLPLLRRYDVVAGAAGGLVVLAERTAPYTARILNPFTGAMISFDAPMPCLYDPAAHVIGSLPTLVFISKDDSPTFYWADPDSKSFTEDNDGQFTHPLVRLPFEFSVYAAAREGGPLESFSVLEGPIPKYLTGNAEWPYLNKRCFQVESAEEMLVVVFQRLHGVDVFKINTRSCLLERVKNLGSRAIFVGERRCLAVDADKFASVEANCIYYVTDEPWYDVCVYRLKDETGVRAGGAIDSFSSSFLCHDPPFSDVQLLCYYTFEVRKMFPQLQLNCFFSQT

SEQ ID NO: 51810 - protein, 94 aa, Zea mays
  Coding DNA Sequence Number=SeqID_10031
  Gene Ontology: Mol. function=pyridoxal phosphate binding; Biological process=carboxylic acid metabolic process
  Homolog annotation: Hit_ID=Q6ESZ9; Match level="QueryCoverage=76%, HitCoverage=13%, E-value=1e-22, Identity=75%"; Hit description =Putative serine decarboxylase
MVRGKGMAAMYSWSCKRREVFPDRILFASRESHYSVFKATRMYIMDCVKVDTLMSGEIDCAMSREIDCDNFQRKLLQNGDKPTIINVNIGNQDF

SEQ ID NO: 51811 - protein, 118 aa, Zea mays
  Coding DNA Sequence Number=SeqID_10032
MDEERTHGWVGLGPEDDEYAELQNHACKMKRRAARDLSIRGGNLDESELVTTTLGQTATTLGQATMHRHECRGMSAPQQQASCEAELTADKSSQSARAKYRAMGIRDKRVRQRLWSTS

SEQ ID NO: 51812 - protein, 90 aa, Zea mays
  Coding DNA Sequence Number=SeqID_10033
MALPVDVTGLCPRLGDVEAPPKPGSSLSSMAEAESEPLGRARRRSSAEAESKPLGRARRRSFAEAESEPLGSGESEVVCRGRVRDPGSVE

SEQ ID NO: 51813 - protein, 200 aa, Zea mays
  Coding DNA Sequence Number=SeqID_10034
MDESLARSCYARELWRFSSFHRLCAWPSWALRDNRGQGNRSPVCSAASDPHSVAVGEPYCSFSDKVTPKPFNIAPCIGHGATVSLLDWIGFDADCSSAGRSTPDAGAGAQPRPRRSRTPGAVEPGADAGSSGADAGWALAAWPRPGAGPEAWREEAAGEGSEGEKLEERREREKGWRRLLGARGGGLGLGKGQGAAGSWA

SEQ ID NO: 51814 - protein, 566 aa, Zea mays
  Coding DNA Sequence Number=SeqID_10035
  Homolog annotation: Hit_ID=Q6ETM2; Match level="QueryCoverage=30%, HitCoverage=27%, E-value=7e-59, Identity=68%"; Hit description =Putative dem protein
MERKNSRKRSRALTGSIVHAVIHPRRGVDAIPHLALYQFTHCPCTVHPDKKNAHEKLKDQIARQARSERTAPKGPIFARSGWSSAANSGGKPARSTERKVCSIITCLPLPVGLPNSPILKASERGEILARLGRKGAELPPDEDGGVECGDAHGEGGRVSFASCHHWRLSGSITSVIDQVAGSRATSASLQSPRPAAPPFTASWRGGSPPSSKQPRPSSTRRGSALFVTRRDVPHPLPSPPALLTLHFSWTTRRAGPGCTGKGRQARDGVAADLGEGLARKGEVVGVTRPLHGIPPRKPPASADDLLDVPRRGPYGEQSQGARARGGRLGMGVAMDLGEGLAKKGEVVGATRASRRGAKRLGAPISSITAPKFQFPARSSILTFSPKPAAAMGGLHSREDLDLSDSNSEDAESRASDNSSDYGTSPPASVSSKLASGAGAATPASIDAIDRHLRQLHLKYNEPISPNPSPGSTPSANPTALNAVKLYLHIGGSSPSTKWIVSDRLAVASFVRAGVGEDDDAPAVGRPWCLVMGLKIRARVGFELHLKAFPVQRRVDFVADGVWALKG

SEQ ID NO: 51815 - protein, 94 aa, Zea mays
  Coding DNA Sequence Number=SeqID_10036
  Subcellular localization annotation: CTP_CleavageSite=61; ConfidenceScore=5.01e-01
MRTSGERPSPFSPGAQRRAAISPAAISGSPQAPNGHLPKRHLPKRQPSGHLPNGHLLISPRATATETQRPMRAYRDCPSSMPPGPKGRVLESYG

SEQ ID NO: 51816 - protein, 235 aa, Zea mays
  Coding DNA Sequence Number=SeqID_10037
  Gene Ontology: Mol. function=phosphopyruvate hydratase activity; Cellular component=phosphopyruvate hydratase complex; Biological process=glycolysis
  Homolog annotation: Hit_ID=Q10R62; Match level="QueryCoverage=49%, HitCoverage=27%, E-value=1e-60, Identity=93%"; Hit description =Serine/threonine-protein kinase NAK, putative, expressed
  Pfam annotation: Domain name=Enolase_C; Domain location=58-235; Score= 30.0; E_value=8e-09; Accession=PF00113.12; Description=Enolase, C -terminal TIM barrel domain
  Pfam annotation: Domain name=Pkinase_Tyr; Domain location=37-214; Score=-128.1; E_value=0.00013; Accession=PF07714.7; Description =Protein tyrosine kinase
  Pfam module annotation: Pfam domain module=Enolase_C::Pkinase_Tyr; Domain location=58-235::37-214
MRDRNELPTPRIEGEILSSSNLKAFTFNDLKNATKNFRPDSLLGEGGFGHVYKGWIDEHTLAPSRPGSGMVVAVKKLKPEGFQGHKEWLTEVDYLGQLHHKNLVKLIGYCSDGDNRLLENKEGLELLKAAIEKAGYTGKVVIGMDVAASEFFGEKDKTYDLNFKEENNDGSNKISGDSLKDLYKSFVSEYPIESIEDPFDQDDWSTYAKLTDEIGQKVQIVGDDLLVTNPTVSNI

SEQ ID NO: 51817 - protein, 76 aa, Zea mays
  Coding DNA Sequence Number=SeqID_10038
MVPGAIMLATLTSGFCSLGLGAARRVVPCKRLCHAQHRLCATGVRPGILLCILVSHPVLEGKSNANQVNKDMINKD

SEQ ID NO: 51818 - protein, 150 aa, Zea mays
  Coding DNA Sequence Number=SeqID_10039
  Subcellular localization annotation: CTP_CleavageSite=57; ConfidenceScore=5.44e-01
MAGRGATTTVRALVRRRRATGSTPNNIDKRGSTTRAWAYRMAQQQGLSSMQTGNRPRALRRRGEGSTGESKSSVAINGAGKRGNCRLTEEEEGERKRTGAGISLLYSRPERGGVEVAARRQKGTAADVPAAAALSLRAGEELEDDQGWEG

SEQ ID NO: 51819 - protein, 132 aa, Zea mays
  Coding DNA Sequence Number=SeqID_10040
MASVGDFRRTAKTGHGDGRHLSLMASNNGKYEREIRASGEGDRRSTSLRRRRGESRSRAADTKWRSALQLSHGGVVVIRFVHAGKGLEDEQSWEAHTGYIGAWHRRWGRAPVNRNSWGTDNELRRGAASNNK

SEQ ID NO: 51820 - protein, 134 aa, Zea mays
  Coding DNA Sequence Number=SeqID_10041
MASVGDFRRTAKTGHGDGRRHLSLMASNNGKDEREIRASGEGDGRSTSLRRRRGESRSRAADTKWRSALQLSHGGVVVIRFVHAGKGLEDKQSWEAHTGYSGAWHRRWGRAPVNRNSWGTDNELRRGAASNNKQ

SEQ ID NO: 51821 - protein, 404 aa, Zea mays
  Coding DNA Sequence Number=SeqID_10042
MEIKAEQDERVRWQARSHARENETEQREQPGSTAARIRGKQAERALEARTKTQGAGHGAWGAARRGELGTARGDRTRATQPRRIRDDGKELEQESTHGEASGECCKYQREMEQKKLRAMGDSREGAEQGAAARRAREDELGARPWQGSSAGRAGIGPRARRAGGQAPAMGGSMRELYWAPGRRSSRNQGWEKLGELRAGARSAERKTRPSRESGKQAERALEARTKTQGAVHGARGAARRGEHGTARNDGMRAMQRNRDDDQELVQESTHGGASGECCKYQRKVEQKKLRAMGDSREGAEQGAAARRAGEDELGARPWQGSSTGRAGIGPRARRAGGQAPAMGGSRRELCWAPGRRSSRNQGWEKLGELGRARASRGTRTQGSDQGAGEAWLAGDKHQRGAAER

SEQ ID NO: 51822 - protein, 151 aa, Zea mays
  Coding DNA Sequence Number=SeqID_10043
MQRNRDDDQELVQESTHGGASGECCKYQRKVEQKKLRAMGDSREGAEQGAAARRAGEDELGARPWQGSSTGRAGIGPRARRAGGQAPAMGGSRRELCWAPGRRSSRNQGWEKLGELGRARASRGTCTQGSDQGAGEAWLAGDKHQRGAAER

SEQ ID NO: 51823 - protein, 75 aa, Zea mays
  Coding DNA Sequence Number=SeqID_10044
  Subcellular localization annotation: CTP_CleavageSite=54; ConfidenceScore=5.21e-01
MASKSLRSNAGPKTAALSLPWLRRCFVLRSEQHAVDARRRGTPCFEWRRRQAARCSSDVRSDAQIGITVDLENAV

SEQ ID NO: 51824 - protein, 106 aa, Zea mays
  Coding DNA Sequence Number=SeqID_10045
MREAQEMGAILALATMEVLAPAARAASAPTRLAGDKAKNEEPGSRIDGVMKWEHGLQLQLHDFLEHLMTCSTNSTKFVGAGAIPNRAYQNLRVGDQMTPGKFKDRL

SEQ ID NO: 51825 - protein, 74 aa, Zea mays
  Coding DNA Sequence Number=SeqID_10046
MEIPNARAVLRVRCPRCHCVLEEAGAPVYQCGGCGASLQDDIEAYVYVPEADILSVLDVPPGKWASYWQKRGQQ

SEQ ID NO: 51826 - protein, 209 aa, Zea mays
  Coding DNA Sequence Number=SeqID_10047
  Gene Ontology: Mol. function=protein serine/threonine kinase activity; Cellular component=cell surface; Biological process =protein amino acid phosphorylation
  Homolog annotation: Hit_ID=P27450; Match level="QueryCoverage=48%, HitCoverage=23%, E-value=7e-33, Identity=71%"; Hit description =Probable serine/threonine-protein kinase Cx32, chloroplast precursor
  Pfam annotation: Domain name=Pkinase; Domain location=1-185; Score= -103.0; E_value=0.02; Accession=PF00069.15; Description=Protein kinase domain
  Pfam annotation: Domain name=Pkinase_Tyr; Domain location=4-158; Score=-114.3; E_value=1.8e-05; Accession=PF07714.7; Description =Protein tyrosine kinase
  Pfam module annotation: Pfam domain module=Pkinase::Pkinase_Tyr; Domain location=1-185::4-158
MAESLKGAQKILKSEINFLGRLSHPNLVKLLGYCWEDKELLLVYEFMAKGSLENHLFRRGCAPLSWELRLKIAIGAARGLAFLHASEKQVIYHDFKASNILLDVIETTRKEWAFMFERQPCFAASYGFAPLLSYSAREVETRIYFSRPTVAEYQCKDLGLLVENTRVEQFGVARKVTISSASTTVIADAASKDDIQAIQLPKEKRPYQI

SEQ ID NO: 51827 - protein, 132 aa, Zea mays
  Coding DNA Sequence Number=SeqID_10048
MWQLLTNLSVYIALQEKKANRQDARTGQSVDWQALWIFYSFFNNKLRDGVFRIFDIPNPSYCSWIELFMKKRSSTVKGLLLGGLLLHRRSSRERHHGQSDCEDFLLSVEGPQDDGSAKVAFGLDQIKKEKTS

SEQ ID NO: 51828 - protein, 348 aa, Zea mays
  Coding DNA Sequence Number=SeqID_10049
  Gene Ontology: Mol. function=hydrolase activity, hydrolyzing O -glycosyl compounds; Cellular component=chloroplast; Biological process=carbohydrate metabolic process
  Homolog annotation: Hit_ID=P49235; Match level="QueryCoverage=99%, HitCoverage=60%, E-value=1e-156, Identity=78%"; Hit description=Beta- glucosidase, chloroplast precursor
  Pfam annotation: Domain name=Glyco_hydro_1; Domain location=11-348; Score=365.6; E_value=8.1e-107; Accession=PF00232.9; Description =Glycosyl hydrolase family 1
MGTLEPIPIICTLTFDCQADVRLLKEIGMDAYRFSISWSRILPKGTLEGGINQAGIKYYKKLINLLIENGIEPFVTIFHWDVPQALEDKYGGFLGDRIVKDYTDFAKVCFENFGDKVKNWLTFNEPQTFTTFSYGTGVFAPGRCSPGEKCAQPIANSLTEPYIAGHNILRAHAMTVDLYNKNYKGTDGRIGLAFDVMGRVPYGNTFLDEQAQERSLDQNLGWFLEPVVRGDYPFSMRSLARKRLPFFTDNEQAMLAGSYDILGINYYTSRFSKHVDFSEDYSPKLNADDAYATAEIFGPDGNSIGPPMGNPWIYMYPKGLKDLLMIMKNKYGNPPIYITENALYQLAT

SEQ ID NO: 51829 - protein, 234 aa, Zea mays
  Coding DNA Sequence Number=SeqID_10050
  Subcellular localization annotation: CTP_CleavageSite=66; ConfidenceScore=5.15e-01
MDDEAVAEELRLDVMTKTNSSRRSLTLPPSTRLAASAPLPTSALRAPRGPPALGHRRRSARRPDALARHRQSASELARHGATHTATRHSALSRSRLALVARHRQAQARSRTRHSHRGASRQPRSAATQEPQTAAARAVERARPEPGADEQWSTADHVHAAMDMELEHGGAEDDRGSYSSSSSSKRSFGALSDATVSSTPSKLQALSKLISAKAVVVQPPESEAREQPRRAPPSP

SEQ ID NO: 51830 - protein, 434 aa, Zea mays
  Coding DNA Sequence Number=SeqID_10051
  Gene Ontology: Mol. function=heat shock protein binding; Cellular component=integral to membrane; Biological process=protein folding
  Homolog annotation: Hit_ID=Q688H7; Match level="QueryCoverage=83%, HitCoverage=100%, E-value=1e-127, Identity=64%"; Hit description =Putative DNA J protein
  Pfam annotation: Domain name=DUF1977; Domain location=330-423; Score =98.8; E_value=1.7e-26; Accession=PF09320.1; Description=Domain of unknown function (DUF1977)
  Pfam annotation: Domain name=DnaJ; Domain location=167-228; Score =112.0; E_value=1.7e-30; Accession=PF00226.21; Description=DnaJ domain
  Pfam module annotation: Pfam domain module=DUF1977::DnaJ; Domain location=330-423::167-228
  Subcellular localization annotation: CTP_CleavageSite=32; ConfidenceScore=5.04e-01
MQRHIRAVYSIFVPLSGGGLAGVWSSSRRLPSLSSDDAEGRVGVRVISLRFQPISPELIGLMDGNKDEALRSVKLAKSAFASGDRQRAEKLIKIAQRLDPGLPLDDLLSPVEKVGILNISTCKDKTERGQALLYPKTTKESVGPLNVDKAYTEENIRVVQDIRKKKDYYAVLGVERRCTVEEIRKAYRRLSLKVHPDKNKVPGAEDAFKMVSKAFKCLSNDQSRRTYDQTGTTEDHEFNEQYPNVMRRGAARRRRPARSGFYNYEEDFDPDEIFRSFYGTHDNMFHPQYTYRARGTGRQQQQRREHSVEGGSSINLTVFIHLVVVLFIVSLAFIPARQAEYSLQQTNYFPISKVTQKQGVEYFVSKQDFDQQFPQGSQSRENLERHVLMDYKSMLGRYCHVELQRRQWAKDYPTPRCDKLRELSVAQNVHMPSV

SEQ ID NO: 51831 - protein, 92 aa, Zea mays
  Coding DNA Sequence Number=SeqID_10052
MVSPAPLTVGVETLRTGRPRLPFPRIALGGSGVEVGVAAVEAPEPRSERAGHGEEELVANVVGFWLGDKTPSANLIRAHQVALNLIDGHNPE

SEQ ID NO: 51832 - protein, 208 aa, Zea mays
  Coding DNA Sequence Number=SeqID_10053
MAHGKRLALECSHQGRSKRRPSQERWVVTKHSLDSRPFIISMTNFPHRAVDSSVKGEVISLSSSSSPNGESKAGPCGDKPVSLVLPAGTIGTPVIVDCPVMVVRLVRAGPQPGHVILCRRVVASSSPAPHVSSCEVFRRDWPSWRPKRREHHSPCFSIPLCLSGSIRARVATRMQRLLDIPGHDALSVVFENLSRGTTRPPVRWPTPY

SEQ ID NO: 51833 - protein, 80 aa, Zea mays
  Coding DNA Sequence Number=SeqID_10054
MWQIILVSCEGVLFRGANSGRLRRIAKSEEVYAFDDHDAFEQRVIVSLYVKGDVALKSSVMMRLIILCPSWSLTIGASII

SEQ ID NO: 51834 - protein, 200 aa, Zea mays
  Coding DNA Sequence Number=SeqID_10055
MCQAGGGHDFARPLENIFVNDEGDRAVVDKDHQESTQKKQKALLRLVDPRREAKMLRPSAKGSAAVATMLPPTELAASARKVPSPAKASEVEGAKGTKIGGAGDVSRELSVDDYLIEGVSMFDAHTRLAAGGSGSDEGRGIANASAAGGVAATVARQLRYAAAFPDQVASGALVDVATLQLRSERKRSEDKIERLLTQNT

SEQ ID NO: 51835 - protein, 255 aa, Zea mays
  Coding DNA Sequence Number=SeqID_10056
METQVTQKRVAELELEVKNTRTHHERVEATTRADVDRAHTLFVDAHHDLGAETTRFNKSGGERVVEPIHKDGQESYEDLDFFVALDVSAVESRMGEESSYRALIPIMKNKMKRVGVPKRRLGSADALTGGGEGSQRRSHMGLGGPRPRVSLCEVLRMSPSRPQERERARSEEGPRRIVLAPTIERGFKEWDFRALFKGEELKLMLLKRYVLSWLDEFEWNASLAPFVEGRLYWSSVSDYAHTFFVLTWLRNVCVC

SEQ ID NO: 51836 - protein, 126 aa, Zea mays
  Coding DNA Sequence Number=SeqID_10057
MSPLAHGWEVGEVKLCPMPFLKGRQVLSPAFNIELQGQDATTFVREVEAEVVMIVGKYSMKTEMPMSWDIRISNVRFILVFELNGLRYNPYPEEDSTEAGDDQRKKRVATRVDEGCSKGKVVVTAA

SEQ ID NO: 51837 - protein, 100 aa, Zea mays
  Coding DNA Sequence Number=SeqID_10058
MGRGAEETSKCTWETFFGKDEVMKTIRSKMLMDKRCVVDPRSKGSSGGYHRIGGPTIATDCMRNSNLIRGRLSIRHNNNNFFYTVGQRSFTRRYIGQFWR

SEQ ID NO: 51838 - protein, 125 aa, Zea mays
  Coding DNA Sequence Number=SeqID_10059
  Subcellular localization annotation: CTP_CleavageSite=70; ConfidenceScore=5.47e-01
MAAHLPLPPPPHHSAPLLARSASHGAAPPAPSSRSSSRASPPWADLGQVPVHGAHGAALGPAPLRAFLPNAQKFQQGAPYTHAPVPRRGIPLSSLLWHQHGQGHNQRQPCCSRVAPRKKKTPLGL

SEQ ID NO: 51839 - protein, 68 aa, Zea mays
  Coding DNA Sequence Number=SeqID_10060
MESNDCKVDEDTGDDRISMKNTKVVDLQATSGHVINKLEMKKPREGRRINKHKQDLRNKIKHLLLDNG

SEQ ID NO: 51840 - protein, 296 aa, Zea mays
  Coding DNA Sequence Number=SeqID_10061
  Subcellular localization annotation: CTP_CleavageSite=84; ConfidenceScore=5.52e-01
MRPSSGEADESKSRSLPARKHASTTSWRMFCRPATARIRGSAAVAPSILRGSPRSLPRSLCARPQSRRIPQPPRIRPSRASRSRAAAAPSILRPPSILHGRSISASMEDIYRVRAASLQLHGSAPRLSTAFAPSMESARICAPQLPTARASLHGSRLGSARPTFQLHAASAPSMEVAPDLRAPASMKAVANLDPTAPTVPTPTSALHFFQLELQERIASDVDEPAADAGVASSLAEMGALVLSTVRPSSRHDAPTPPSTGGHSGSPSDRRRPPTTPRGPISPLWYTLSRCSCISSL

SEQ ID NO: 51841 - protein, 327 aa, Zea mays
  Coding DNA Sequence Number=SeqID_10062
  Gene Ontology: Mol. function=hydrolase activity, acting on glycosyl bonds; Cellular component=intracellular; Biological process=base -excision repair
  Homolog annotation: Hit_ID=Q9FRL4; Match level="QueryCoverage=67%, HitCoverage=53%, E-value=2e-77, Identity=64%"; Hit description=3 -methyladenine DNA glycosylase, putative; 31680-30045
  Pfam annotation: Domain name=HhH-GPD; Domain location=131-276; Score =84.4; E_value=3.4e-22; Accession=PF00730.15; Description=HhH-GPD superfamily base excision DNA repair protein
  Subcellular localization annotation: CTP_CleavageSite=45; ConfidenceScore=5.82e-01
MGEQTHSQTLSSTPPVSASASASASAALPATTRASDPASAASTSRASAAASRASAAASRLKKKEANASPDPNPAKKHRLTFSIPGQPLSAAGEVGVAIRHLRAVDPALAAVIDAHEPPVFQCPHRPFHSLVRSILYQQLAFKAAASVYSRFLALLGGEASVAPDAVLALSPHQLRQIGVSPRKASYLHDLARKYASGILSDASIVNMDDRSLAAMLTMVKGIGAWSVHMFMIFSLARPDVLPSADLGVRKGVQMLYALQDVPRPSQMDRLCERWRPYRSVGAWYMWRLIESKVPQPAPPIPALPSPDGQIMLQQQQQQSVIQMIIPF

SEQ ID NO: 51842 - protein, 68 aa, Zea mays
  Coding DNA Sequence Number=SeqID_10063
MARVACTLRGKRLDGGVSVLSVGVNPHTLESLFFCQVRKQRTFAIFALRCCPKKNLSSEAVGGCWPPT

SEQ ID NO: 51843 - protein, 94 aa, Zea mays
  Coding DNA Sequence Number=SeqID_10064
MAATWARSELEQQHTGKYGRLANSGLGEWNATQGAGTEDRARKASSKATARRNGKPRQGAVRRSSAGTRQGGDLGWGLGARRSRQQRELAAMEE

SEQ ID NO: 51844 - protein, 167 aa, Zea mays
  Coding DNA Sequence Number=SeqID_10065
MEEWLNGAQAVCRADLVPRQLLPLKRGTRSLPFGPHRAEASFHHECREMNAVKAMEIGMPFDAQPNPPPRRIDRAHARGLLAPGILGVGANPALASFSAWNRAPRWRVAPVVDNGAAGFGGVPVETRWGCVRYFLAVELTMSDLYGIGVPIGCGVAVAVDLLMNAPD

SEQ ID NO: 51845 - protein, 162 aa, Zea mays
  Coding DNA Sequence Number=SeqID_10066
MGNPRNITKIALREQKRSHKPKRIPRENQFRPIILTRYLLHVTPQSTKDDGIAVPSTFTDYDDASTRISDPAPPLRSLFSNNSGWDMQTSRHNLTLGRELHLARRRLQPQEKTSPHLSSASTDCPGSSHQLPVNPEGGHPTIVLTTPCTTTCSGAGPTMASG

SEQ ID NO: 51846 - protein, 71 aa, Zea mays
  Coding DNA Sequence Number=SeqID_10067
MANKATSLTRISITYDVDSYEHCNIIWMYMFEFVMWYCVDLIVQPAAAKYSYAFQVPREAITSGIEEKPSK

SEQ ID NO: 51847 - protein, 76 aa, Zea mays
  Coding DNA Sequence Number=SeqID_10068
MRATLTFGIRAILEPVHDHRTRLQMKTGVMAPVAGGRYDNTFVGKDIRGKLGDASSDGDDASLDRKHGNHCEERIV

SEQ ID NO: 51848 - protein, 134 aa, Zea mays
  Coding DNA Sequence Number=SeqID_10069
  Homolog annotation: Hit_ID=Q7PC69; Match level="QueryCoverage=38%, HitCoverage=6%, E-value=3e-10, Identity=61%"; Hit description =Cellulose synthase-like C3
MALGDSGVWMERTTTEDMDFAVQAHLNDWVFLFLNDVESLIRLFVLFLSLRKRLFSMMSDLPSILEAFADRKHDRDRSGVDSSGKSRHSSKRGKYGHAKSSRAAPPAAKEYDEDEEEHTETFCGSCGGLYTGSN

SEQ ID NO: 51849 - protein, 41 aa, Zea mays
  Coding DNA Sequence Number=SeqID_10070
DYQKALSPTPLKKIAEATKAQAKTETGQAEVETGQAEARIG

SEQ ID NO: 51850 - protein, 460 aa, Zea mays
  Coding DNA Sequence Number=SeqID_10071
  Gene Ontology: Mol. function=transporter activity; Cellular component= integral to membrane; Biological process=transport
  Homolog annotation: Hit_ID=Q9ATN0; Match level="QueryCoverage=61%, HitCoverage=91%, E-value=1e-149, Identity=98%"; Hit description =Plasma membrane integral protein ZmPIP1-6
  Pfam annotation: Domain name=MIP; Domain location=52-271; Score =347.6; E_value=2e-101; Accession=PF00230.10; Description=Major intrinsic protein
MAGGTLQDRSEAEDVRVGVDRFPERQPIGTAADDLGRDYSEPPAAPLFEASELSSWSFYRAGIAEFVATFLFLYVTVLTVMGVSKSPSKCGTVGIQGIAWAFGGMIFALVYCTAGVSGGHINPAVTFGLLLARKLSLTRAVYYVVMQCLGAVCGAGVVKAFGSALYESAGGGANAVSPGYTKGDGLGAEVVGTFVLVYTVFSATDAKRTARDSHVPALAPLPIGFAVFLVHLATIPITGTGINPARSLGAAIIYDNPHGWHGHIAIDTLALLDGDSGSSGWARSPERRLRRARTRAKPRKTANSAPPDPGLGLGLGPGRRRTPLRPTQGSDSGSAPEHDELRFARPQGSDSALASAERPPPRPTQGLGLSFGHGRQTRPRLRRSLHATRPRAQASHVNRKRHHHPTPSRLGPQRTRPEDVSKDSTAPTAVPPPGSVAPPTATTSHQLGAKISPAATLACT

SEQ ID NO: 51851 - protein, 72 aa, Zea mays
  Coding DNA Sequence Number=SeqID_10072
  Subcellular localization annotation: CTP_CleavageSite=26; ConfidenceScore=5.45e-01
MDVNLAAPPPPPPTAVAVGRRSPTPPASVVVETITAHRGQPPRAVDASRGRVIFTSYNPNGVAPSSSSNGRA

SEQ ID NO: 51852 - protein, 52 aa, Zea mays
  Coding DNA Sequence Number=SeqID_10073
MPKPDEPLVTHANNKQQMDNAQICGPPSGQPIYRVGLSQSTRAAVSAPYPAR

SEQ ID NO: 51853 - protein, 212 aa, Zea mays
  Coding DNA Sequence Number=SeqID_10074
  Gene Ontology: Mol. function=peptidase activity; Cellular component =integral to membrane; Biological process=proteolysis
  Homolog annotation: Hit_ID=Q6YVD9; Match level="QueryCoverage=69%, HitCoverage=15%, E-value=5e-63, Identity=81%"; Hit description =Peptidase family-like protein
MTTEAVATSNCTNPLAPTKQHMLLSSVTCQRTCCILGDAPDMFGIIPGDTDYRIFAEDITNIPGLDIIFVLGGYFYHTSYDTLENLLPGSIQARGENLFNLVKAFTNPMLLKENEISNKAAKDGIEDVGAVFFDYLTWFMVFYSRDISLILHSLPIAIFLLVPLFLKFPNITLMSWFVTLLGFMREETNNSGGRGDEQDKDDVGLDDLDDGY

SEQ ID NO: 51854 - protein, 69 aa, Zea mays
  Coding DNA Sequence Number=SeqID_10075
MAPHYQKFLAYERELIVLVKVSLLVPSEVWSDIAMNFIEKFAKIKDQPVQAQVTMKQLQDKSQRDMLLR

SEQ ID NO: 51855 - protein, 153 aa, Zea mays
  Coding DNA Sequence Number=SeqID_10076
MSQSAGHEPRCSQGGYDASRATQEATEVEVELLWVQLAEVDGRVVGPRPKALGFSVCIDQATRFTRTRGRNQRLQLLDILERVHEVMEFGIHHGAVTTFAIAQLHYGGRLRGVVGLPVGTTSADLELLTSGFNATENIMLRVVTMEEIIRDLP

SEQ ID NO: 51856 - protein, 65 aa, Zea mays
  Coding DNA Sequence Number=SeqID_10077
MADDVGAAMVPSVITMAMPTPSLISLGIDVGHCNALRELVLCLDLKQSMKKNKDIALQQQFLFVI

SEQ ID NO: 51857 - protein, 102 aa, Zea mays
  Coding DNA Sequence Number=SeqID_10078
MVSSKYHTDFSLDNILRPAIESLSTNEQQQYEDFMCQAKENFLLQFTADHNQKIVKHGEIEVASCLPSLQISNIAPLDMVGPSEPLPGQSGPYADHLAFPAR

SEQ ID NO: 51858 - protein, 133 aa, Zea mays
  Coding DNA Sequence Number=SeqID_10079
MDASISETPLTDPLPTGGGNNNSGHVPDGGGGGDNGFFGRGFHNDFGPRRHKLMLPIYDDESGLMTKCETYIRGMYLLELDDETKEHEAMDNSGISLHALTDTDISNTKKLFAIINSTPLVALVDTYSTHTFI

SEQ ID NO: 51859 - protein, 121 aa, Zea mays
  Coding DNA Sequence Number=SeqID_10080
  Gene Ontology: Mol. function=peptidase activity; Cellular component =integral to membrane; Biological process=proteolysis
  Homolog annotation: Hit_ID=Q6YVD9; Match level="QueryCoverage=48%, HitCoverage=6%, E-value=3e-26, Identity=91%"; Hit description =Peptidase family-like protein
MVILTARLDLLVQQTVVLVLGSHGFIKTHRWNRTIRAFINIEASGSGGTDLVCQSGPGSWPSRVYAQTAKYPMANSVAQVLASYLVYSTSLPIEWLSAGLEPDPTTHWRISRSPLDMSKPS

SEQ ID NO: 51860 - protein, 171 aa, Zea mays
  Coding DNA Sequence Number=SeqID_10081
  Subcellular localization annotation: CTP_CleavageSite=89; ConfidenceScore=5.09e-01
MTTRQGLQAAGRLTSLRADPALQAQEVGKSPGRRLSIRQTPGALLAPSSMHPFKRPPRLDDASTFPMLPVGRMSLPGNPELWPMETAAVASSTSAMEEELLCLSACSVVACLWKKDDIEPEEDIKVSRHRLGAFLITFVHQHHRNAALELGRIGVGRTDIDIRIKPWRILP

SEQ ID NO: 51861 - protein, 129 aa, Zea mays
  Coding DNA Sequence Number=SeqID_10082
MEVGSPGCSGVSHAPTLDWERDRSVSHHGLQKDNVSSAGRRHRPTVAPSTSMCTTGATGAFPADETCRSLDGLQEDASSRAFSADVVKVDRWTRRRLRPHRSDASNLAASSDAVRGDLVAHHFVVAVPA

SEQ ID NO: 51862 - protein, 202 aa, Zea mays
  Coding DNA Sequence Number=SeqID_10083
MATSALAVRWSSRCALPPLVACVYGGARAHMGALPGGGYHGGGGGASVIEGRGRGTHGGGGTRMGKEGDGVDGGLGAWGRKVMPRMANCADGGRGAWGRAVIAQWGRAVTVVEVSGAGMEWRAALMALGEEARFAGEGGGPRMHCRDGAGRGVAGARPHSTLKSSRDMFACACLYSLRIANRLRTVAELRGIDDRDLVNRWS

SEQ ID NO: 51863 - protein, 100 aa, Zea mays
  Coding DNA Sequence Number=SeqID_10084
MEDINEETKVAKSRNRDKYEHNLANDGRKKDHRRRPAHTTMGLRKLLMEQVNERIYRYLNTGYPLLLGQGETPVVAQSHEITECPARPRARTHHMWPWAS

SEQ ID NO: 51864 - protein, 492 aa, Zea mays
  Coding DNA Sequence Number=SeqID_10085
  Gene Ontology: Mol. function=calcium ion binding; Cellular component =membrane; Biological process=protein transport
  Homolog annotation: Hit_ID=Q10LT8; Match level="QueryCoverage=89%, HitCoverage=70%, E-value=0.0, Identity=84%"; Hit description =Vacuolar sorting receptor 1, putative, expressed
  Pfam annotation: Domain name=PA; Domain location=55-165; Score=82.5; E_value=1.3e-21; Accession=PF02225.12; Description=PA domain
MRGQAWLALLVVVALALADAAAGRFVVEKNSLEVTSPDELKGKYECAIGNFGVPQYGGTLHGWVEYPKSNRKACQSFDQFDISFKPKQAGGRPIFVLVDRGECFFTTKAWNAQNAGAAAVLVVDDKSEPLITMDNPEEGKEHLENITIPSVLITKKLGENLKKSAENGDMLSVLLDWRESLPHPDERVEYEFWTNSNDECGPKCDMQMDFVRSFRGTAQILEKKGYTQFTPHYITWYCPEAFVDSKQCKSQCINHGRYCAPDPDQDFSQGYDGRNVVVQNLHQICVFKIANETGKPWLWWDYVHDFALRCPMKDKKYNNDCAHDVIKSLGLDIENINKCVGDPEADVENEILKAEQDAQIGHGKRGDVTILPTLVINNKQYRGKLDKVAVLKAICSGFEETTEPAICLSEEIQTNECLENNGGCWLDKANNVTACKDTFRGRVCECPIVRGVKFVGDGYTHCEEIRAIMAQYMPLDNQEGANQHQVVHANDI

SEQ ID NO: 51865 - protein, 220 aa, Zea mays
  Coding DNA Sequence Number=SeqID_10086
  Gene Ontology: Mol. function=RNA-directed DNA polymerase activity; Cellular component=mitochondrion; Biological process=RNA-dependent DNA replication
  Homolog annotation: Hit_ID=UPI00004C1731; Match level="QueryCoverage =70%, HitCoverage=11%, E-value=5e-78, Identity=88%"; Hit description =UPI00004C1731 related cluster
  Pfam annotation: Domain name=rve; Domain location=77-220; Score=58.9; E_value=1.7e-14; Accession=PF00665.16; Description=Integrase core domain
MGSHLIETGRPRTCNISTKESYPSTEPKLGNWCGAPSHSSCWVTGRSSIITAPQESSSDAYPSPKTHLPAQALQTVPITWPFAVWGLDLVGPLQKAPGGYTHLLVAIDNFSKWIEVRPLNSIRSEQSVVFFTNIIHRFGVLNSIITDNGTQFTGRKFLDIWVDWAAVAHPMTNGQVERANNMILQGLKPRIYNDLNKFGRRWMKELPSVVWSLRTCNTRF

SEQ ID NO: 51866 - protein, 88 aa, Zea mays
  Coding DNA Sequence Number=SeqID_10087
MAHRIARSRHGRGRPKSDEGDLGSPVPKVHNKPIKRPRQGFKQESKGQPERHPGLAHRTVQCTRALQLELVTFGKIRGRSAIIHQTVR

SEQ ID NO: 51867 - protein, 133 aa, Zea mays
  Coding DNA Sequence Number=SeqID_10088
  Subcellular localization annotation: CTP_CleavageSite=14; ConfidenceScore=5.25e-01
MPGHRAGDHGGSCQAAVPRPSARTPSRCRTCAEATLAPAPRPVCPRWGRACALGPPGLAAAPSGTKEREALAVWRGESERNGEEMGHGLRASWARDDREAVGGARRRRGTGTRVRPGGWDPPTGGSDAPARAR

SEQ ID NO: 51868 - protein, 81 aa, Zea mays
  Coding DNA Sequence Number=SeqID_10089
MSLYERALNTNERVLNERGSRFTSKMLEALMYSHDWVRNICKKFVVVLSYRDLNFEEELIASERITMPKRGGELGFSKNQH

SEQ ID NO: 51869 - protein, 252 aa, Zea mays
  Coding DNA Sequence Number=SeqID_10090
  Gene Ontology: Mol. function=DNA binding; Cellular component =intracellular
  Pfam annotation: Domain name=ARID; Domain location=29-137; Score= -21.5; E_value=0.02; Accession=PF01388.11; Description=ARIDBRIGHT DNA binding domain
MDSAASVLAILSKLQSLGFCADLRVPDAVAASDPSEAFDAVLATFLREAYTGGREARPIPVALGNGRCVDLLRLFLAVRAAGGYAGVPNTPGGWAAAAESAGIDSALAAPVKLVYAKYLGALDRWIQRLVEAHGPFLDGDMRKRQELFIGTDGVEGEEGLLGYNGREQRHVMLKRKRGDVVGMLGWVREMAENAGNDVAVSAGSSAECFSMALAVRKMVTTKKARRASMLDASLFQVISIPLKSLLAKRFTI

SEQ ID NO: 51870 - protein, 157 aa, Zea mays
  Coding DNA Sequence Number=SeqID_10091
MGTEVGEGIGDDVRQISVDDEEGSRRHFVERVQCAEVSDPTADGRYCTEPFITESMTRIKPHETASTAVNSWSDSGDRCRPGVNLSLVVPGEGLKRKGRRGRGKARGDRDRKLRRGPREAVGDETDGEGPPSSENLSHAVNGDRWGHGIGERSTTDA

SEQ ID NO: 51871 - protein, 286 aa, Zea mays
  Coding DNA Sequence Number=SeqID_10092
  Gene Ontology: Mol. function=zinc ion binding
  Homolog annotation: Hit_ID=Q10NB6; Match level="QueryCoverage=88%, HitCoverage=85%, E-value=1e-101, Identity=74%"; Hit description=DHHC zinc finger domain containing protein, expressed
  Pfam annotation: Domain name=zf-DHHC; Domain location=144-207; Score =20.9; E_value=1.6e-06; Accession=PF01529.11; Description=DHHC zinc finger domain
MSRLASGLQRPRRSLSPCEVLWCALASCGLVLFSQLAVAMVPRLFPSLYLLAMLPIAGLVLLAAIVLGRLWRRFIGVTASAPLFVLFNILLSWGVYIFVIRRKTSSLLDMLINAECALLLWGFYRILSCDPGIFACDSSYLAEAGCKDFVEAIYTSERLPMLSRVRQCTWCKANIRGYDHHCPAFGTCIGQKNHRLFMALLTGFVVAESTYTMCSTKYITICISSGTIKSENPVSLNMVISTMLFSILQVLWQIVRVGASSLRELQKICVLSFDLPHAYAPIDHSY

SEQ ID NO: 51872 - protein, 614 aa, Zea mays
  Coding DNA Sequence Number=SeqID_10093
  Gene Ontology: Mol. function=protein phosphatase type 2C activity
  Homolog annotation: Hit_ID=Q10NB9; Match level="QueryCoverage=99%, HitCoverage=100%, E-value=0.0, Identity=64%"; Hit description =Protein phosphatase 2C containing protein, expressed
  Pfam annotation: Domain name=PP2C; Domain location=221-581; Score =50.0; E_value=8e-12; Accession=PF00481.12; Description=Protein phosphatase 2C
MGNAITKNPCFSGEPYAAAVTSDPLPDDSHGHSFTYVPSGGAFDQPPTAAATSSESSLFSLSGAAISANLATSGSMPSFRMFNELTWPQSTACTFESSRSFAAVPLLAPPRTLSMSGPVQFTSGRFSEASGSASTISGTPSGRAFMSGPFDRSSSASSSAGFQLSVSQLIAERHAARSRLRDERSLLRFFVGTASKLRLGSPRCGRRPEEPAQVSFSDGDSRSPPNGNVEWAQGIAGEDRFHVAVSEEHGWVFVGIYDGFNGPDATDYLFTNLYVAVHNELKGVLWDDIIQAGDSARCGQEDHAAAGNAERLRLAQADGGGAEAPTPGNSAASVHRDVLRALARALKKTEEAFFAAAEERAAESPELGLMGSCVLVMVMKGTDVYVMNVGDSRAVLARRPEPDLKNVLGKASQDLQQFKADIVRELEAREVDGLQAVQLTPEHSTAVQEEVTRIKGQHLNDRNAIVNGRVKGKINVTRAFGVGYLKQPKWNSRLLEAFKIDYVGTDPYVSCAPSLCHHRVGSQDKFLVLSSDGLYQYFTNKEVVDQVVEALTAAEPDGDPAQHLVGELVHRAARKAGMESRQLLDIPRGERRHYHDDVSIIVISFEGRIWRSSV

SEQ ID NO: 51873 - protein, 102 aa, Zea mays
  Coding DNA Sequence Number=SeqID_10094
MEFKFLAYACFYDLVSQPEETATDARKKVSTWSRRAGKDKAKASRECARGPRADGDGSSSEVRTRIHLHLVQVQELVYWDSSKSENPDLEHQIDLEAPLLCI

SEQ ID NO: 51874 - protein, 390 aa, Zea mays
  Coding DNA Sequence Number=SeqID_10095
  Gene Ontology: Mol. function=zinc ion binding; Cellular component =integral to membrane; Biological process=defense response to bacterium
  Homolog annotation: Hit_ID=Q10NB7; Match level="QueryCoverage=80%, HitCoverage=68%, E-value=1e-156, Identity=86%"; Hit description =Ankyrin repeat family protein, putative, expressed
  Pfam annotation: Domain name=Ank; Domain location=113-143; Score =16.3; E_value=0.11; Accession=PF00023.20; Description=Ankyrin repeat
  Pfam annotation: Domain name=Ank; Domain location=158-190; Score =27.2; E_value=5.8e-05; Accession=PF00023.20; Description=Ankyrin repeat
  Pfam annotation: Domain name=Ank; Domain location=195-227; Score =37.9; E_value=3.6e-08; Accession=PF00023.20; Description=Ankyrin repeat
  Pfam annotation: Domain name=Ank; Domain location=46-78; Score=24.1; E_value=0.00049; Accession=PF00023.20; Description=Ankyrin repeat
  Pfam annotation: Domain name=Ank; Domain location=79-111; Score=33.7; E_value=6.4e-07; Accession=PF00023.20; Description=Ankyrin repeat
  Pfam module annotation: Pfam domain module=Ank::Ank::Ank::Ank::Ank; Domain location=113-143::158-190::195-227::46-78::79-111
MGHGASCSRPSEEVDFFGAAQCGDTARLAAALRSRPTLLARTTLFDRLSALHIAAAHGHLQVVSLALDLCVHPDVVNRHKQTALMLAAMHGKTDCVRRLLDAGANIVMFDSSHRRTCLHYAAYYGHADCLRTILSAAKSAPVSESWGFARFVNVRDDTGATPLHLAARQGWRRCVHVLLENGAIVSASSGAFGFPGSTPLHLAARGGNLDCVRQLLSWGADRLQRDSVGRIPYEVAVKRGHVACAALLNPSSAEPLVWPSALKFISELEPDAKSLLEAALMEANRERERRILKGTKNALPSPPHHDDGAHDTAIAECLSVMASLAHVCQRAGSVAHERIHLLDWPIAHLSNSANPYELHIILNATMQINVRLHMRDLGGSPMTRILFGTD

SEQ ID NO: 51875 - protein, 159 aa, Zea mays
  Coding DNA Sequence Number=SeqID_10096
MGKNNKRKREPTPPSEDFGDSEYSEEEFSSESEGSPAPVSPPASSDDSDDSQGIAAEVWTYIRAVERSGLEGSDESEYSSDEEDSPEEDSEGDDDDDDDGGDSSDDGDDGSRGGNGGGRSGNGGSRGGDSGSSRGGNSGGRRGSDGGGSSSKGSNRASG

SEQ ID NO: 51876 - protein, 404 aa, Zea mays
  Coding DNA Sequence Number=SeqID_10097
  Gene Ontology: Mol. function=oxidoreductase activity; Cellular component=apical plasma membrane; Biological process=flavonoid biosynthetic process
  Homolog annotation: Hit_ID=Q7G767; Match level="QueryCoverage=88%, HitCoverage=88%, E-value=2e-79, Identity=46%"; Hit description =Putative NADPH-dependent oxidoreductase
  Pfam annotation: Domain name=Aldo_ket_red; Domain location=16-357; Score=329.9; E_value=4.5e-96; Accession=PF00248.11; Description =Aldoketo reductase family
MASTGTTAAAVPEVTLRSGNGKPMPMVGMGTASFPVVHEAVRDAVLAAIEVGFRHFDTAFLYGTEKPLGDAVAEALRRGLLRSREELFVTSKLWCSQTHADLVLPSLRETLENLQMEYVDLYLIHWPVCLRPAGGPPKFPNRKEDAVPLDVAGVWRAMEECQRLGLARAIGVSNFTTRHLDKVLAIAAVPPAVNQVELNPAWQQRTLRAYCADRGVHVAAYSPLGGQNWDGRGNAVLDSEVLAEIARARGKTVAQVSVTLAAGCVFWRAVAVSWTFAPAGEGLVDHAFVVYCLVCHTILFSFAFVFPYYQVALRWIHEQGVTCIVKSYNRERLKQNLEIFDWELTDDDRLKISHIPQRKVVEASGLFSQEAFRFAHSSLHASQLVQASLPCDREATSLSEAALS

SEQ ID NO: 51877 - protein, 85 aa, Zea mays
  Coding DNA Sequence Number=SeqID_10098
MAVEAPLEIDCEHLELSLFCSLPYVSESTLAGLTGGLVAYAWYDILPSPFWCMGHCRDRNAKVPTTGVDWCQCHKSAGIRIRRRA

SEQ ID NO: 51878 - protein, 152 aa, Zea mays
  Coding DNA Sequence Number=SeqID_10099
MAGFGAKKLWASRGWANWVWPGAGLRGGELSAPGERKGWRWVEEAGWETWRHGSDGGRGACTRGVGSGAARGGRKLIELHGGYTNLAVGKRVGAMACGLASSAGAWREGARRGKSREGGAHVWVPREKSAMEADVEVEAGTSGSAMGERAPS

SEQ ID NO: 51879 - protein, 169 aa, Zea mays
  Coding DNA Sequence Number=SeqID_10100
  Gene Ontology: Mol. function=protein serine/threonine phosphatase activity; Cellular component=integral to membrane; Biological process=protein transport
  Homolog annotation: Hit_ID=Q8VYE2; Match level="QueryCoverage=80%, HitCoverage=36%, E-value=1e-31, Identity=56%"; Hit description =Import inner membrane translocase subunit TIM50, mitochondrial precursor
  Pfam annotation: Domain name=NIF; Domain location=4-119; Score=-72.0; E_value=0.034; Accession=PF03031.8; Description=NLI interacting factor-like phosphatase
MALTMFITVFISLFLQSYVERVFERLNSRGTISHRLSRPATKYVDGKHYRDLSKLNRNPAQVIYLSAHALESCLQHENCVEIKPFKLEDKNDTQLLDLIPFLEYVAMARPSDIRTVLASYQGHDVVAKFIERSRNTSSVCRNRANLGAYGDGDGSYSSNSYTKSFSRRA

SEQ ID NO: 51880 - protein, 164 aa, Zea mays
  Coding DNA Sequence Number=SeqID_10101
MSGALEGSNSKLVTFGKFQRQLRYNSPDCPVYTGHVRCSKEERPPELTSLGNSLQLLRYNSPDCPVYTGLSGVTAGQRLLLAPTATCSAFNARQRAQRSGTPMLVHRTPYSTCPVRHRTSRRAQKSELQRSEPNGFGDVAVTPDCLVCTGLSGAPYDRQPPPND

SEQ ID NO: 51881 - protein, 212 aa, Zea mays
  Coding DNA Sequence Number=SeqID_10102
MAEARRWALDLGGDSDSGTRLRRTATRRAGEGPTAEARGARATGRKTGGSAPVRHGGPPAAADCGAPCAGVAAPNPSGAKLRWRGAVLLSTCRRLVGTEAEAEGSVMYPSPLARGCHTIVVDKVLSMGKSLLRNASAPLYWMTLGASSVTDIEGRAVLGRGGSLLEVATEPVLRFNDGEFYIGQDGVCARGLVHAPFVLDVPLGAVRWRAHA

SEQ ID NO: 51882 - protein, 429 aa, Zea mays
  Coding DNA Sequence Number=SeqID_10103
  Homolog annotation: Hit_ID=Q00UY7; Match level="QueryCoverage=21%, HitCoverage=36%, E-value=4e-20, Identity=47%"; Hit description =Homology to unknown gene
MELCLAARVGTMAVACRRRAPTIGVPKKRHGGGTVRVRCVVTAPMGEKTEYRDSPLERVFMGLFARKMEKRRRRGRVGVGLRELRGRVAAGDVGARAQLEEAVREVLLFMPRPGAPTQFRRQFPPTRWACEFNAALTMPFFRWLVGPSKVVEVEVGGLRQRSEVHIEKCRYLESSGCVGMCVNMCKVPTQDFFTNEFGLPLTMNPSAASVGRGPGVEASLLPEPLFHVDVVCPGLSQASIGPYMHAQSLPAGLGMEEAEMSTIGPKVIENSYLMAKHKSDLEGFKLDVYESVTERFMEYSDLDKDLNNEAAQPEQGYQDGGLALAAPATWHHPSAPTIYVLHLVELLVFEVAPVLTSTSPRSAPTAPSRCCRAGYVAWLSASPFRVHISDPHARRFVLRFEQNLHSPELLIIFSSRDQRHLSSRMDSSQ

SEQ ID NO: 51883 - protein, 174 aa, Zea mays
  Coding DNA Sequence Number=SeqID_10104
  Subcellular localization annotation: CTP_CleavageSite=30; ConfidenceScore=5.28e-01
MVLTSVANTSFSILLLFSLPSCLRLCATPSSTEGVGAGASSPYSSDTIPDTDPCSGYCMSMRTFHNTRAPSFSPLSDVPFVFPTFALLFPTCCPGPRSQPRVGLDPDRSLCVSPLSCFGYLGDEESRSHYQNPALCRVLGALPSAFYRAFGKEVFVECRTRQSSTLGNDRVYRE

SEQ ID NO: 51884 - protein, 104 aa, Zea mays
  Coding DNA Sequence Number=SeqID_10105
MAQTHSIGGAATSDHREKEFCSYVWCEVNFAYTMFVCVTTASSEVTSYLKSKLVPGNLESQASCALDNFFLPNNIPDHCVNWNMEQPPGKTVLPQGWYGTPLAD

SEQ ID NO: 51885 - protein, 150 aa, Zea mays
  Coding DNA Sequence Number=SeqID_10106
MVNGPFSRAIAVLPVEILQWSGHHYSHENQANPLLPPFEAARGNPRVPLTEVLFPSTAMVGIRGHGVEAQASVAQSRKPGKLRQERMRSVVGIEWRVWRRIFIAQLALASTDSADRGTPAMRAERRSAPMASVCDRAGKGETLTSGAVDQ

SEQ ID NO: 51886 - protein, 38 aa, Zea mays
  Coding DNA Sequence Number=SeqID_10107
MAVPGGTRGDSDPRVVFSVDGGPGGRWKFGVRRCEDLI

SEQ ID NO: 51887 - protein, 300 aa, Zea mays
  Coding DNA Sequence Number=SeqID_10108
MDGSRYLNPIGPQFLIWAVRRASNGARIPLPQPCRTVAHPPNRDGAIAGDPILHIPELIPRATRCKLKRTQWGCFHGALPAATRHGVSRPQVWRIHGGIQRRRATPESMLVKFGHEAILHRSRNMTKLRDGNYQRTRRESLGAGRVANDGEAIAVAAGKAGAIFAEQYAESKRPRGAREADPRAPVVGASVRKQVPEMGRARTLSPPGGPNYHLAAQDNTKAAGFPFMVDSLLFPPFVLRLALTHLGWDTRRQFTRRSRDPRGRNADRHLPPKWCILQLKMVNRYLKKRDRIKGEHKKDK

SEQ ID NO: 51888 - protein, 60 aa, Zea mays
  Coding DNA Sequence Number=SeqID_10109
MTATHSARLRSCDAWATAMEDELIFVDRELDVGAGASWSPIKRRVEFKLLDRLLVRSLKF

SEQ ID NO: 51889 - protein, 103 aa, Zea mays
  Coding DNA Sequence Number=SeqID_10110
MRLRSCWVLNAAAFVSVRAYLRMALSAAAPITEDNMDQRERARGWAGGMVQELGFEDEEEAGEGSCGERRWIWCSGKGCKNARRTILPDSLVERKSPTSFGGN

SEQ ID NO: 51890 - protein, 95 aa, Zea mays
  Coding DNA Sequence Number=SeqID_10111
MEAITSAIWKANKTSSNNKVKKIEPVYDYDLVTRPWVFGNPRVVTVLARPPPGAGVSVASGQKKLFQRALSEQEIINDYIARKKKQFAGEIPYST

SEQ ID NO: 51891 - protein, 479 aa, Zea mays
  Coding DNA Sequence Number=SeqID_10112
  Gene Ontology: Mol. function=protein serine/threonine kinase activity; Cellular component=integral to membrane; Biological process=multicellular organismal development
  Homolog annotation: Hit_ID=Q2R440; Match level="QueryCoverage=92%, HitCoverage=60%, E-value=1e-103, Identity=37%"; Hit description =Leucine Rich Repeat family protein
  Pfam annotation: Domain name=LRRNT_2; Domain location=34-74; Score =56.4; E_value=9.1e-14; Accession=PF08263.3; Description=Leucine rich repeat N-terminal domain
  Pfam annotation: Domain name=LRR_1; Domain location=104-126; Score =11.7; E_value=1.9; Accession=PF00560.23; Description=Leucine Rich Repeat
  Pfam annotation: Domain name=LRR_1; Domain location=128-150; Score =12.4; E_value=1.4; Accession=PF00560.23; Description=Leucine Rich Repeat
  Pfam annotation: Domain name=LRR_1; Domain location=152-174; Score =7.5; E_value=11; Accession=PF00560.23; Description=Leucine Rich Repeat
  Pfam annotation: Domain name=LRR_1; Domain location=176-198; Score =15.9; E_value=0.14; Accession=PF00560.23; Description=Leucine Rich Repeat
  Pfam annotation: Domain name=LRR_1; Domain location=200-222; Score =9.3; E_value=5.3; Accession=PF00560.23; Description=Leucine Rich Repeat
  Pfam annotation: Domain name=LRR_1; Domain location=224-246; Score =8.8; E_value=6.5; Accession=PF00560.23; Description=Leucine Rich Repeat
  Pfam annotation: Domain name=LRR_1; Domain location=248-271; Score =6.7; E_value=16; Accession=PF00560.23; Description=Leucine Rich Repeat
  Pfam annotation: Domain name=LRR_1; Domain location=299-321; Score =13.9; E_value=0.57; Accession=PF00560.23; Description=Leucine Rich Repeat
  Pfam annotation: Domain name=LRR_1; Domain location=352-373; Score =5.4; E_value=28; Accession=PF00560.23; Description=Leucine Rich Repeat
  Pfam annotation: Domain name=LRR_1; Domain location=377-399; Score =1.0; E_value=1.8e+02; Accession=PF00560.23; Description=Leucine Rich Repeat
  Pfam annotation: Domain name=LRR_1; Domain location=401-423; Score =9.8; E_value=4.2; Accession=PF00560.23; Description=Leucine Rich Repeat
  Pfam annotation: Domain name=LRR_1; Domain location=425-447; Score =11.4; E_value=2.1; Accession=PF00560.23; Description=Leucine Rich Repeat
  Pfam annotation: Domain name=LRR_1; Domain location=449-471; Score =13.5; E_value=0.79; Accession=PF00560.23; Description=Leucine Rich Repeat
  Pfam annotation: Domain name=LRR_1; Domain location=80-102; Score =1.3; E_value=1.6e+02; Accession=PF00560.23; Description=Leucine Rich Repeat
  Pfam module annotation: Pfam domain module=LRRNT_2::LRR_1::LRR_1::LRR_ 1::LRR_1::LRR_1::LRR_1::LRR_1::LRR_1::LRR_1::LRR_1::LRR_1::LRR_1: LRR_ 1::LRR_1; Domain
  Pfam module annotation: Domain location=224-246::248-271::299 -321::352-373::377-399::401-423::425-447::449-471::80-102
MATLHSMVTLLLLPLLLLTARPASSSSSIDRYEKHHDREALLALKEALIGSSGLLSSWNSSSSDVCRWAGVTCSRRHAGRVVALSLRQRNLGGSISPAIGNLTFLRSLDLFDNMLSGEIPRTMTRLRRLSFLELAYNYLAGEIPEGLANCSNLAYLSVEVNQLHGGIPSGLGLLSRLQVLYVGENSLTGHVPPSLGNLSALQRLALYQNKLEGAIPEGLSRLRYLRYIQAARNSLSGTIPPRFFNISSLQYFGFSSNRLHGRLPPDAGRHLPDLQVLLLGGIGNNFSGTLPASLSNATKLQELGLAHNSFEGKVPPEIGKLCPESVQLGGNKLQAEDDADWEFLRHFTNCTRLAVLDVGGNALGGVLPRFVANFSGPVNTLIMEKNRMSGSIPLGVGSLVHLEDLEFGGNNLRGVIPEDIGRLRNLKFFTLEENLLSGGIPTSFGNLTQLLSLFLSNNRLNGSIPENLGSLRRAEIASV

SEQ ID NO: 51892 - protein, 101 aa, Zea mays
  Coding DNA Sequence Number=SeqID_10113
  Homolog annotation: Hit_ID=Q5N7Y3; Match level="QueryCoverage=74%, HitCoverage=19%, E-value=4e-34, Identity=86%"; Hit description =Putative lysine ketoglutarate reductase trans-splicing related 1
  Pfam annotation: Domain name=DUF707; Domain location=1-101; Score= -99.3; E_value=0.025; Accession=PF05212.3; Description=Protein of unknown function (DUF707)
MGLRSQPGLEPDKGLTWQMTKRRGDQEVHKFVEIMATVFSRDAWRCVWHMIQNDLVHGWGLDFALRKCVEIANVREWLLDFFMNEVIDVGGSCRVEVASHN

SEQ ID NO: 51893 - protein, 65 aa, Zea mays
  Coding DNA Sequence Number=SeqID_10114
MAQQMLSLRVPIYMPNALQLGGPYMSLNFAILAKGRCGAQGWWSTAEVKVMRARADGLGVVKGEC

SEQ ID NO: 51894 - protein, 58 aa, Zea mays
  Coding DNA Sequence Number=SeqID_10115
MGAAEEVHGAAGEEEEELELGEREPGVLKNKLDHNLAHDFSAHEQRQLFHPKNLVVEF

SEQ ID NO: 51895 - protein, 92 aa, Zea mays
  Coding DNA Sequence Number=SeqID_10116
MTIDDLFEIFVEHLVAIIQGKSDAALGMTSSEETCQNSGRDGDFTPRRPMGAVPRHTRHERGNQLPTAQQGQREERSVTGLKLSDPRGRAVE

SEQ ID NO: 51896 - protein, 128 aa, Zea mays
  Coding DNA Sequence Number=SeqID_10117
  Subcellular localization annotation: CTP_CleavageSite=22; ConfidenceScore=5.26e-01
MGQEQQAQAVSRLLHPRTSVTRSTQRRSSPLSPKGPRLPFLCVKSYDDSDDSQGLAVEVWTYIQAVERSGLEGSDESEYSSDDEDSSEEDDDDDDEGGGDGDGGGRGGSSGSKDGDGGSSRGSNKASG

SEQ ID NO: 51897 - protein, 144 aa, Zea mays
  Coding DNA Sequence Number=SeqID_10118
MTGADACAAVGLSGSAPRHPDDQRSKKGGRGGAIFHKGKSSRDVGKPSSERKDRQEHPDRHWRNYRPMRTEEGEVAVADRSPRPLAKTNNDHFQKLMDSLCQSHGFPVRHKLRECELLKRFISNPPAKKQSRRVDKADITRSPR

SEQ ID NO: 51898 - protein, 158 aa, Zea mays
  Coding DNA Sequence Number=SeqID_10119
  Gene Ontology: Mol. function=protein binding; Cellular component =intracellular; Biological process=amino acid metabolic process
  Homolog annotation: Hit_ID=Q01FY7; Match level="QueryCoverage=98%, HitCoverage=61%, E-value=1e-40, Identity=54%"; Hit description=[R] KOG3157 Proline synthetase co-transcribed protein
GVPNLDMVESVDDEKIANRLDRVVADLGRKPLKVLVQVNTSGEESKFGVDPSGCMELAKHVKLNCPNLVFSGLMTIGMLDYSSTPENFKVKYSIFWDAEIVRWLTAGKRCARSLGIPEEQCELSMGMSADFEQAIEMGSTNVRVGSTIFGAREYPKKN

SEQ ID NO: 51899 - protein, 251 aa, Zea mays
  Coding DNA Sequence Number=SeqID_10120
MASYSASTGSETFAPESQIIFGSLSFLAQETGELRLVGDDKASAMGLGPKRSTRTKEEEYQRQCQARILAREATLRQQQDELDALVQRLDRVYRNIEQRCLKAEQPQAKKIYDQITESSDGHLQVPWKLLEPKEGGRGGAIFHKGKSSRDVGKPSSERKDRQEHPDRHWRNYRPMRTEEGEVAVADRSPRPLAKTNNDHFQKLMDSLCQSHGFPVRHKLRECELLKRFISNPPAKKQSRRVDKADITRSPR

SEQ ID NO: 51900 - protein, 91 aa, Zea mays
  Coding DNA Sequence Number=SeqID_10121
MAQGHISLSAGREAYGQGPCGSGFGYYFPSGPQFPFRGQWPREHMAHGVRLFGPHDQSNKWFSSLDPVNGKEYIKFGDKSRGKVSLVAPFE

SEQ ID NO: 51901 - protein, 164 aa, Zea mays
  Coding DNA Sequence Number=SeqID_10122
  Subcellular localization annotation: CTP_CleavageSite=34; ConfidenceScore=5.11e-01
MTSMALSSLRKQGNISRIHVAPLAALLQGSRHFSAGHGSCSEPQLGMVVSQFKRGTGEPGLGFATKDCSATCFGKVGEWSRLKPLEKPSTTPKLIKIIPPKPITPVRHGVIEEPVRAPQKQVWVPKPNHLKNTLDTLSDISSDPLPRDPQPQPHQKPKTQTDST

SEQ ID NO: 51902 - protein, 169 aa, Zea mays
  Coding DNA Sequence Number=SeqID_10123
  Subcellular localization annotation: CTP_CleavageSite=56; ConfidenceScore=5.28e-01
MDSILVAAPAVDVVANTAVRGSAQAAASPVMPSDLMGCRVEAFPWVAPQSSVPSPVAAYVVHKSVRDVVLVVRTASASPGPPDCSHQEVPPSEGGDAKAEERKRLESASLPDIAALETIERMLGGFEDAILIAQASVTGDLVPSGGGSGGGAAISLGGGRAALGECRLR

SEQ ID NO: 51903 - protein, 91 aa, Zea mays
  Coding DNA Sequence Number=SeqID_10124
MSMYSSVNDPDRGSIEPLTLSEIKARVKVISVLPSEPFMDEDLLHPLSWGMLGISPLAPSLPPLPEGGGTVQLEHKRKRSDRETLGRMSHL

SEQ ID NO: 51904 - protein, 770 aa, Zea mays
  Coding DNA Sequence Number=SeqID_10125
  Gene Ontology: Mol. function=protein binding; Cellular component =nucleus; Biological process=cell cycle
  Homolog annotation: Hit_ID=Q5ZC88; Match level="QueryCoverage=99%, HitCoverage=100%, E-value=0.0, Identity=82%"; Hit description=CUL1
  Pfam annotation: Domain name=Cullin; Domain location=15-674; Score =874.5; E_value=5.1e-260; Accession=PF00888.12; Description=Cullin family
MAGQERRTIDLEEGWAFMQKGITKLKNILEGKPEPQFSSEDYMMLYTTIYNMCTQKPPHDYSQQLYDKYRESFEEYITSMISYSERSKAAWMGVFLAFVDGEQIVLSEPGAHMSTSNLVLPSLREKHDEFMLRELVQRWSNHKVMVRWLSRFFHYLDRYFISRRSLTPLKEVGLTCFRELIYQEIKGQVKDAVIALIDKEREGEQIDRGLLKNVLDIFVEIGLGQMECYENDFEDFLLKDTTEYYSVKAQSWILEDSCPDYMIKAEECLKREKERVGHYLHISSEQKLLEKVQNELLAQYATPLLEKEHSGCSALLRDDKVEDLSRMYRLFSKISRGLEPISNMFKTHVTNEGTALVKQAEDSASNKKVFVWKIIELHDKYVAYVTECFQGHTLFHKALKEAFEVFCNKGVSGSSSAELLATFCDNILKKGCSEKLSDEAIEDALEKVVRMLAYISDKDLFAEFYRKKLARRLLFDKSANDEHERSILTKLKQQCGGQFTSKMEGMVTDLTVARDHQTKFEEFVAGHPELNPGIDLAVTVLTTGFWPSYKTFDINLPAEMVKCVEVFKEFYQTRTKHRKLTWIYSLGTCNINAKFDAKPIELIVTTYQAALLLLFNGSDRLSYSEIVTQLNLSDDDVVRLLHSLSCAKYKILNKEPASRSISPNDVFEFNSKFTDRMRRIKVPLPPVDEKKKVVEDVDKDRRYAIDASIVRIMKSRKVMGHQQLVAECVEQLSRMFKPDFKAIKKRIEDLITRDYLERDKDNANTYKYLA

SEQ ID NO: 51905 - protein, 166 aa, Zea mays
  Coding DNA Sequence Number=SeqID_10126
  Homolog annotation: Hit_ID=Q5JKX2; Match level="QueryCoverage=19%, HitCoverage=17%, E-value=2e-08, Identity=75%"; Hit description =Alanine racemase-like
  Subcellular localization annotation: CTP_CleavageSite=44; ConfidenceScore=5.04e-01
MAAPARSFGGSRNACARRQKRAAAGMPARGDSRTACARQEDGLRAAAGARQQEEGRARAAAEARQRIRALRLLTSGHHQPLTSAVASSAKAEMASVAAAEVAAAALRSVLSRAQQAAARAGRAPGSVRVVAVSKTKPVPVIRGVYDAGHRCFGENYVQELIDKAPQ

SEQ ID NO: 51906 - protein, 153 aa, Zea mays
  Coding DNA Sequence Number=SeqID_10127
MLLDHYQDVAAGVKCGEGVEPVHGEQQKGRAASMAPWGNGRLVPESRGSGRAWLVARTGWRPGGLTASMARVGVSAREERLGVAAGKLLRWREEQRRWGGVKLLEPGQTQLGLMAAMGETPRERAREDEAGRAQEIMLGNDIFAKVPGAVKTG

SEQ ID NO: 51907 - protein, 362 aa, Zea mays
  Coding DNA Sequence Number=SeqID_10128
  Gene Ontology: Mol. function=sequence-specific DNA binding; Cellular component=nucleus; Biological process=regulation of transcription
  Homolog annotation: Hit_ID=Q75L34; Match level="QueryCoverage=51%, HitCoverage=32%, E-value=1e-40, Identity=55%"; Hit description=WRKY transcription factor 5
  Pfam annotation: Domain name=WRKY; Domain location=223-283; Score =138.5; E_value=1.9e-38; Accession=PF03106.6; Description=WRKY DNA -binding domain
METKPERHHRHEEARDGEDDAVAMEHGALSLQRGGATLFGWRQDEEAGRRRRVEIREVDFFSRDSRARSHDDAGDGRDDVNIGLHLLTTTSPDEEMTAAAAKNQKTRLTTAASYNDDTSAQQLLRVEDEAASDGAGEASPSLSNGGNHNDGGDGKQRRTSSNVTAPPARENGGGERAELPAHKTRVSVRARSEAPMVTNTNNLIPFPCYVDLLKETFLIKNTISDGCQWRKYGQKMAKGNPCPRAYYRCTMAVACPVRKQVQRCAEDKTILVTTYEGHHNHPLPPAAATMASTTSAAATMLLSGPATSRDGAAALLGHPAALFQFHHSSSIPYASTMGHALRLRAVPHHHPRPHADARRRCR

SEQ ID NO: 51908 - protein, 191 aa, Zea mays
  Coding DNA Sequence Number=SeqID_10129
  Subcellular localization annotation: CTP_CleavageSite=67; ConfidenceScore=5.06e-01
MPVLPGNKRRPRQHVQPLPGAPLVPRILPPPPTTNHLSSTYPAARRAVLILIAPIIPSPLRHDLYSRDAHTTPMIRSRPAARALPRSISSYPQHPSSFLEQCRLSYKPYMGSWVRTITTPFRKACTIFGPHKDGGGKKQTQQRPNSAAVVQHVDAERAKLHGEVMACAYDDVQVMWSMLDQARIRDLSASS

SEQ ID NO: 51909 - protein, 184 aa, Zea mays
  Coding DNA Sequence Number=SeqID_10130
MKCSSSWNHEASEVMIKRTSVVHGSRSQQIDQEESIHPKKAVGADPQGGPGGPLAHPKPGPPKTPSRYPERSFSFFTSDGGRQLRLLFVFLRSAPLPLPPSDQRGAICYCYRRPKCPVGQLPARCTAAPCQPASVCSSSWLLAFGVFVWTSAQDPSTCCLLATWLLDVSCCRLPLGLFNASAGQ

SEQ ID NO: 51910 - protein, 60 aa, Zea mays
  Coding DNA Sequence Number=SeqID_10131
MNPIPGNDDRPGGRDSPTPHKETNKLMMMDMCTLPDDDSQDYFAMKKKHIQAKAKEFGFE

SEQ ID NO: 51911 - protein, 249 aa, Zea mays
  Coding DNA Sequence Number=SeqID_10132
MTTIDDYYGQNWYADRDINRRASDYIERTLPRRRTSAPRGLASADAWGPYARSSVYLAPNSELTFFKPHERRGSRAWTKSVARTTASPLSLARSRAALVGPLLSCSARHAWSGTDGASVSALSPLDRTSASLADPLGVATESLSAAGNRGSRPRARLGSPRPYKPAATPQLIQPSSQVGCLLPWSARAPPLACSREEESAWEHQQGWVGLELRPIGSGAPLWAGDSSSRLVIVVMSRLNVTPCSHTAIL

SEQ ID NO: 51912 - protein, 248 aa, Zea mays
  Coding DNA Sequence Number=SeqID_10133
  Homolog annotation: Hit_ID=Q8S8D0; Match level="QueryCoverage=43%, HitCoverage=69%, E-value=3e-21, Identity=48%"; Hit description =Expressed protein
MDSQAPLRPPLAFACFIFLCSSFCAANGMYDRVGAAASDGESRRMRLHTDGSRGDAHAWPGYLYTRAVGRCTPQLYSTCSIEYVSAFEQEVRTLSGQFCGSRLSTYDFYGDKSAKWLQLPADVGEILVSISHYRLQTHCRFWSSGAEPWPNIVPQEAAVAKVFGSRSVERYGPRLTLLEATMRTDDAGGSAFVKLVKQGSAALLNAYARRGFPFDSWEVKALLLEALVSEDAAVVQAERFEQANESCV

SEQ ID NO: 51913 - protein, 699 aa, Zea mays
  Coding DNA Sequence Number=SeqID_10134
  Gene Ontology: Mol. function=protein serine/threonine kinase activity; Cellular component=membrane; Biological process=protein amino acid phosphorylation
  Homolog annotation: Hit_ID=Q5F1Y5; Match level="QueryCoverage=89%, HitCoverage=86%, E-value=1e-154, Identity=45%"; Hit description =Putative wall-associated kinase 4
  Pfam annotation: Domain name=Pkinase; Domain location=379-650; Score =145.1; E_value=1.9e-40; Accession=PF00069.15; Description=Protein kinase domain
  Pfam annotation: Domain name=Pkinase_Tyr; Domain location=379-647; Score=114.8; E_value=2.5e-31; Accession=PF07714.7; Description =Protein tyrosine kinase
  Pfam module annotation: Pfam domain module=Pkinase::Pkinase_Tyr; Domain location=379-650::379-647
MEARCVHLVIVGVLLVLAAAQEATAIAVPGPQCQSQCGGVDIHFPFGIGDNCSRSPRFNVSCQEVQDGIYKPFLSGVFELLNISLLHGTIRELNPISTYCYNSPSGRMESRTSGHDAVSSTFRFSDVHNRFTVIGCNTLAIIYDRTGTGYQSGCVSTCQSLSDVVDGGSCSGRGCCQTAIPKGMDYYNVSFDASFNTSRIWSFSRCSYAVLMEAAAFRFSTAYIKTTRFNDTGAGQVPVVMDWAIREREASSCEVAQQNNGTGSYACVSSNSECVDSQNGPGYLCNCTQGYQGNPYLPGGCHDVDECLALSSAGAILIVAAAVAIFTRRWQRIVQKRLRKRYFHKNKGILLEQLFSSSANNNGTKIFSLDDLQKATNNFDRTRVVGNGGHGTVYKGILADQRVVAIKKSKLVESTEIEQFINEVAILSQINHRNVVKLHGCCLESEVPLLVYEFISNGTLYDLLHHRDRELPWEARLRIAAEVAGALTYLHSAASVSILHRDVKSMNVLLSDSYTAKVSDFGASRSIPIDQTHLVTAVQGTFGYLDPEYFHTGQLNEKSDVYSFGVILLELLTRKKPIVDGDSGYKVNLSSYFLWETERRPLEEIVDVGIIGEASTEAILGMAQLAEECLSLTREDRPTMKDVEMRLQMLRCQQDVAPRAHPAKRTKMISHAIPMAASQHGSRQYSQEQEFILSSRVPR

SEQ ID NO: 51914 - protein, 41 aa, Zea mays
  Coding DNA Sequence Number=SeqID_10135
MGIYSIRMFNSLGTGDPMGNPYPHEYGYVYWGKFIPANVYE

SEQ ID NO: 51915 - protein, 44 aa, Zea mays
  Coding DNA Sequence Number=SeqID_10136
MAGNSPNSDLASNSDLKKGRTLPGLAHPPEDDIGAEARVNYAVE

SEQ ID NO: 51916 - protein, 53 aa, Zea mays
  Coding DNA Sequence Number=SeqID_10137
MEGTSAAIARRQLWSMEHCSLQDMVDGVTWPATLPPVWTVEWDAASAGEDQEE

SEQ ID NO: 51917 - protein, 102 aa, Zea mays
  Coding DNA Sequence Number=SeqID_10138
MPKEIATSSSEGGLVYMRYIYRYRNQFDEPNDDWLEDVEANSDELLVLVFRVRLHTQGYPLWSKVNLIGDRLDVWLVEADGSQLDITPLCASMLLLIRLALQ

SEQ ID NO: 51918 - protein, 180 aa, Zea mays
  Coding DNA Sequence Number=SeqID_10139
MGKGRRGSGWPRRADGKRKRASSPPSEDFGDFDYLEEASSESERSPAPSSPPASSEDSDDSMGLSAAAWTYWRSIKHARLGGSDELGVSLDEVDSSDSSEEWSGGDVDDEGNSSSSGDDGWSDGSKGDDGKGNSDGSSGDGKGDDGMGNGDDSSDDGDGRGDGSRGDNGDGGGDVTCFSS

SEQ ID NO: 51919 - protein, 34 aa, Zea mays
  Coding DNA Sequence Number=SeqID_10140
MGLLILLLMVLHLLLVILLMGLLVLLLMSDRCIT

SEQ ID NO: 51920 - protein, 139 aa, Zea mays
  Coding DNA Sequence Number=SeqID_10141
  Homolog annotation: Hit_ID=Q9AY55; Match level="QueryCoverage=26%, HitCoverage=4%, E-value=3e-08, Identity=81%"; Hit description =Putative arm repeat protein
LTTEEVPQRFRNSDEGSQGPRPPNTFGKPEAASADQEPRQPRCFPPLLLALERIRTDLEALEVPRSRSEDSERDICEAAAAIDHHLAEIMRTEGQVAPALRLEPTTAHQPTMSAAGDKEMGRSEFVRVKSAICAPPPAR

SEQ ID NO: 51921 - protein, 160 aa, Zea mays
  Coding DNA Sequence Number=SeqID_10142
MATRFTVLLNQGLPSQMGGTITLSVLPVNGEGLCTLEVVLQTAYQKGSLLEVRGVPPAEAQGTGTSQTPPPAEAGRKSPTAPSLDTGTPAPRAGGGATPPGDSIDWTPCGESGRCTRQKGRKGITNLREVFRRRTIYELRRQQGSRLFLARQEQQQQEPV

SEQ ID NO: 51922 - protein, 142 aa, Zea mays
  Coding DNA Sequence Number=SeqID_10143
MPAVAHLVLLGHWKMTIVGLLSSGNASPSGLVLHNGSILYLLLVLGLPSCSDLLLGQEGKVPDCFASGTDFLPLSCVGGTTTSTEGTASGIVVDAEVGFVADILAFWNMISAKVVFELLLSDSFGVSMDGEIGLPPRLSCST

SEQ ID NO: 51923 - protein, 165 aa, Zea mays
  Coding DNA Sequence Number=SeqID_10144
  Gene Ontology: Mol. function=structural constituent of ribosome; Cellular component=ribonucleoprotein complex; Biological process =translation
  Homolog annotation: Hit_ID=P42036; Match level="QueryCoverage=92%, HitCoverage=92%, E-value=1e-56, Identity=75%"; Hit description=40S ribosomal protein S14-3
  Pfam annotation: Domain name=Ribosomal_S11; Domain location=28-161; Score=227.7; E_value=2.6e-65; Accession=PF00411.9; Description =Ribosomal protein S11
MSRRKTREPKEENVTLGPTVREGEFVFGVAHIFASFNDTFIHVTDLSGRETLVRITGTILQPGFILDLDVKSGMKVKADRDESSPYAAMLAAQDVAQRCKELGITALHIKLRATGGNKTKTPGPGAQSALRALARSGMKIGRIEDVTPVPTDSTRRKGGRRGRRL

SEQ ID NO: 51924 - protein, 60 aa, Zea mays
  Coding DNA Sequence Number=SeqID_10145
MEYFDRYEGSEGGLALVFRREGGLEAHAPARARGPGASFLPTWAGDEGPAWHGLCRAGRQ

SEQ ID NO: 51925 - protein, 52 aa, Zea mays
  Coding DNA Sequence Number=SeqID_10146
MDSPREAAAARKNQALGSQPLTSSRLVAGGVRLDALSATMERPLPSMATQSI

SEQ ID NO: 51926 - protein, 207 aa, Zea mays
  Coding DNA Sequence Number=SeqID_10147
  Subcellular localization annotation: CTP_CleavageSite=62; ConfidenceScore=5.49e-01
MKQHIKVNKSLDVSMPWCCTKVGVICPKVSTVRSVKLFPFVFLTLPLSMVQNSVAPPQIDVVDSSTVDRPTCIFSEQFRACTENLQAFIIMTFHIEHQEEEMVSEEESTLVPAHAVVGSYLTASIGQVHELDQDKLDFRKEVNTLMKTRLMDQLLPSKAIMVRIGARGPDNLGGLSQETLSNVKGSPIHPPLGALNWYQSRTLHLRD

SEQ ID NO: 51927 - protein, 78 aa, Zea mays
  Coding DNA Sequence Number=SeqID_10148
MGPSEPLDVKWCKCKGTPQEDPKEVGEVWLKRAKLELVWDPSNCLVISTAEDAALENFICKIWKGKCALGPFLLYFGD

SEQ ID NO: 51928 - protein, 82 aa, Zea mays
  Coding DNA Sequence Number=SeqID_10149
  Subcellular localization annotation: CTP_CleavageSite=55; ConfidenceScore=5.08e-01
MVKNFGSKTVQIAMNAVVTSQLLVSLYSAAGPKVCARALPRKLKINIKHRYGTISITMRYQIRVPLKVIPKLSFLSRALETT

SEQ ID NO: 51929 - protein, 240 aa, Zea mays
  Coding DNA Sequence Number=SeqID_10150
MYHTGLTPTTQLHVQSGLPQGLEALLLPMSRLLSLLIMSPPLTPPLLHVRWTAAGEVEVRARDGDKAGDCLFVWPRALLAPSPCAATGPSRSPCIGAGLRRCIRTFVDMPPPWVIPFLLGLLRLRPPPTLRILMSCTNRNMVGHSLLLRMRQRSLMTPTIPRLLLLSIRVKDPFLVTLGHLAPVTFPLLPIWVRDPFLVTQGLLALVTTILLLLLIRARLPHPIFPLAMSLLGTHHTRKT

SEQ ID NO: 51930 - protein, 309 aa, Zea mays
  Coding DNA Sequence Number=SeqID_10151
  Gene Ontology: Mol. function=oxidoreductase activity; Cellular component=membrane; Biological process=response to oxidative stress
  Homolog annotation: Hit_ID=Q5U1M3; Match level="QueryCoverage=90%, HitCoverage=92%, E-value=1e-105, Identity=62%"; Hit description =Class III peroxidase 70 precursor
  Pfam annotation: Domain name=peroxidase; Domain location=47-270; Score=329.1; E_value=7.5e-96; Accession=PF00141.13; Description =Peroxidase
MSSTWLAFAWAAAALVVAAATAHAPHHPSSLQVGFYKHSCPQAEDIVRNAVRRGLVRDPGVGAGLIRMHFHDCFVRGCDASILINSTPGNLAEKDSVANNPSMRGFDVIDDAKAALEAHCPRTVSCADIVAFAARDSACSAGGLEYEVPSGRRDGRVSRQDEVLDNNVPTPTDVVAELIESFKRKGLGQLGWTDPSLDPAYAGHLKARCPWPSSDDQMDPTVVPQDPVTPATFDNQYFKNVLAHKVLFVSDNTLLDNPWTAGIVQFNAAVEKAWQVRFAKAMVKMGKVQVLTGDEGEIREKCFVVNPHY

SEQ ID NO: 51931 - protein, 174 aa, Zea mays
  Coding DNA Sequence Number=SeqID_10152
MGPGKRGRGSPHRAGDKWKSDPSPPSEDFGNSEYSEEEGLVAEVWTYIRSVERAGLEGSDESEVSSNEGGSFGSFEERSSNDSKDEGGGDDSDGGEGDDDGGKGGNGGSGSGGGKASGKAPLFIHVPNAVGVFRGNRRAIADDTGVFRGNRRVMVDAAGVLEVTAERYLTLQTF

SEQ ID NO: 51932 - protein, 296 aa, Zea mays
  Coding DNA Sequence Number=SeqID_10153
  Homolog annotation: Hit_ID=Q8SA97; Match level="QueryCoverage=14%, HitCoverage=8%, E-value=4e-13, Identity=83%"; Hit description =Ornithine carbamoyltransferase
MQAACNRAKWARPFDSNAPSMEVQAHASCNRRAGCYVRATAPPLAPLPRLLDCGVNTATRGNPAVPAKRDGAMREPSLTVRRRGIGGASGGRSKRCFAFAIMTASKEAGPSEGFNGRLRSIRFYAHYWSEPRPASGVIGNSASPDPRAWTRAQPRKTANSAPPDLGLGLGLSPGRRRTPLRPTQGSDSGSAPEDGELRSARPRARTRAQPRKTANSAPPDLGLGHGLSPGRRQTPLRPTQGSDMGSTPKDGELRLARPQGSDMGSTPEDDELRLARPGGSASTSTSTSEEPPPRPA

SEQ ID NO: 51933 - protein, 81 aa, Zea mays
  Coding DNA Sequence Number=SeqID_10154
MGFALLEHLTEIFSFPEVKEFWFMRHPEYSSFLIWTIGTQALKLDEPIKKVLLMKMEKHGRTIPKSKAKEVGRVLICMKDR

SEQ ID NO: 51934 - protein, 860 aa, Zea mays
  Coding DNA Sequence Number=SeqID_10155
  Gene Ontology: Mol. function=RNA-directed DNA polymerase activity; Cellular component=intracellular; Biological process=RNA-dependent DNA replication
  Homolog annotation: Hit_ID=UPI00005A975E; Match level="QueryCoverage =94%, HitCoverage=45%, E-value=0.0, Identity=84%"; Hit description =PREDICTED: similar to Retrovirus-related Pol polyprotein from transposon 297
  Pfam annotation: Domain name=RVT_1; Domain location=56-225; Score =126.8; E_value=6.1e-35; Accession=PF00078.17; Description=Reverse transcriptase (RNA-dependent
  Pfam annotation: Domain name=RnaseH; Domain location=455-582; Score =1.1; E_value=4.6e-05; Accession=PF00075.14; Description=RNase H
  Pfam module annotation: Pfam domain module=RVT_1::RnaseH; Domain location=56-225::455-582
MPGIPRDVAEHSLDIRAGARPVKQPLRRFDEEKRRAIGEEIHKLMAAGFIKEVFHPERLANPVLVRKKGGKWRMCVDYTGLNKACPRVPYPLPRIDQIVDSSAGCETLSFLDTYSGYHQIRMKESDQLATSFITPFGMYCYVTMPFSLRNAGATYQRRMNHVFGEHIGRTVEAYVDDIVVKTRKASDLLSDLEVTFRCLKAKGVKLNPEKCVFGVPRGMLLGFIVSERGIKANPEKIAAITSMGPIKDLKGVQRVMGCLAALSRFISRLGEKGLPLYRLLRKAEWFTWTPEAEEALGNLKALLTNAPILVPPAAGEALLIYVAATTQVVSAAIVVERREEGHALPVQRPVYFISEVLSETKIRYPQIQKLLYAVILTRRKLRHYFESHPVTVVSSFPLGEIIQCREASGRIAKWSVEIMGEAISFAPRKAIKSQVLADFVAEWVDTQLPTVPIQPELWTMFFDGLLMKTGAGVGLLFISPLGKHLRYVLHLHFPASNNVAEYEALVNGLRIAIELGVRRLDARGDSQLVIDQVMKNSHCRDAKMEAYCDEARRLEDKFYGLELNHIARLYNETADELAKIASGRTTVPPDVFSRDLHQPSVKIDDTPEPEAPSAQLEEPSAKSEAPSARPEAPSARPEAPSVQPEVPSAPEGEALRVEEERSGVTPNRNWQTPYLQYLHRGELPLDRAEARWLAQHAKSFVLVGDGKELYHRSPSGILQRCISIAEGQEILREIHSGACGHHTAPQALVGNAFRQGFYWPTAVADAIRIDRTCEGCQFYERQTRLPAQALQTIPITWPFAVWGLDLVGPLQKAPGGYTHPWKGLFAIAKVLKPGTNKLANSQGEVYTNTWNIQQLCRFYP

SEQ ID NO: 51935 - protein, 63 aa, Zea mays
  Coding DNA Sequence Number=SeqID_10156
MAFMVLELSVMVSSGIGFVGGCMSKLEPLGHLLLAPEALNESQSLVLILVLANSGHHMNGWVI

SEQ ID NO: 51936 - protein, 225 aa, Zea mays
  Coding DNA Sequence Number=SeqID_10157
MARRRCRGGRRLRLPTRPGESREAWQAGRLAAVGPAACNSASERQWMALEGGCDVECQTAGAKVGDELTTDLQVRPAVRHSARQVWALASCPVLGAWCQLQSGVANTYTWPSRSLFLLATVGKPCTRPLLVPIRIVGRALYSVTHVPCPPPPADVRSAVPRKAPATRNLINVGRADEASCRKRWDGDGMYARRLRMSCVLSYCGRNQKEPPLLIYIHALREANKQ

SEQ ID NO: 51937 - protein, 335 aa, Zea mays
  Coding DNA Sequence Number=SeqID_10158
  Gene Ontology: Mol. function=oxidoreductase activity; Cellular component=vacuole; Biological process=response to oxidative stress
  Homolog annotation: Hit_ID=Q5Z7J7; Match level="QueryCoverage=91%, HitCoverage=89%, E-value=1e-130, Identity=77%"; Hit description =Putative bacterial-induced peroxidase
  Pfam annotation: Domain name=peroxidase; Domain location=44-299; Score=449.7; E_value=3.7e-132; Accession=PF00141.13; Description =Peroxidase
  Subcellular localization annotation: CTP_CleavageSite=45; ConfidenceScore=5.07e-01
MGTSLARSVALFTLLLCLLLPSHGHGKLSTKFYAKSCPSVAAIVRSVMEQAVAKEPRMGASIIRLFFHDCFVNGCDASILLDDTSTFTGEKNAGANTNSVRGYEVIDAIKTQVEAACKGTVSCADIVALASRDAVDLCPEPTLIRTQCNAMQLGGPTWNVQLGRKDSRAASQSAANANLPGPGSGAASLVAAFAAKGLSARDMTALSGAHTVGRARCLFFRGRIYTDQNVNASFAAARQQTCPQSGGDGNLAPFDDQTPDAFDNAYYTNLMAQRGLLHSDQELFNGGPQDALVRKYSGNARMFATDFAKAMVKMGGLAPAAGTPTEVRFNCRKVN

SEQ ID NO: 51938 - protein, 181 aa, Zea mays
  Coding DNA Sequence Number=SeqID_10159
  Subcellular localization annotation: CTP_CleavageSite=71; ConfidenceScore=5.02e-01
MWGPLAGLPVFVRKRVLVRQSSSKWGPCVRGGGGASGSLIGGDAAPSGDSNPPSLPGSRYSPNRHLPLCLPAATVLRDLSSFGLLLCLGGFPSSTPPPPPPIFTLDDRYASADFSPDPTASDLLPVALSPYPRTAASRSPPWDLSRGKVALSAPGSPMDGVVKPTRKDMLALPQHEELLFL

SEQ ID NO: 51939 - protein, 271 aa, Zea mays
  Coding DNA Sequence Number=SeqID_10160
  Homolog annotation: Hit_ID=Q8H3X1; Match level="QueryCoverage=55%, HitCoverage=66%, E-value=3e-32, Identity=52%"; Hit description =Putative disease resistance response protein-related/ dirigent protein-related
  Pfam annotation: Domain name=Dirigent; Domain location=98-271; Score =80.4; E_value=5.8e-21; Accession=PF03018.5; Description=Dirigent -like protein
MEKGSATAGQQGPGAAADGSPGGDGSRVVQARAGGDEADVGVVCGSTYEAPEIQKNPIEEAQGNPTTKTHENPIQAEEIMIAQLADTVHAYIYGLQHVNSSYQSKQLPAVIVAAGDGPSMHHLHLYMHEKDAGPNSTAVVVVNCTGPPLPAGRGSYGCFGDTRVVDDVLTAEPNRTSPVVGRVQEFHVMASRQESVLIMSLTVVLTDYPPYTGSTVVVVGRNDLLAPVRELPVVGGTGSFRMATGYVLFKTKSWSSDYHDVVLELDVFLRT

SEQ ID NO: 51940 - protein, 94 aa, Zea mays
  Coding DNA Sequence Number=SeqID_10161
MVDFVNNQDQPVTGFNKRGMAVVHDGSGRVATLDLHAPGQGSRRAHIGSCADSQRRADFTAMATANERNHSGGTLPARCMPMAMRFIEKLSTLV

SEQ ID NO: 51941 - protein, 90 aa, Zea mays
  Coding DNA Sequence Number=SeqID_10162
  Gene Ontology: Mol. function=ATPase activity, coupled to transmembrane movement of substances; Cellular component=integral to membrane; Biological process=transport
  Homolog annotation: Hit_ID=Q9LJX0; Match level="QueryCoverage=72%, HitCoverage=56%, E-value=1e-17, Identity=59%"; Hit description =Multidrug resistance protein 11
MGYIRDKVNQGQVLLDNVDIKTLQLKRLRDQIGLVNQEPTLFATTILENILFGKPEATKAEVGSTTTSAGSLLFFLVATTLMRVLLLFIF

SEQ ID NO: 51942 - protein, 107 aa, Zea mays
  Coding DNA Sequence Number=SeqID_10163
  Subcellular localization annotation: CTP_CleavageSite=56; ConfidenceScore=5.38e-01
MARGGAAGLHGGAPHRKYMTRRPKRQTAIQTMLRVLRTEANRLREFSQVAVLRRSRTSADRGFTATLELWRHIPSLHVDNTFWCDYEDLQGPPAKRPRPSSPLEQPH

SEQ ID NO: 51943 - protein, 117 aa, Zea mays
  Coding DNA Sequence Number=SeqID_10164
  Homolog annotation: Hit_ID=Q6QP51; Match level="QueryCoverage=24%, HitCoverage=13%, E-value=1e-07, Identity=89%"; Hit description =Putative growth-regulating factor 1
MAHSAAEGTLRRGGTGEDAGQGEEDGAVPNFPVRRDGRGEDGGDGRRELRLARPQASASTSASEEGLRLARPWASASASGGVTTSPDLSLGLRRSLRLARPRPRTDYATGDTSLPYP

SEQ ID NO: 51944 - protein, 154 aa, Zea mays
  Coding DNA Sequence Number=SeqID_10165
MGRRETEREGGRQPEGDGRERWKSCGLRVCPAPRSGVLAVGGYKRPRGRERAASRWSMWRLLRGRGRVCLPRPKVESEPLGSGKAEDRRLKAGLNLNPGGRAQRCWSSSGDEPDSEPWFGRSEVNVFRTKPESEPRCRTERTWLSSASEPESET

SEQ ID NO: 51945 - protein, 90 aa, Zea mays
  Coding DNA Sequence Number=SeqID_10166
HYGTGGYEIDGSGYGYGAAHLNGAATPGGTRHSDGGAGEAKGETKALHARPCAQEALRLGREPRGPAQGTRQARVREAGGEGAGLPRAGP

SEQ ID NO: 51946 - protein, 127 aa, Zea mays
  Coding DNA Sequence Number=SeqID_10167
MRDLANGEEELVEGSPYLEVSGLLFWLEGLLELVLLFAGPEREKVDYSLAKGKVDYSLAGCASELPPTMKWQLGNRPRKIHRIGLLGKQASQSSIKSKSSEFPLSPRQQSNSHFCFPKKDSIPMSHV

SEQ ID NO: 51947 - protein, 124 aa, Zea mays
  Coding DNA Sequence Number=SeqID_10168
  Gene Ontology: Cellular component=mitochondrion
MVKDHHKETLAHALVAQPVPSQISSVPSLPQSTEWLLDSGASHHVTGDLLRTCPLILLMLVQILSPLEWSGDGTDGCSGEARDALDETDSVCPKGPIRWIIWIEEEMGGCTTLPQRKKTTLSQK

SEQ ID NO: 51948 - protein, 587 aa, Zea mays
  Coding DNA Sequence Number=SeqID_10169
  Homolog annotation: Hit_ID=Q69KN1; Match level="QueryCoverage=99%, HitCoverage=66%, E-value=1e-109, Identity=58%"; Hit description =Putative SMA-9 class B
  Subcellular localization annotation: CTP_CleavageSite=58; ConfidenceScore=5.42e-01
MAGRQPIVGGISTTSVKVEPTTMPPIVSAPAFSHVTPISNVASQGISALQTSSPSLISQEANMGNDNVQEHKPIINPVQQPIRPGGHGSLLNNLSQVRLMNSTSLGGGATSMGLPNMGATPIQVHMSNMISSGMTSTPSVISSMSGPGQPISTQQMVQSTALGSFGSNTPTVTGNSTIAVSSSLTNNQSSMGMGQSVQSVAQGGLVSGSQLGQGGIVANQNVMSTLGPTAISSTPAMMPTPGMVPQTGVNSLGVNNNSAMNMPITQQHANAQQPPPKYVKIWEGTLSGQRQGQPVIICKLEGYRSGTASETQYVGKADFLVFRTLNHHGFLVQLQEKKLCAVIQLPSQTLLLSMADKAGRLIGMLFPGDMVVFKPQASTQQTPMQQQQLQQFQQQQQQLQQHMHMQPQGLPLQQSQMQLQQQQPQMQPMQQQQPSQMQQQMQSMQQQMQPMQQQMQHQQQQMQHQQQQMQQMQQQQQQQQQQQQQIQPQQQQMQQMQQQQQQQMQPQQQQMQQMQQQQQQMQPQQQQMQQMQQQQQQMQPQQQQQPQMVGTGMGQQFMQGHNRAVQMMQGKITPQGPGSMPGGGFLP

SEQ ID NO: 51949 - protein, 147 aa, Zea mays
  Coding DNA Sequence Number=SeqID_10170
  Homolog annotation: Hit_ID=Q69KN1; Match level="QueryCoverage=94%, HitCoverage=13%, E-value=6e-32, Identity=55%"; Hit description =Putative SMA-9 class B
MAAADRQLVVAVEGTAALGPYWSTIVAEYVEKIVRRCQLGNEAQAARTEYYRSMVLRSCQESFCASELPGQKLVGTPPELALVVFHTHGPYSAFDVQRSGWTKDVDAFLSWLSGILFSGGGFSEASTCEGLAEALKMMSSSWPKVTS

SEQ ID NO: 51950 - protein, 154 aa, Zea mays
  Coding DNA Sequence Number=SeqID_10171
MTMTLAMKASDPVSTWTMIVVPHHHKVSDQHTLESLVARKDAEVEAGVDEQSLLKEGGTEGPTTVGTYAQSWTSEDEVLMSPFPGMDDESSEDDLDYFVALDLSATESTPRVAPNVAVSLPRVVPDELRGKIRIRMSKRSVGMLGESSQGTGVP

SEQ ID NO: 51951 - protein, 104 aa, Zea mays
  Coding DNA Sequence Number=SeqID_10172
MAAINGVVKEENMGRERRNDRRFPAAGEVRGRGRAPRSWARGGVWRGAWRGQGACVERGQGASAWRRWKEEEERPGWATPGGEREEGMGAPGRSGLGLMGRLGF

SEQ ID NO: 51952 - protein, 129 aa, Zea mays
  Coding DNA Sequence Number=SeqID_10173
MGKEDSRLIRTDMTFSRVDTKSLIKAKGVKSVELTIRTKTLVVAFFIAEVKARYDGCVAPASSTGSNDGVANSGDGGGGSNGEELERENGASSGSGCSAAVGADARQSGSRGWHGSGAWMRRGSWRVGL

SEQ ID NO: 51953 - protein, 193 aa, Zea mays
  Coding DNA Sequence Number=SeqID_10174
  Gene Ontology: Mol. function=transcription factor activity; Cellular component=nucleus; Biological process=regulation of transcription, DNA-dependent
  Homolog annotation: Hit_ID=Q6YVX0; Match level="QueryCoverage=86%, HitCoverage=82%, E-value=7e-45, Identity=55%"; Hit description =Putative AP2 domain-containing protein
  Pfam annotation: Domain name=AP2; Domain location=23-88; Score=120.6; E_value=4.5e-33; Accession=PF00847.10; Description=AP2 domain
  Subcellular localization annotation: CTP_CleavageSite=18; ConfidenceScore=5.20e-01
MENHQLQQQQQQPAAPVAAAASSPQYRGVRRRKWGKWVSEIRQPGTKVRVWLGSFDSAEAAAVAHDVAALCMRGPRDAQLNFPGSAGWLPRPASTDPADIRAAAAEAAERVRREPALVGTDAAAEPGRGPASASRLDLAVGDEFDDDLESPRLWTEMAEAMLLDPPKWGPDGSDGSEGSGSQNWPHGSLWDAC

SEQ ID NO: 51954 - protein, 148 aa, Zea mays
  Coding DNA Sequence Number=SeqID_10175
MEQMKKEYEFEMMKLRQLSAEVAVNLSSAQVKMDDMKAEINHVRSLNENYRILVANCHTLGNKYHREMLKTFSTAGALSKDRKVSDFDLEVSTTQDVIEVKHTKAEAKDAATEAEAISANAIEKAKDDEILKICEQIYKEAMRSDPGN

SEQ ID NO: 51955 - protein, 166 aa, Zea mays
  Coding DNA Sequence Number=SeqID_10176
MRPSGWLAREGSLGVVSPPESIKDRADLGLMIEDLLTGHMPHHGKSEAEALQRSFGARKRRWLNRVFDDIGFLYPDHPIMAQDLKKRKKKVTTRRRKILKVHDGSTPQASEEILATPEALIETKIEELPPMRSKEAKIKEAIDLIAQRVKPLEVLPESDKEEHDGE

SEQ ID NO: 51956 - protein, 80 aa, Zea mays
  Coding DNA Sequence Number=SeqID_10177
MDDPDEYPRTGYGENVGRQLTDSDAVETPGRGTELPVAEFSRRREIAHVPRVTPSSYGHERPPQVLTILLGATPRMETQR

SEQ ID NO: 51957 - protein, 84 aa, Zea mays
  Coding DNA Sequence Number=SeqID_10178
MELLLQGWITSAQRMSITPVREELGVDVDTLEGGRREVAVGSPIEDREEAAAFADPSIAREEGSWGAGGGVAGLAAPKCGFPRR

SEQ ID NO: 51958 - protein, 79 aa, Zea mays
  Coding DNA Sequence Number=SeqID_10179
MAVKTPPRRRSRRRGRTRRNGVPVSNRRKATRSGHDGEEFGGAITSWEDKEGECFVRFGYGGGFVPSSIIAKRRRLLIG

SEQ ID NO: 51959 - protein, 204 aa, Zea mays
  Coding DNA Sequence Number=SeqID_10180
  Gene Ontology: Mol. function=sequence-specific DNA binding; Cellular component=nucleus; Biological process=regulation of transcription
  Homolog annotation: Hit_ID=Q2RBC4; Match level="QueryCoverage=23%, HitCoverage=14%, E-value=1e-10, Identity=51%"; Hit description=WRKY DNA binding domain containing protein
  Pfam annotation: Domain name=WRKY; Domain location=31-78; Score=11.5; E_value=2.8e-05; Accession=PF03106.6; Description=WRKY DNA -binding domain
MAKRDGYMDSSCGYSNGTPKRLVQDSSSHVQAHAKKCYYRCTYHQDHGCPATKHVEQTNSQDPPLFRVTYTNEHTCCSAHVSDYMASSVHIQQIADASLRKLADVEIPSLTHCFSGHELIKEENDAVISSLLTAVSGCDVATSDGVHAAIQENTPARMSRSSNEASSSISPPVLLPASDNPKTDFIEPLETQWFEPLDLGWFIE

SEQ ID NO: 51960 - protein, 282 aa, Zea mays
  Coding DNA Sequence Number=SeqID_10181
MPKHISLSDVECSSRSVPDFGFGDGDHRILDPEVSSPPLPFFSLSLSLSLLFFPTRALPLPLPARDPDPDPTPARGPCPPAPARPLPPRSPARARPPSGLLGAARNPASPAPAHPFPLPPRHARRGALDPARPPAPLPHAAALDPARTPAPLPPAAAIGPCPPLPAAALGSPPRSLPGDPPARPLLCPVRDPAPASPRGDHAPAPPRGGAPGSPARPPLGPSARRLGPPARSPAVALGARPRPARSAPAGGYEIDDSGYDYGAGEDEAVEGDFQEFQDYDEF

SEQ ID NO: 51961 - protein, 57 aa, Zea mays
  Coding DNA Sequence Number=SeqID_10182
MASLSLVCPSPESQGLDEDEASNAIYPKRSTKLPESKNRYRSRRFVSAVETVRELTT

SEQ ID NO: 51962 - protein, 493 aa, Zea mays
  Coding DNA Sequence Number=SeqID_10183
  Homolog annotation: Hit_ID=Q5VP53; Match level="QueryCoverage=34%, HitCoverage=45%, E-value=2e-88, Identity=73%"; Hit description=AP2 DNA-binding domain protein-like
  Pfam annotation: Domain name=AP2; Domain location=103-176; Score =123.3; E_value=6.7e-34; Accession=PF00847.10; Description=AP2 domain
  Pfam annotation: Domain name=AP2; Domain location=205-270; Score =106.6; E_value=7.4e-29; Accession=PF00847.10; Description=AP2 domain
  Pfam module annotation: Pfam domain module=AP2::AP2; Domain location =103-176::205-270
METYGHGLVKDELHSGGGCGGGGIGGQGLYCGATATTPRAAAPAAATTGSGGGVVKSVRRRKRAPPPPSSLVVATAMSGCKDEAAGGDKSASSNSSNNASKRSSRFRGVSRHRWTGRFEAHLWDKGTWNPTQKKKGKQVYLGAYNEEDAAARAYDLAALKYWGPTTYTNFPVVDYEKELKVMQNVSKEEYLACIRRKSNGFSRGVSKYRGVARHHHNGRWEARIGRVFGNKYLYLGTYSTQEEAARAYDIAAIEYRGINAVTNFDLSTYIRWLKPPGAEDGGTTATTSSGIAAAMPPPPSSLCIQAGGLLQHPHGAAAAAAAMLHDVDDDLYRGRHALFSAGGSLDDVGSSSVYAAGTGPGPTAAALCVGGRPSPTSSSTALSLLLRSSVFQELVARNGGAPQQQQQLVPADDDGAVSLRRASSSTPKLSSTRRRRATWATVAALRGARGRTRRTRSLLHVRARRQLRAHRALALGLLRSSDGSDALISVPGQ

SEQ ID NO: 51963 - protein, 126 aa, Zea mays
  Coding DNA Sequence Number=SeqID_10184
MMVIASVAATSFAILLLLSLPSCIRLYATSFSAEGVGAGASSPYSSDTNPDIDPCSGYCTSTRTFHHARTIVFAVIGRPVRLPGLRPILPPQPAAPAHGRSREPTNAHRHGYGVHKVQQKPKKKLS

SEQ ID NO: 51964 - protein, 195 aa, Zea mays
  Coding DNA Sequence Number=SeqID_10185
  Gene Ontology: Mol. function=GTPase activity; Cellular component =intracellular; Biological process=small GTPase mediated signal transduction
  Homolog annotation: Hit_ID=Q5VQ69; Match level="QueryCoverage=99%, HitCoverage=38%, E-value=1e-73, Identity=88%"; Hit description =Putative GTP-binding membrane protein LepA
  Pfam annotation: Domain name=EFG_C; Domain location=6-83; Score=29.8; E_value=9.7e-07; Accession=PF00679.14; Description=Elongation factor G C-terminus
  Pfam annotation: Domain name=LepA_C; Domain location=84-192; Score =259.2; E_value=8.4e-75; Accession=PF06421.3; Description=GTP-binding protein LepA C-terminus
  Pfam module annotation: Pfam domain module=EFG_C::LepA_C; Domain location=6-83::84-192
MDVFHQRLEQEYGAQVISTIPTVPYIFEYGDGSQRALLKYRLPLKEIIVDFYNELKGITSGYATFDYEDSEYQQADLVKMDILLNGQPVDAMATIVHNQKAQRVGKDLVEKLKKFIERQMFEITIQAAIGSKVIARETLSAMRKNVLAKCYGGDITRKKKLLEKQKEGKKRMKRVGSVDIPQEAFHELLKVSNSK

SEQ ID NO: 51965 - protein, 123 aa, Zea mays
  Coding DNA Sequence Number=SeqID_10186
MAHRRAPPPWGREVGAAVLRSEPAGKATGLDTECNVTSQVSRENWVQQVLKGWFSINQSTNTKMVALLKSVCGQLRRLVCISITTGWMTGLQEEQLPAQVGSSDKAQERPLCTQWNRSFCQDL

SEQ ID NO: 51966 - protein, 122 aa, Zea mays
  Coding DNA Sequence Number=SeqID_10187
  Subcellular localization annotation: CTP_CleavageSite=60; ConfidenceScore=5.60e-01
MELASAMAALCPLPCCSYGSPSPCQARPPSVPSPSSPQPLSLAVISLGLWSSHRGWWSLLASRTTAVVFITVTPTRAKDALHAAEPQREATRAPHDTLTWCSTKCIKVLDAQLEETTSVCFH

SEQ ID NO: 51967 - protein, 226 aa, Zea mays
  Coding DNA Sequence Number=SeqID_10188
MATEIRLIFDGHSPRYRAPAPSLAAPATPPPLPCPVALPPPGPIPLSRLGSRPSSPLAPVARGSRRPIAAEPSYRHHSAIVAELFLIKRQSGLAKGATANSAPPDPRARTRAKTRKTANSAPPDPRARTRAKTRKTANSAPPDPRARTRAKTRKTANSAPPDPRARTRAKTRKTANLAPPDPRARTRAKTRKTANSAPPDPRARTQAKTRKTTKLRSTRPQGSDSG

SEQ ID NO: 51968 - protein, 204 aa, Zea mays
  Coding DNA Sequence Number=SeqID_10189
MLMNDVLQLDNDNADCRGSKTHTVHTTPGGHKHAVINEDTIVKDIALQSEDKDGDDGGLVSAEGFNIARSKGRAVCNDHLKLTLGFRKLTVRGIHKGALLLPDEGDGPLTHTRGGDNGLGCGKSNKGEVNHNHLIMRGATNKEAQQGKESYVSSLHYKIEVEQYKGQRPTETKKKEKEKKKKHDTKTSNPEKQQRASMWVMTIN

SEQ ID NO: 51969 - protein, 747 aa, Zea mays
  Coding DNA Sequence Number=SeqID_10190
  Gene Ontology: Biological process=protein localization
  Homolog annotation: Hit_ID=Q6K796; Match level="QueryCoverage=92%, HitCoverage=16%, E-value=0.0, Identity=68%"; Hit description =Vacuolar protein sorting 13C protein-like
MARTSREVIGSLSMPIGRGATMLKRAPSMRMIQHVSDVKRVLTCPLTKKGQIPNFEDRKKGGVLVLSSCYVERSTHSYFQRLKDSINNVESDFCIGLSPDGPWESFTAALPVTVLPKSLNNNRFAFEVTMRNGKKHATLRGLAVIANDADIKLEVSICPVNMLDNSMLNTRLASSTSVIDEVFENQWYRPIAGWGHNPSIGHRKDLKQWSTKDCSYSSKAFFEPGLPSGWRWTSPWKIERLNFVDNDGWAYAADFQNLNWPSSSWRSSKSPHDFVRRRRWVRSRQQSQEQSAEIPRKVLATVSPHSSTALPWTSMIRDMDLCLQVRPYSEKSEESYSWSQICSLGSESIPKQQHSSLSRQSTVKQSVVSSRNSVLKLAELEKKDVLSYCHPPVSTERYFWFSVGIDASVVHTDLNVPVYDWRISFNSILRLENKLPYEAEYAIWEISTKSNMVEKQHGIVPSGGSVFIYSADIRKPIYLTLFLQNGWILEKDAVLIMDLLSLEHVSSFWMVQKQSQRRLRVSVEHDLGASDAAPKTLRLFVPYWIKNHSSIPLCYRIVEGESTESTEADSLSRPDSLSRVSKSSKFSLKYSSKSLVRRGTMSHRNMQVLEDIEDCSTDYVMLSPQDYLNRSAGMRSESRDNNFSPARVAISMAVGGCTQYSVGVSLFELENKEHVDIKTFASDGSYYWFSVQLKMASDRTKAPPRLTLYRLKDKTGERASSLVVKDFRVAPPSPGFDSPRERIFRLG

SEQ ID NO: 51970 - protein, 744 aa, Zea mays
  Coding DNA Sequence Number=SeqID_10191
  Gene Ontology: Biological process=protein localization
  Homolog annotation: Hit_ID=Q6K796; Match level="QueryCoverage=97%, HitCoverage=19%, E-value=0.0, Identity=66%"; Hit description =Vacuolar protein sorting 13C protein-like
MELSTAIGVLVVSPEFTFYDSSKLSMDDSLHIEKLLRAKMDFSFMYASKEKDIWARSVIKDLTIEAGSGLLVLEPVDVSWKYTSVNEKTNIVLVSTDVCIHLSLSVASLMLKLQNQTLAALQFGNISPLISCTNFKRIWSSPKGADVLHLLRSVPPSQVVVAISNTYGRVRKPLGFRLIHVLPGSLDLIDSCQSTEENECSIWIPVPPPGYLALGCVVNIGRLPPSNHVVYCLRSDLATSATFSDCIHTLSPAAGIISEFSIWRVDNVIASFCAHNSIEQPTKTEALNLHHVLLRNPNCYIVKDLSADSSIQNDQSSDQLNHRKSLSGWDVLRTLSRPSNYCMSTPHFERIWWDKGNDTKKPFSIWRPLPRFGFASVGDCITEGFEPPTLGILFKCDTVVSEKPVQFTKVTQIDRKGLEEIFFWYPVPPPGYASLGCIVTKTDEMPSKDSICCPKLSLVSQANMSEDPISMSSSSKGPCCWSIWKVENQGCTFLARPDVKKPSAQLAYRIADHAKPKARENITAELKLGCLSVGILDSSCGMVTPLFDTTIANINLATHGRFETLNAVLICSIAASTFNRHLEAWEPFVEPFDGIFKIFVLQPYHYSAIIEGLKHMIPVNTLLPKLGTIENMKKADDSSYSALNEDDFQRVGLPIIDDGNGHSYFCALRLLIGSHASDQHKVFPQSARTRCVKPVETTELLTHCAKWNEHFIFEVPEQASANLEIEVTNLASKAGKGMRTAYVY

SEQ ID NO: 51971 - protein, 180 aa, Zea mays
  Coding DNA Sequence Number=SeqID_10192
  Homolog annotation: Hit_ID=Q6K796; Match level="QueryCoverage=37%, HitCoverage=1%, E-value=5e-23, Identity=79%"; Hit description =Vacuolar protein sorting 13C protein-like
MTLMLISSCSYIQFDLGQLKVRNEFSWHGGKETDPSAVRLDVLHAEINGINMAVGVNGTLGKCMIRDGRGINIEAATLFLIESPKGSDKPDKDFDLFEDYGLPTPQKRWGRVDGSRAEILELRGTELAISPRPSRTEEYEKYLPWTLLRKDCIEDYLFFCEGVETRECRHGGMVVPNIVA

SEQ ID NO: 51972 - protein, 284 aa, Zea mays
  Coding DNA Sequence Number=SeqID_10193
  Homolog annotation: Hit_ID=Q6K796; Match level="QueryCoverage=52%, HitCoverage=4%, E-value=1e-40, Identity=53%"; Hit description =Vacuolar protein sorting 13C protein-like
MASSASASEGKAERLAASRRGGASHGAERAIRSRGTMVESAQLLAETRSGERQRMSWPRGPVEVFCSVLMPQQGSITGREESLDPKNDPLMRADDIILTEHVFLQKEDFIQLSPVRQLIVDGCDIDEFIYDGCGGTVSLCEEFDKKGQNGALLRRCVYLNMGSSYSISSEDDVEVSVLESSFTNDEDCLNLEEHKKRNLQNAIDGPTNQILNFTFEAQEVEFMELRRLVRSFESGVDVAKRPHMSNRIIEVQRTTFRAWGRGEMEQEEKGSKRPVWNQHTIHIA

SEQ ID NO: 51973 - protein, 236 aa, Zea mays
  Coding DNA Sequence Number=SeqID_10194
  Homolog annotation: Hit_ID=Q6K796; Match level="QueryCoverage=85%, HitCoverage=9%, E-value=1e-31, Identity=60%"; Hit description =Vacuolar protein sorting 13C protein-like
METATALQLKLEKVTRRAQEQLQLVLEEQSRFGLDIDLDAPKVRIPLNANQPLLGNEYFVLDFGHFTLHTRDAQNIYSIPENLDQDTLLGHTFDDNQFCSLLDRCGMSVIIEQALELTSTLVIEFRNEIEKAMWMKALVQATYRASAPPDVNILGDPVSPPPESSTPRLNSLGLVDLVVNGSVIETKLSLYGKLDRKSSDSQELLMLELLGNGGKEQGFREDAGGAEEGNADASEV

SEQ ID NO: 51974 - protein, 43 aa, Zea mays
  Coding DNA Sequence Number=SeqID_10195
MVDNITNTTLLPTSSSYPRNFTLPMKRATSSGWSKDLQPQQQG

SEQ ID NO: 51975 - protein, 227 aa, Zea mays
  Coding DNA Sequence Number=SeqID_10196
  Homolog annotation: Hit_ID=Q6YWF5; Match level="QueryCoverage=46%, HitCoverage=8%, E-value=9e-09, Identity=36%"; Hit description =Putative pattern formation protein GNOM
MAPQPGTYLEALKGLRLLAVPSFVVFLLRGNSEKPRSILAVHSKELDVGFVMTEETLADVMTNEEWLTLSVIANAQKLELDHDNIFLKDYDAWIYIKEGGVTYRHDTDMSSIRHRYISFKYTFFAQFLQYSPFLNDIRSEDAGATVSSGSLAALHEVVSLPGPTPPDAALGYEVIDVVASYRFEARAMPAAEEDVLMRTLQALLACLRVPALGDRRVVAAAAGEGKK

SEQ ID NO: 51976 - protein, 354 aa, Zea mays
  Coding DNA Sequence Number=SeqID_10197
  Gene Ontology: Mol. function=protein binding; Cellular component =extrinsic to membrane; Biological process=protein localization
  Homolog annotation: Hit_ID=Q6K796; Match level="QueryCoverage=76%, HitCoverage=6%, E-value=1e-120, Identity=79%"; Hit description =Vacuolar protein sorting 13C protein-like
MLVLYLLRKYLGEYVEGLSVEALRISVWKGDVVLKDLKLKAEALNSLGFPVTVKAGFVGTITLKVPWKCLGKEPVIVLIDRLFVLAHPAPDGQTLKEEDRQKLFEAKLQQIEAAEAATLEATNRNSRGGPAPGGNSWLYNLISTIIGNLKVTISNVHIRYEDSVSNSGHPFASGFTLSKLAAVTVDEDGNETFDAGVALDKLRKSVELHRLGIYHDSDSNPWKLNKNWEALNRTEWSEIFQDGIEDGSQSSIWAVNRNYLVSPINGTLKYKRLGKNERGDPDTPLEKASLVLSDVSLTVTEAQYYDGIKLLEAFSRFRTRVDVSHLRPVVPVKEDRRAWWRYAVLAGLRQRKLW

SEQ ID NO: 51977 - protein, 224 aa, Zea mays
  Coding DNA Sequence Number=SeqID_10198
  Gene Ontology: Mol. function=helicase activity; Biological process =viral genome replication
  Homolog annotation: Hit_ID=Q5VR06; Match level="QueryCoverage=99%, HitCoverage=17%, E-value=7e-47, Identity=47%"; Hit description =Helicase-like protein
MAMGRQNKKLETKTCKGRENRLYILCATSYEDLRRYNNILHPTFKEACRARGLLNDDNEWYNAFDEAARWATSEQLRHLFITMLLYCEVGDEYAFFDKVWQQLTDGIQYRMRKTLNLPSYQMPKIELRDHLIDKLSVLFNKYGSNIKEYNLPQKTNSMGSIYDNRFIEELSYNFDTLSQTAYNLRVKLNDQQLHAFNIIVDTVLSNIFGFFFLSGYGGTEKTSL

SEQ ID NO: 51978 - protein, 388 aa, Zea mays
  Coding DNA Sequence Number=SeqID_10199
  Gene Ontology: Mol. function=transporter activity; Cellular component= integral to membrane; Biological process=transport
  Homolog annotation: Hit_ID=Q9XET4; Match level="QueryCoverage=24%, HitCoverage=50%, E-value=3e-43, Identity=90%"; Hit description=40S ribosomal protein S7
  Pfam annotation: Domain name=Ribosomal_S7e; Domain location=1-115; Score=45.2; E_value=2.3e-10; Accession=PF01251.8; Description =Ribosomal protein S7e
  Pfam annotation: Domain name=Xan_ur_permease; Domain location=133 -385; Score=-165.6; E_value=0.06; Accession=PF00860.11; Description =Permease family
  Pfam module annotation: Pfam domain module=Ribosomal_S7e::Xan_ur _permease; Domain location=1-115::133-385
SQVCKNAYHAFYLAQDVVIVATRRIVRPPKKGSAVVRPRTRTLTAVHDGILEDVVYPAEIVGKRVRYRLDGSKIIKIFLDPKERNNTEYKLETCTAVYRRLCGKDVVFGMSSLLIFSPQELDYLICGQQEIWESRIPGAVTWMLGYKIAIVLSKEDTATVISTMLLVSGLTTILHTFLGSRLPLIQGSSFVYLAPALVIANSEEFRNLTDNKFKHIMRELQGAILVGSVFQIILGYTGLISLFLSADFLKLSSLPVGKIGALLASIPLALAASVLCFTWALIVALGMSTLRYTQAASSRNMIIVGFTLFISLSIPAYFQQYEPSSNLILPSYLLSYAAASSGPVHTASSGLNYALNALLSIDVVVALLVALILDNTVPGSRQERGVYI

SEQ ID NO: 51979 - protein, 134 aa, Zea mays
  Coding DNA Sequence Number=SeqID_10200
  Gene Ontology: Mol. function=structural constituent of ribosome; Cellular component=ribonucleoprotein complex; Biological process =translation
  Homolog annotation: Hit_ID=Q9XET4; Match level="QueryCoverage=73%, HitCoverage=51%, E-value=3e-41, Identity=87%"; Hit description=40S ribosomal protein S7
  Pfam annotation: Domain name=Ribosomal_S7e; Domain location=38-134; Score=-12.0; E_value=1.1e-05; Accession=PF01251.8; Description =Ribosomal protein S7e
MAALSAPLRAIAAGSRVAASDPVKVSVRWRREGKMYTARKKIQKEKGLEPSEFEDSVAQAFFDLENGNQELKSDLKDLYINNAIQMDVTGSRKAVVIHVPYRLRKAFRKIHVRLVRELEKKFSGKVYMLIVATT

SEQ ID NO: 51980 - protein, 43 aa, Zea mays
  Coding DNA Sequence Number=SeqID_10201
MCLYGCARIDNGLIAESEEIAGEDPEQQSVGMRLMALGFNSGN

SEQ ID NO: 51981 - protein, 357 aa, Zea mays
  Coding DNA Sequence Number=SeqID_10202
MKGIIPVITSWSSPSAVQAGFTAERQLQPDEWRDHSPTLVVLLPLGDGGGVRRGRWRSEDAGDSVEGAATQTGKEGPPVSAWFDAHTKIRVGWCGGRVAARPSATRFTPPRGPPGQCPARPSRSLPARDPASSQARHKSQASLAHPLRTARHISQARVHGRRSRHAFRLPFLQPPPVNLAPTTRELPTISLCCANLPGNNPIRVASVLPSSPNRMVPSFETVPYQSSPDVLRLHPVPVEVNPPPSLPFPLPPSAWSTQPGVLLGPCLLAARAARLLAEAPATLCGLLVASPARLLASAPCGLLMARLPGSARPPAACARVQSSGTVRPTPARSWLAASAPGAAWLAASAPNAVLAHG

SEQ ID NO: 51982 - protein, 139 aa, Zea mays
  Coding DNA Sequence Number=SeqID_10203
MDLNLGANIFGAEGVGAIYLGADPVYPADRTIPAHILPRRRLHIRRRPPRPRLPRRASSRHRRRRPPSADWAPARLSSAPAHRPAPPPTPPSHTAPRRPTPPSLLPTILIPSVPLSAVELLVEVLVSSPCRGGAVKIYT

SEQ ID NO: 51983 - protein, 60 aa, Zea mays
  Coding DNA Sequence Number=SeqID_10204
MYSCFSGGHTYTTPLVGWAGATTLTRAWPTGNERFGRMSGCCDKKLKKFRENYDALCVQT

SEQ ID NO: 51984 - protein, 70 aa, Zea mays
  Coding DNA Sequence Number=SeqID_10205
MAGFAEFGHQNSAAAVLMGISVGTWHHNEGCIKAKQLRVEHLRLIHSKNDWLSFTPNGRLTGPSIGIGAG

SEQ ID NO: 51985 - protein, 51 aa, Zea mays
  Coding DNA Sequence Number=SeqID_10206
MGRKSRVAIISVGVACFIVFMMILSVIGLFRLTQTRFDKSRAAMLPFRTTT

SEQ ID NO: 51986 - protein, 354 aa, Zea mays
  Coding DNA Sequence Number=SeqID_10207
  Gene Ontology: Mol. function=nucleic acid binding; Cellular component= intracellular; Biological process=translation
  Homolog annotation: Hit_ID=O24586; Match level="QueryCoverage=59%, HitCoverage=35%, E-value=6e-74, Identity=68%"; Hit description=Gag
  Pfam annotation: Domain name=rve; Domain location=210-347; Score =22.1; E_value=8.4e-05; Accession=PF00665.16; Description=Integrase core domain
  Pfam annotation: Domain name=zf-CCHC; Domain location=92-109; Score =30.3; E_value=7e-06; Accession=PF00098.13; Description=Zinc knuckle
  Pfam module annotation: Pfam domain module=rve::zf-CCHC; Domain location=210-347::92-109
MTPEEILGKFVSGRMMIKEARYVDDALNGPIHEPQPIALKATRSKEALSSKVAQVEAAGLNDEEMAFIIKRFKTALKECKGQPYKNKTKGKRSCFKCGKVGHFIANCPDNSSDQEQGNKREKKKAYKKAKGEAHLGKEWDSDCSSSDSDNEGLAATAFNKSTLVPNERHTCLMAREKKVYASRGSSWIIDSGCTNHMTGEKKMFSSYVKNKDPQDSIIFGDGNQGKLVKQDKSETQGTLKRFLRRAQNEFELKVKKIRSDNGSEFKNLQVEEYLEEEGIKHEFSAPYTPQQNGVMKKMFQPPQYAPWRLEMCGHRNKRSKINRLPQQWCIPQLKIINRFIKRRQVIKGEHKMIK

SEQ ID NO: 51987 - protein, 271 aa, Zea mays
  Coding DNA Sequence Number=SeqID_10208
MKLGFRCFVEPQESAYRPRFSRTSGFLIQERGDGRRAHGTTIRAHSKETVGEGTWLANRACTREAEQQRPASMAGKGNSELETRADGEDKQRGAATGELHGGVQGEARDPIWPSWGRALGLGAENGGEELSWGRDEGGDAEPGTGMTLLMQRLECAVGETDGAGGLGDLPMVMQWYMYPCPIPPYSMVEAREPGNRGTTEGVQGDGASCSREGAAMGDQGKEATVGGTPRELNVRWRAGTDRMKEMENQRREKAERREGMRTHKKYRFGSG

SEQ ID NO: 51988 - protein, 107 aa, Zea mays
  Coding DNA Sequence Number=SeqID_10209
  Subcellular localization annotation: CTP_CleavageSite=49; ConfidenceScore=5.02e-01
MADRRWGGSRTPVGHTPNNSTAQDQGSGAGPCGDGLAQRRRITTQRWPRSVWPWESQGERALGLRGGRGDRDAQFIPQQRRSSMGTRSEIPDEVVGVSVAMASGRQT

SEQ ID NO: 51989 - protein, 103 aa, Zea mays
  Coding DNA Sequence Number=SeqID_10210
MRRALGREGVGHGKKGRAPWEMDDRGDGEEAELAWEGLGDRAREDLLLEHWQLLTMVLPMLQLGYWVASSLALPAAVVNAAMGWVRRCWWGRSLVAIGSLANG

SEQ ID NO: 51990 - protein, 90 aa, Zea mays
  Coding DNA Sequence Number=SeqID_10211
  Subcellular localization annotation: CTP_CleavageSite=65; ConfidenceScore=5.40e-01
MVRGSNPSPQSSDRRFTCVLPSTQPTKEAPPPNRGGGSPASIDPAPRCPNQTSKRCYLQLRLGRRSEATQSEFPHCPPLSHSRWRTNPVD

SEQ ID NO: 51991 - protein, 141 aa, Zea mays
  Coding DNA Sequence Number=SeqID_10212
MSLTQIDAKVKTEREHDGDRRPVTDMAGPGDVQALGAASAYCFATQPERWTGMQGAAEDESREASTWARAGVKRSKASSTATAMATTSTRTQCATMGDPGLRTNTIGGAALGGLGKPTRGPGIRNSSNNSRTLPQNQWSPI

SEQ ID NO: 51992 - protein, 203 aa, Zea mays
  Coding DNA Sequence Number=SeqID_10213
MGATGKLCVSTHDVVIKECVAPMSTNTFAESLRQRTYLVPLLGSSKLCRALGGSPFKTGYEVVHGCWLLAEEGEVSGCSVADTGFVPVGYSGGTAATEGTASGTVVDADVDSGAGALKAGSEGGQPNLSRPVLHLGINIDILRHMVPMEVVSDSSQVIASASAWVASSCSTVRNQSSASHGASAASALAVEVEVEVVVAAPVA

SEQ ID NO: 51993 - protein, 892 aa, Zea mays
  Coding DNA Sequence Number=SeqID_10214
  Gene Ontology: Mol. function=protein dimerization activity; Cellular component=chromatin; Biological process=electron transport
  Homolog annotation: Hit_ID=Q2QPA8; Match level="QueryCoverage=73%, HitCoverage=82%, E-value=1e-108, Identity=34%"; Hit description=HAT family dimerisation domain containing protein
  Pfam annotation: Domain name=DUF659; Domain location=308-460; Score =180.9; E_value=3.1e-51; Accession=PF04937.6; Description=Protein of unknown function (DUF 659)
  Pfam annotation: Domain name=hATC; Domain location=669-751; Score =35.6; E_value=1.7e-07; Accession=PF05699.5; Description=hAT family dimerisation domain
  Pfam annotation: Domain name=zf-C2HC_plant; Domain location=105-160; Score=69.7; E_value=9.5e-18; Accession=PF07567.3; Description =Protein of unknown function, DUF1544
  Pfam module annotation: Pfam domain module=DUF659::hATC::zf-C2HC _plant; Domain location=308-460::669-751::105-160
MATSLDSWAQFCAGANCNTPVERAMQRWRAVEILFPSEAEAAADFVDDGVSIPRVSATASATVAPSAGSGNMEDSQTLIDKALAELPQELADLAKDPKNHARSKDPGWKYGFWPNETKKEMVQCIFCKKVVPAGIRRFKQHLCGGFGDTEKCPKAPAIVRKEMRDYLVQNTRSKATLMEEENVQTAEEECQGEVVVVPSSGTKAKEAKRKVIAQASITSFVGKKYVKSVSSMLCKTPEEVVNQRHSSTSSQPTLEHCTKKSKEAKQIVDDHVADFFYENGIPLNAINSRSWEIMVESIGQYGPGYRSPSYNAMREPVLERAVVKTNELRKRHEESWKEYGCTLMSDGWTDQRHRHLINFLANSPAGTFFLGYVDASSEVVDGIMLANLLEKQIEMIGKEYVVHVVTDNGANFKAAGRILMERIPTLFWTPCAAHCLDLLLEDLGKIKDFSSCINDAKKVSRFIYKHGRILDMMRAKVGGDLVRPAVTRFATSFLTLASMHRHKQALKNLFVSEDWYRNKLSTSMEGKAAENIVLSVPFWNHVEDCLKASQPILIALRIADGDETPAVPEIVSAMNTARTSIKESLKKKPQLLNEVLGYFEKRWENQMEQKLYGAALFLNPAKFFPIRENDRREATRLRSLFNDVLWKMVSDDDEQSIISKQADDYERSEGEAFSKAIAIKDRNRKNPILWWGAYGGLAYELQTLAKRIVSLCCSASGCERSWSTFSQIHTKRRNRLEHKRLNKLVYVSYNRKMANRFTKIRELGSKGKRSNPLHLEEFQWENEWVVADNDSVHQGAAHDEAIGASQGLSGHNLPMVTAAHARNLWTTSEFPTRKRTSRKRPRVPEPTINEEEILEDGEESESEEMQKNGEDGSGPSTSFGTENAFQVDEDLL

SEQ ID NO: 51994 - protein, 102 aa, Zea mays
  Coding DNA Sequence Number=SeqID_10215
MYLTWSQLIELRTKARRTSRYPVHVRRSRRPRYPKPGLKKMAGRSQGCWSSWIALEIKSSRLEALEFNLELKQAKRSQTMKKVKYARSSVGAVISQKREERC

SEQ ID NO: 51995 - protein, 1051 aa, Zea mays
  Coding DNA Sequence Number=SeqID_10216
  Gene Ontology: Biological process=pollen maturation
  Homolog annotation: Hit_ID=Q5Z6I4; Match level="QueryCoverage=94%, HitCoverage=96%, E-value=0.0, Identity=74%"; Hit description =Putative Osnop
  Pfam annotation: Domain name=C2; Domain location=3-83; Score=114.0; E_ value=4.4e-31; Accession=PF00168.20; Description=C2 domain
  Pfam annotation: Domain name=C2; Domain location=554-636; Score=65.0; E_value=2.4e-16; Accession=PF00168.20; Description=C2 domain
  Pfam annotation: Domain name=GRAM; Domain location=706-772; Score =72.4; E_value=1.4e-18; Accession=PF02893.10; Description=GRAM domain
  Pfam module annotation: Pfam domain module=C2::C2::GRAM; Domain location=3-83::554-636::706-772
MRLVVRVIEARGLPPTDADGTREPYAKAQLGKQRAKTKVMRKTLCPVWDEEFTFRVGDLSDNLLVSVLDEDRYFADDVLGQVKVPLTAVLDADNRTLGMQWYQLQPKSKKSKLKDCGEIHLSVSLAQNYSDETTAHWASDDHDLASNSDKSTELVKGSSFSNIPIEVRTQVSEVDETEVAKEDKSNAAPSFVNKLYQMFNSKPKDAEASAPSSSKLNDASDITEEMLSTNSEAPDKQDLDASASMSFDELLKAFGSRGEGKEMPENLSGGVVLDQVYAVAPSDLNTLLFSPSSDFLQSLAEIQGTTGLEIQQWRLENDGEILRRVVSYTKAPTKLVKAVKATEDMTYLKADREMFAVLADVSTPDVPFGNTFRVEVLTCIIPGPELPDDEKSSRLMVSWRINFVQSTMMKSMVENGAKQGLKDNYVQFSELLAKNFRPVDAKDTTYSNEVLSSVQPEQESDWKLAFRVFGNFTLFSSVFAFVYVSAHIFLTSPSIIQGLEFPGLDLPDSVGEVVVCGVLILQGQRVLNMVARFIQAKRQRGDHGVKAQGDGWLLTVALMEGTNMAATKSSDYSDPYVVFTCNGKTKTSSIKFHTLEPQWNEIFEFDAMEDPPSVMEIHVYDFDGPFDKVASLGHTEVNFLKYNNISKLADIWIPLKGKLAQACQSKLHLRIFLNNTRGTEVVKDYLDKMEKEVGKKIAMRSPHTNLAFQKIFSLPPEEFLINYFTCHLKRKMLTQGRLFLSPRIFGFYTNIFGHKTKFFLLWEDIEDILLVPATLSLMGSPSLVIILRKGRGMDAKHGAKQLDSQGRLNFHFQSFVSFNVAHKTITALWKARSLTPEQKVELVEEESETEEFQNVEGESFLGIEDAQMSGVFSSTKPFDVTTLMGIFEGGPLECRVMEKVGCMDYSVTAWEPVRADIYQRQVHYKFDKKSVRHGGEAMSTQQKSPLPNKNGWLVEEVMTLEGIPVGECFNYQSNQARIKKEDLSLLLAHGKGPGHPLCSLNTSHHYNLYNNLVPEMPGHDDDNNLVVFSVVVSIATATTIDSTVSPAMYDS

SEQ ID NO: 51996 - protein, 272 aa, Zea mays
  Coding DNA Sequence Number=SeqID_10217
MTEHLRSVLFDTQQRSPFVECLLVWLREIAAPSAFEGALATAPRDACRVLSDPKTLFKSALNARYTRVPLPHALPPIAPCLLPQTSPLPTILLWPGGLSVLAPGPLARSPGVPRTAGAAAASRCVSFYRTSPARCDPRPRPAPFPSPPHDGRHRAELRGQSPGPVREVPSVTATDAGGGHDFPNEGRRAGGARVAPTAVLEPIGQAHQGCGRRKKNRPVRVFPTDKGTLWKTRSADGHAESWEIDYVKVSNTILPRDIRVLGWCHVPAYFNA

SEQ ID NO: 51997 - protein, 379 aa, Zea mays
  Coding DNA Sequence Number=SeqID_10218
  Gene Ontology: Mol. function=serine carboxypeptidase activity; Cellular component=extracellular space; Biological process =proteolysis
  Homolog annotation: Hit_ID=Q10K80; Match level="QueryCoverage=91%, HitCoverage=91%, E-value=1e-73, Identity=67%"; Hit description =Serine carboxypeptidase family protein, expressed
  Pfam annotation: Domain name=Peptidase_S10; Domain location=23-376; Score=134.2; E_value=3.7e-37; Accession=PF00450.12; Description =Serine carboxypeptidase
MDRYAPALLCLCLGALRAGSAAPTTTGTPDGSELWGYVEVRPKAHLFWWYYKSPHRTSTPSKPWPTILWLQGGPGASGVGLGNFLEVGPLDVDLKPRSSTWLQKADLIFVDNPVGVGYSYVEDDSLLVTTDWEQAADATALLKALAKEVPTLQGSPLFLVAESYGGKYAATLGVSVARAVRAGELKVTLAGLQDVYNFLLDSGMDPVSTDSSPSSSSPSSVLQALRYSTYLGSQLGDSSAGSSNTIDGIMNGVIKEKLKIIPKDVRWVEVSNAVYYALIDELLSYGVNVTVYNGQLDVICSTDGAEAWVQKLKWDGLKTFLSLPRQPLYCGPGKGTKAFVRSYKNLHFYWILGAGHFVPADQPCIALSMIGSITQSPAS

SEQ ID NO: 51998 - protein, 344 aa, Zea mays
  Coding DNA Sequence Number=SeqID_10219
  Gene Ontology: Mol. function=heme oxygenase (decyclizing) activity; Biological process=heme oxidation
  Homolog annotation: Hit_ID=Q94FW8; Match level="QueryCoverage=93%, HitCoverage=92%, E-value=1e-106, Identity=65%"; Hit description=Heme oxygenase 2
  Pfam annotation: Domain name=Heme_oxygenase; Domain location=122-341; Score=-64.7; E_value=0.02; Accession=PF01126.11; Description=Heme oxygenase
  Subcellular localization annotation: CTP_CleavageSite=48; ConfidenceScore=5.62e-01
MPLIDAAASAVAPPPPRRVAQLRFFSTRRPGILSLTATSCSPSPPPPVAAEVPAPPQEAKSKPRPRRYPKQYPGESVGVAEEMRFVAMRLRNPKRTTIKDKSGTEDADAGAGVSEGEAEEDDGGGVKEEHEEEDEGELEEGEWMPSMEGFVRYLVDSRLVFGTIERVVAESTDVAYVYFRKSGLERSASISKDLEWFRKQGIAIPEPSTSGSTYAAYLTELAESNAPAFLSHYYNIYFAHITGGVTIGNKHYIVRKKTYVRDIPLYVPCDLIHHQDKKICEKILEGRDLEFYKWDTDAELLLKDAREKLNELSKHWTRKDRNLCLKEAAKCFQYLGKMVRLIIL

SEQ ID NO: 51999 - protein, 81 aa, Zea mays
  Coding DNA Sequence Number=SeqID_10220
TTDQAKDGGKKSFEVPSAREKVKETRNPKPGVKKKTCKVKVDRVKSYESNIDLKQAKLGKMMKKVKESTILSSVGGKTEKL

SEQ ID NO: 52000 - protein, 795 aa, Zea mays
  Coding DNA Sequence Number=SeqID_10221
  Gene Ontology: Mol. function=actin binding; Cellular component =membrane; Biological process=signal transduction
  Homolog annotation: Hit_ID=Q94LH1; Match level="QueryCoverage=98%, HitCoverage=100%, E-value=0.0, Identity=55%"; Hit description =Putative myosin heavy chain-like
  Pfam annotation: Domain name=DUF827; Domain location=161-691; Score =734.8; E_value=5.6e-218; Accession=PF05701.2; Description=Plant protein of unknown function (DUF827)
KNFHSSSPDLMELLDSNGHGETRAQGAENIAPVSANSPDTSSEMQGKLPHSLTEHQEEMGSPAGHAGSLSPKIVSHIEPARASDDPSKDEGRHAALLTDKSGVEIIYENGFTGASSIIPAAEMKSEEDNMYCRNNVAVTPTKKVESVKGCEGSHTGLVDTSAPFESVKQAVTKFGGIVDWKAYRARSLERRRVMQLELEKVQQEIPQFKEDWETAEVAKAHVIEELERTTRLVDELKHELERAQLEVDQAKQDSELALLRAQEMEQGIDDEASVIAQTQLAVAKERHEKAVEELELLKEELRSTHEQYAVLATERDVAVKRAKEVVRAAKDTEKQVEELTLELIASKESLESAHASHHEVEEHRLGAALAKEQDFLAWDKELQEAQEELNQLHEQIASKTNVEAEAVENERKLLSLKSELAAYVEDKLNEEAGMLQQQGSDEEKEISRSIKQALASKRKELAELKGKLENARNEANLVRVTAESLSSELDREKASLAALQQSEGMASITVSSLEAELDRTEQEIEMVHKKEAEAREKMAELPRMLQRAAQEAEDAKMAAHSAQEELRKAKEEVERAKASATTAGTRLRAVSKEIEASKASERLAIAAAQAMQESEDTGSTGASPRVVTLPVSEYHALSEKVHEAEELANERVAVALAQVELAKVSESRSLERLQEASKETEKKKSDLRIALERAERANEGKLGAERELRRWRAEHVQRRKAHEAAQHAVSPVRTPPRMFVQQKGSYLEGNELRDPKVHKSTGSMDQFVSDKKSRKKKSFLTQLSTLLSRKTHAQT

SEQ ID NO: 52001 - protein, 65 aa, Zea mays
  Coding DNA Sequence Number=SeqID_10222
MAGKRLGVYFQKDQGLNQSFPKDTAYCCRGWRVYLTKVQGPDCKITWPKGYLRIWATRLNLNARD

SEQ ID NO: 52002 - protein, 63 aa, Zea mays
  Coding DNA Sequence Number=SeqID_10223
MAEVVQLGARQWRPSRVVGEDAGPLPGAAVKPLGKRIVRFRYPETFLQLRYMKNIMNIRKMIR

SEQ ID NO: 52003 - protein, 84 aa, Zea mays
  Coding DNA Sequence Number=SeqID_10224
MAGKKRSGAKPEFSPRHSLLLPRIAGLFDKSTGARLQDNMAERVSPDLGHPIELERSRLDRELYESVCDVDPGIQNLWCRLHPT

SEQ ID NO: 52004 - protein, 164 aa, Zea mays
  Coding DNA Sequence Number=SeqID_10225
MAPRMLYDDGGSQPPYGSRGRQQRLDSPDSCPSARLQRSSDGHDTTRTGRQNLFGCHDGMSRALLERVGRAGKDGTALAQGRSLPPAWTLVTPYCKRTRPGCGTNTKVAGFTSYACLPPASSPFALRLAPTHLGWGTLRQFTRRSRDPRVRNADKHLIPTDSPK

SEQ ID NO: 52005 - protein, 408 aa, Zea mays
  Coding DNA Sequence Number=SeqID_10226
  Gene Ontology: Mol. function=protein phosphatase type 2C activity; Cellular component=protein serine/threonine phosphatase complex; Biological process=chromatin modification
  Homolog annotation: Hit_ID=Q67J17; Match level="QueryCoverage=93%, HitCoverage=96%, E-value=1e-118, Identity=53%"; Hit description =Putative calmodulin-binding protein phosphatase
  Pfam annotation: Domain name=PP2C; Domain location=46-266; Score =36.9; E_value=4.3e-08; Accession=PF00481.12; Description=Protein phosphatase 2C
  Pfam annotation: Domain name=SpoIIE; Domain location=75-274; Score= -37.3; E_value=0.1; Accession=PF07228.3; Description=Stage II sporulation protein E (SpoIIE)
  Pfam module annotation: Pfam domain module=PP2C::SpoIIE; Domain location=46-266::75-274
MEVHADVDGSGVPLAVLLKRELCNQKVERPDILFGEANKSKKGEDFTLLLPRCHRTTGEGGGSGGGENAGGGDDDDTISVFAIFDGHNGSLAAIYTRENLINNVLAAIPPNLTSEEWTAALPRALVAGFVKTDKDFQTKAARSGTTVTFVIIDGWVVTVASVGDSRCILESAEGSVYFLSADHRLDANEEEVERVTASGGEVGRINIAGGAGLSNAGGRLVIASDGVWDALCFQEALNYIRGLPAEAAANRIVKEAVTSKGLRDDTTCIVVDILPPEKLSPPLKRPGKGVIKTLFRRRPSDEMSEDQMDRGCLEPDVVEEIYEEGSAMLARRLNINYPSGNMFKLHDCAVCQLEMKPGEGTSVHGNMPKHSRVDPWGGPFLCSSCQLKKEAMEGKLHSRSMDVFTQKL

SEQ ID NO: 52006 - protein, 172 aa, Zea mays
  Coding DNA Sequence Number=SeqID_10227
MKRLQRQFESRDFRRSCSKERGASIAIRQGAGQHAGAMEDEGKKDFEVPRARKKVRKTEVPKATEEKRFLQEVKVGQAVKRHGCLSSKMNNGIKYNILGVLESNPKLKQAKRSKTMKRLSMKVEDYNCSAYSYSYNYSTTPSKQHQQQPSASSKQQHATSSKQQQQHAAARS

SEQ ID NO: 52007 - protein, 402 aa, Zea mays
  Coding DNA Sequence Number=SeqID_10228
  Gene Ontology: Mol. function=transporter activity; Cellular component= intracellular; Biological process=transport
  Homolog annotation: Hit_ID=Q6Z7A1; Match level="QueryCoverage=98%, HitCoverage=98%, E-value=1e-142, Identity=65%"; Hit description =Putative SEC14 cytosolic factor
  Pfam annotation: Domain name=CRAL_TRIO; Domain location=164-350; Score=23.8; E_value=1.2e-07; Accession=PF00650.10; Description =CRALTRIO domain
  Pfam annotation: Domain name=CRAL_TRIO_N; Domain location=46-112; Score=32.1; E_value=2e-06; Accession=PF03765.5; Description=CRALTRIO, N-terminus
  Pfam module annotation: Pfam domain module=CRAL_TRIO::CRAL_TRIO_N; Domain location=164-350::46-112
MAAEASAVQQLAGLLDQVDAPLKKTFELNQHEYGSKDKFTVVKVDGLADSLQNVTLFFDLSHTFGIPGNVHQGYPTETLLRFLKAREWHVNKAHRMLEDSLNWRMQNEIDSILEKPIIPVDLYRSIRDTQLIGLSGYSKEGIPVFAVGVGLSTYDKASPSSWAMGLDILNICQNASMSIKLNISKYYCTCKVVNYYVQSHIQINEYRDRFILPTVTKKYGRPITTCIKVLDMTGLKLSALHQMKIVTAISTVDDLNYPEKTETYYIVNAPYIFSACWKVVKPLLQERTRKKVHVLRGCGRDELLQIMDYSSLPHFCRQEGSGSSKHSSGDADNCFSLDHPFHQELYSFIQEQALNQELIKQGSLHVKIPEQDPEDAKIVEVIEAEFHKLGVQNGSANGIDQA

SEQ ID NO: 52008 - protein, 182 aa, Zea mays
  Coding DNA Sequence Number=SeqID_10229
  Homolog annotation: Hit_ID=Q8S0R0; Match level="QueryCoverage=42%, HitCoverage=36%, E-value=4e-08, Identity=76%"; Hit description=AP2 domain-containing transcription factor-like protein
  Subcellular localization annotation: CTP_CleavageSite=38; ConfidenceScore=5.34e-01
MGVGNPGAGHAEAAVAGDHTRRPRPPPSRNNARRGASSAAARAAGLNFPGRAACYYACGGQQPLSPRSVQRVASDAGMAADAQIVDARAALASPPPVVQPAALAGIIGGAAREGGGGVRGPACAPAPPSNGAGSSTCSRSRETCSAVSAQAQLKSFAKCGVKDVGALEPSIHTFQLSKKAAQ

SEQ ID NO: 52009 - protein, 142 aa, Zea mays
  Coding DNA Sequence Number=SeqID_10230
  Subcellular localization annotation: CTP_CleavageSite=34; ConfidenceScore=5.19e-01
MGLKRPAAGAGAAAAQTVTLSAPAVRDAVRTAVREAEATAKATAPAARVPATAAVPAEIARDGVLCLEEVDGRRWSYVVDAAGAAVKAKGRASVGGAFKAVPLQSPMPPVEDGAGRVGKMLFARQGKKFDYDLKQVLAIVCY

SEQ ID NO: 52010 - protein, 67 aa, Zea mays
  Coding DNA Sequence Number=SeqID_10231
  Subcellular localization annotation: CTP_CleavageSite=39; ConfidenceScore=5.32e-01
MGGGLLAAASALRSSLLLFGPPEQKSSSSPLLERGLNVYVFLARSRVFPHFRALRLAYWLSEPLRQA

SEQ ID NO: 52011 - protein, 68 aa, Zea mays
  Coding DNA Sequence Number=SeqID_10232
MLDHQGAEAWWEERLRVYAPAKVGGVPPVRDPGEGQNKDPKSKRETLRKPNQTNPPSQGWGAKGQAQA

SEQ ID NO: 52012 - protein, 119 aa, Zea mays
  Coding DNA Sequence Number=SeqID_10233
  Subcellular localization annotation: CTP_CleavageSite=51; ConfidenceScore=5.19e-01
VLGASTEGIPVARKGITGSGWKASRGPSRGCRRPRPGCFGSCLDLGERDARSRAAPDPVRRRPDGDQRFQVWVVLACPLLSGFLLGFGSGGPMLFRLLGRSLTEGRVVREMPPREVGGG

SEQ ID NO: 52013 - protein, 119 aa, Zea mays
  Coding DNA Sequence Number=SeqID_10234
MAHQQRRNAVEKNHPAAAKRSLRCEPNPAASGPSTTTTNGPTPRPNRQADKRHHRALKQPDTTQPTTRPPAHHHPHEKSEPRERKDRRVPAGDEGRIQTGPRSSCFSSLRPGSAPSSPQ

SEQ ID NO: 52014 - protein, 693 aa, Zea mays
  Coding DNA Sequence Number=SeqID_10235
  Homolog annotation: Hit_ID=Q29071; Match level="QueryCoverage=55%, HitCoverage=90%, E-value=3e-08, Identity=21%"; Hit description =Gastric mucin
MEGIHGIHPWEGTSQMFGHGSISFGRFDLESLEWEKWSVFTNDRRHEEFGKFNGLVAKKKAYFEEYFKRIRELKALQQQDQQTELHLEYCGDGSDSSQTGEYEPAAAHGAPTESETLVEDSTKQTAAATTFEHGTECYGYHENGSLVNEISAPTHFSPVGDLQHIGKQMKGSVSGKMDILKQDANSSQDVPMIHEIMITPNKRAIEKDSRVGQASKTISKTVKVTSSNVSDHTYVSKGPCSGEPSVINQMAKPENILSLRRPREATSDLVGTTARSGITGVRRPSAALQRPSTKERRPVTKDASRKHAEVTTPCRPSTSERRTVTGESALKPENNAIPCRPVTAHRRPITKESATRQCSIATPRRPSTADRRPATKDLTPKLSNIAAPHRPSTAHRRPISKESAPKHFNVASPHRPSTVERHTSGRDMTSKYVGIATSYLPSAVKQRPITGEGAHKHADVVTLSCSTADRRPIRDVAPKYATLALPRRPSTAERHPIARDIAPKNGLSLRPSTAERRTIARNVEPKHAPAQRPSTAERRPVTRETVLKQANVANSCLPLTPDRRLTKKGDISTLECPSTGGRCPITSGTALWSRTMPYYSKGALVTEVTPQKTITPRVVRNSKLENLSYAKERVELQVDRKQKSSLFNLSSKKTLTSNVRDDQGLEMFKKPNKETSWSRLIGDSLERVQADRC

SEQ ID NO: 52015 - protein, 184 aa, Zea mays
  Coding DNA Sequence Number=SeqID_10236
  Subcellular localization annotation: CTP_CleavageSite=59; ConfidenceScore=5.24e-01
MALVLPSTCPHRPYTQPSRPKWCVLFTHDACVGPARTGVQSSAPRRRHHLPQQRHAPTTATMAVRARWLGSLFPARSGSSLSLAITAVHHAFVSIVVVAVWRLGVEALSSGWREGDLVHGEKGEYYSRFLRRGAHGDVDAHADKDAQFITSARRRVKISWSMPLTPTSSTPSVELLQNSDHLDV

SEQ ID NO: 52016 - protein, 87 aa, Zea mays
  Coding DNA Sequence Number=SeqID_10237
MARETIEMFGYRILQGTTVSLTGQTPRREPPPAAERLHTKPPAQSQVIMGEHRRYTVGEIEGACELRLVRRTTRRLRRWRQRRGAQL

SEQ ID NO: 52017 - protein, 46 aa, Zea mays
  Coding DNA Sequence Number=SeqID_10238
MRRVMWDYLLSFKIYSFYYTNDQKRSLNGHHTRIQQFEKSSLRNSL

SEQ ID NO: 52018 - protein, 47 aa, Zea mays
  Coding DNA Sequence Number=SeqID_10239
MDVNTSGGSQVVGVSVGEAMDAQRISFLGKEERKTNPRPNNPRKSSK

SEQ ID NO: 52019 - protein, 113 aa, Zea mays
  Coding DNA Sequence Number=SeqID_10240
MKLRAEGNGPACRLFNEAKKDYTENTVPKWWEEQRIGIEAKFQENQTYMTKMSNLMMQKGDTSAELNGQAATSTVITRRDGIQASYQMDIQSPLPTLQDIPFFDNFFVVHMLL

SEQ ID NO: 52020 - protein, 75 aa, Zea mays
  Coding DNA Sequence Number=SeqID_10241
  Gene Ontology: Mol. function=nucleic acid binding; Cellular component= intracellular
  Homolog annotation: Hit_ID=Q6S591; Match level="QueryCoverage=65%, HitCoverage=20%, E-value=6e-11, Identity=64%"; Hit description=JAGGED
MKEVATEERPEKNPLDLNNLPDDYTRDGKQVFEEGSSGYRTKKSGGRDGKDECGKVYESLGIGGCIELTVGNRGL

SEQ ID NO: 52021 - protein, 135 aa, Zea mays
  Coding DNA Sequence Number=SeqID_10242
  Gene Ontology: Mol. function=structural constituent of ribosome; Cellular component=ribonucleoprotein complex; Biological process =translation
  Homolog annotation: Hit_ID=P25873; Match level="QueryCoverage=85%, HitCoverage=41%, E-value=2e-50, Identity=84%"; Hit description=50S ribosomal protein L15, chloroplast precursor
  Pfam annotation: Domain name=L15; Domain location=63-94; Score=50.3; E_value=6.3e-12; Accession=PF00256.13; Description=Ribosomal protein L15
  Pfam annotation: Domain name=Ribosomal_L15; Domain location=3-51; Score=-34.3; E_value=0.022; Accession=PF01305.8; Description =Ribosomal protein L15 amino terminal region
  Pfam module annotation: Pfam domain module=L15::Ribosomal_L15; Domain location=63-94::3-51
MKFLLFLLRIKEGMHAGLPKYIPVNLKDIETAGFQEGDEVSLETLKEKGLINPSGRERKLPLKILGDGELKVKLNLKARAFSASAKEKLEAAGCSLTVLPGRKKWVKPSVAKNLARAEEYFAKKRAASSSDSTSA

SEQ ID NO: 52022 - protein, 224 aa, Zea mays
  Coding DNA Sequence Number=SeqID_10243
MAVLRSRGQSERGLLQGRCAGLLPAGVAARVCTEGRRGRRVQGGRHGSCTGELDGVAGTSGVVLLLPALMAAGARSVIEGVGHGGEEETPWAAGEGIGWELFCAMNREATPWKTSRAPTTRAEGGRRALGGGVRTLGAGETGSSAMAPMATAASKAGRLKWGSERLGQGWAAVEGRELIHATEESSTASVPGGRSSPRGRLAATELLRAGCCCRGAGRKKVASG

SEQ ID NO: 52023 - protein, 322 aa, Zea mays
  Coding DNA Sequence Number=SeqID_10244
MDRVVDPDDHNVEGDNGVGVKSGGVGSLRGHRWGWGRAETEEEALRRGHLSGQGGAHGALALKGESRQHARAPGRQQWPLGWWRWPRSTRMKWADPSSVWVTIEASMLRSLRLRLTDPTGQRQLVSNNEQLLTLTGRTRPTRPLPLRSDRRRRGVAFQCGGAGRTPTPRTISPPRARERPPPPPPPPPRARPQRGDGGAQGCPAARAHLFFALLVALFTASLLVVWQLLPIGDGDAAEGDGEAPPRLQGGEAGPMRFSSSSLALRAFDGESRLEAARSGRRLWASLAPVRVALAVGNMNIDAQSLMLATVAKSLVSLGYEVE

SEQ ID NO: 52024 - protein, 168 aa, Zea mays
  Coding DNA Sequence Number=SeqID_10245
MADSLHDLGEPIVDLTLVWNLLRGLSPPYDHLKALIKRIVPFSTFHIMCNELLLEELTIEMRNPASALVLYNAPSGSQAPSGGGRPLALHRSGPLPALHPSSLQPLVLLPPPMEAVVPTRAGTGVVAPHEVVPSGGVVARRSIHSTTPRPGPSPCGCARPRVPPVLRC

SEQ ID NO: 52025 - protein, 452 aa, Zea mays
  Coding DNA Sequence Number=SeqID_10246
  Gene Ontology: Mol. function=pyridoxal phosphate binding; Cellular component=chloroplast; Biological process=amino acid metabolic process
  Homolog annotation: Hit_ID=O04982; Match level="QueryCoverage=99%, HitCoverage=100%, E-value=0.0, Identity=99%"; Hit description =Cystathionine gamma-synthase
  Pfam annotation: Domain name=Aminotran_1_2; Domain location=87-388; Score=-108.1; E_value=0.058; Accession=PF00155.11; Description =Aminotransferase class I and II
  Pfam annotation: Domain name=Aminotran_5; Domain location=94-407; Score=-190.1; E_value=0.012; Accession=PF00266.9; Description =Aminotransferase class-V
  Pfam annotation: Domain name=Beta_elim_lyase; Domain location=105 -391; Score=-109.5; E_value=0.0024; Accession=PF01212.11; Description= Beta-eliminating lyase
  Pfam annotation: Domain name=Cys_Met_Meta_PP; Domain location=72-450; Score=702.4; E_value=3.2e-208; Accession=PF01053.10; Description =CysMet metabolism PLP-dependent enzyme
  Pfam module annotation: Pfam domain module=Aminotran_1_2::Aminotran _5::Beta_elim_lyase::Cys_Met_Meta_PP; Domain location=87-388::94 -407::105-391::72-450
  Subcellular localization annotation: CTP_CleavageSite=53; ConfidenceScore=5.57e-01
MATVSLTPQAVFSTESGGALASATILRFPPNFVRQLSTKARRNCSNIGVAQIVAAAWSDCPAARPHLGGGGGGERLGRRIATDAITTPVVNTSAYWFNNSQELIDFKEGRHASFEYGRYGNPTTEALEKKMSALEKAESTVFVASGMYAAVAMLSALVPAGGHIVTTTDCYRKTRIYMETELPKRGISMTVIRPADMDALQNALDNNNVSLFFTETPTNPFLRCIDIEHVSNMCHSKGALLCIDSTFASPINQKALTLGADLVIHSATKYIAGHNDVIGGCVSGRDELVSKVRIYHHVVGGVLNPNAAYLILRGMKTLHLRVQCQNNTALRMAQFLEEHLKIARVYYPGLPSHPEHHIAKSQMTGFGGVVSFEVAGDFDATRKFIDSVKIPYHAPSFGGCESIIDQPAIMSYWDSKEQRDIYGIKDNLIRFSIGVEDFEDLKNDLVQALEKI

SEQ ID NO: 52026 - protein, 73 aa, Zea mays
  Coding DNA Sequence Number=SeqID_10247
METSCYAADGLQVEAAIVLVRAARITQGMDEMKGHQIGAFVQGMGEAQDHDAVTLMQGVEEAQQEQETETRKL

SEQ ID NO: 52027 - protein, 159 aa, Zea mays
  Coding DNA Sequence Number=SeqID_10248
  Homolog annotation: Hit_ID=Q93VH4; Match level="QueryCoverage=22%, HitCoverage=7%, E-value=3e-08, Identity=75%"; Hit description =Putative integral membrane protein
MSSGRQEGEVGLWEGSWWDWEDEKVVDQGATYALKCNARGHSSTLKIANKMQIPGSGIRMPHQACAAHVDHTADKLGERGNQRKRNGVQFISSRSMIGEARQGCMEREAKRVRWLEHEIRAKALTVARLRLRSGRSGRSRSGRSGRSGPRATILGEGAC

SEQ ID NO: 52028 - protein, 252 aa, Zea mays
  Coding DNA Sequence Number=SeqID_10249
  Gene Ontology: Cellular component=integral to membrane; Biological process=transport
  Homolog annotation: Hit_ID=Q8S7G5; Match level="QueryCoverage=91%, HitCoverage=87%, E-value=4e-61, Identity=71%"; Hit description =Putative transmembrane protein
  Pfam annotation: Domain name=EMP24_GP25L; Domain location=69-130; Score=59.5; E_value=1.1e-14; Accession=PF01105.14; Description =emp24gp25Lp24 family
MAARVPGSLLALLLLILATASPTGALRFDLRSGHTKCISDDIKVGAMAVGKYQVMAPDGVASSSSSPQQLPDSHRISLRVTSPYGNSLHYAENVHSGNFAFTASEAGDYLACFWAPDHRPPAIVAFEFDWRSGVSARDWSAVAQEGSGPNFVKMMELELRKLEGNIKSIHDEMFYLRERHALCLKKTQNTLFCFTEFITCHRSYAVLSFFQGSRDAGTEQENKLKDGLAWFPLARHLPISGGLSVMAPEELL

SEQ ID NO: 52029 - protein, 144 aa, Zea mays
  Coding DNA Sequence Number=SeqID_10250
MGKSKKGGSSSHHSGDKRKREPTPPSEDFGDSEYSKEEFSESEGSLAPASPPASSDDSDDSQGITAEVWTYIRAVERARLEGSDESEYSSDEEDSSDSSEEGSGGDGGDGDDDGGDGGGGSGKGDGDSGKGGDGSSKGSNKASG

SEQ ID NO: 52030 - protein, 89 aa, Zea mays
  Coding DNA Sequence Number=SeqID_10251
MVAHSGDDGMARADGATGWLGQTQGAKPSWNLALEIQTGFEKRSFGLLSQEFLLAFLGTEDLSESGLSLLQCDFLGNFLFSLFNKGRSF

SEQ ID NO: 52031 - protein, 128 aa, Zea mays
  Coding DNA Sequence Number=SeqID_10252
MGRERGGQIYIGGLGLDPARVKFNRPISDGRPRSKGQGQTRARWHRSVPRRGLTGDEGAGHGGALEAWSLAQAQSGRSGGLSHGHHAGAMGDRYPRDWIDSGPDGSWDLRIIRIIDLVLPHSTLRRRN

SEQ ID NO: 52032 - protein, 163 aa, Zea mays
  Coding DNA Sequence Number=SeqID_10253
MGKNKKGQGSSHHFGDKRKHEPSPPSEDFGDSEYSEEEFSSESEGLPVYASPPVLSDDSDDSQGIAAEVWTYIRAVERSGLEGSDELEVSSDEENSSDSFEEEESGGDGDDEGDGGDGGDGSDDEGKGDGGNGSEGDDNGGKGNGNGKGSGGSSKASGKAPLP

SEQ ID NO: 52033 - protein, 155 aa, Zea mays
  Coding DNA Sequence Number=SeqID_10254
  Gene Ontology: Mol. function=transferase activity, transferring hexosyl groups; Biological process=carbohydrate biosynthetic process
  Homolog annotation: Hit_ID=Q10LZ0; Match level="QueryCoverage=62%, HitCoverage=15%, E-value=3e-33, Identity=68%"; Hit description =Glycosyl transferase family 8 protein, expressed
MAGSGEATTRVAGGCCLRPLVRQGCELQEPGYFAFHILTDAQNFYAMKHWFARNSYKNAAIRVINYEAIILEKLPKYTIRQLYLPEEFRVLIRSIKRPTENTRMKYLSLFSHSHFVIPEIFKYLNLDASTTLEYICTHIRIIEYRLICRNIQAIV

SEQ ID NO: 52034 - protein, 226 aa, Zea mays
  Coding DNA Sequence Number=SeqID_10255
  Homolog annotation: Hit_ID=Q40626; Match level="QueryCoverage=28%, HitCoverage=65%, E-value=2e-09, Identity=52%"; Hit description=DNA -binding factor of bZIP class
MANRGRDEPHICRWGLGRVKLCLLEMTDDKETAASTRLSLRLGHVGVMQSSSYSSSSGAAVHPRHIMLTEAEKEAKRLRRVLANWESARQTILRRQGVDSHSHGAAETLALPPGVPIGHSVRGHWHAVMVNCRRHRAGGGNRSLSRKQLSGDGYHILTSGIKAKAMLILFCEKVDRDKDHKIKMLSKMWNNQGIFIGHVVGDALIRTNRCSLRAPKGTKRDKATNE

SEQ ID NO: 52035 - protein, 130 aa, Zea mays
  Coding DNA Sequence Number=SeqID_10256
MGMLNLYPKGYCAIRKDASCMLITVFVRAQVQMRTTSGGAQPKVKAETDSLTGHQQTGRGHTGRRCGGDWQGTNKLRRSAAMHRHGRARDRLGTVEARKPGNNGTRWEPGNSGSLERRLAAEAKRSRWAV

SEQ ID NO: 52036 - protein, 63 aa, Zea mays
  Coding DNA Sequence Number=SeqID_10257
MVSELGRATAGTGEHFGGRALRASASLAHWVGALQGHTGSSEEWEGYRVRPYGAMVGEWEVGI

SEQ ID NO: 52037 - protein, 112 aa, Zea mays
  Coding DNA Sequence Number=SeqID_10258
MLITVFVRAQVQMRTTSGGAQPKVKAETDSLTGHQQTGRGHTGRRCGGDWQGTNKLRRSAAMHRHGRARDRLGTVEARKPGNNGTRWEPGNSGSLERRLAAEAKRSRWAVVG

SEQ ID NO: 52038 - protein, 50 aa, Zea mays
  Coding DNA Sequence Number=SeqID_10259
MGIDEAGHPEVRPVWGCEILDQRSKGRVIRSRMSSISYGVMLPNRRPGRM

SEQ ID NO: 52039 - protein, 145 aa, Zea mays
  Coding DNA Sequence Number=SeqID_10260
MVPPLLPLTGGPARTAAASLAAGPDACAAAGLRATVASLPSADQHPLAGVIPHGTRSELAVDGAPYISDLGPLPDDSPTALHQLQRQHGSPLGFSARATATWAEATAPYQPRRHWSPPSPSYRRLWRLPAAESVLRPSCYNESVP

SEQ ID NO: 52040 - protein, 183 aa, Zea mays
  Coding DNA Sequence Number=SeqID_10261
MRGPLAWQARDDDKRRRGVGESGRARQGGPGPRALREARARGGGRRGRGRRSDSHASTGRGRRGRAWRRGVDGVIGGTSGVDGAKRGTGGVNGAVCGTGRINGAARGVGIGHVAAHGAGRIASRGIKADGAAREDGEGVRGAGNGARRGVRGEQVLGSDSRRESRSMGGEEAARGNTSSSKTM

SEQ ID NO: 52041 - protein, 99 aa, Zea mays
  Coding DNA Sequence Number=SeqID_10262
MRERSTEHPATSAIRGLNATIAADSAPRQYPAIAAVGPSNQSGALRIILWAVIPCSLGGIGNSVPTNWSLSWKIRTGPLRTVDGFPNLTLVSDSTTVFI

SEQ ID NO: 52042 - protein, 116 aa, Zea mays
  Coding DNA Sequence Number=SeqID_10263
MVGSKDHTKVSTTNIIKPAMEALPADGQQPFEDLVMHDEKEVVPYMAGSSGYNPGQFGPVADRVVPHTGPSGYVVDRLTAQVTPYMTISSGYNPGPFCPIADGSAPYDGRSEYETT

SEQ ID NO: 52043 - protein, 64 aa, Zea mays
  Coding DNA Sequence Number=SeqID_10264
MASHCNFYRIFGKHCNLADGEYVLVPEQGAAQEVAPDPAPEPAPEDLPATALEGLNVHLSVGVV

SEQ ID NO: 52044 - protein, 137 aa, Zea mays
  Coding DNA Sequence Number=SeqID_10265
MEGYTKKSIESCIDYISDGPMIDVPVPKHEADEKMHVVISGKQKIVGVENVGDQDEEYNKYEEMNKAEKRRLNRLADAIIQKAEGASPSTLVVVVDQLLRYVLDLARGRLETQLDWAQLRRRRGPGKNLFRGNTTTK

SEQ ID NO: 52045 - protein, 105 aa, Zea mays
  Coding DNA Sequence Number=SeqID_10266
MSGAPEDSYSNLSPSGNSRGDSAIIHRTVRCTPDSVRCSKEERPPELASLGNSLRLLRYNSPDMSGVHRTIRCNCGATATSGANGYLRRIKCAPARTEELCVPSD

SEQ ID NO: 52046 - protein, 510 aa, Zea mays
  Coding DNA Sequence Number=SeqID_10267
  Gene Ontology: Mol. function=RNA-directed DNA polymerase activity; Cellular component=mitochondrion; Biological process=RNA-dependent DNA replication
  Homolog annotation: Hit_ID=UPI00004C1731; Match level="QueryCoverage =99%, HitCoverage=36%, E-value=0.0, Identity=88%"; Hit description =UPI00004C1731 related cluster
  Pfam annotation: Domain name=RnaseH; Domain location=237-374; Score= -29.7; E_value=0.034; Accession=PF00075.14; Description=RNase H
  Pfam annotation: Domain name=rve; Domain location=415-510; Score=3.2; E_value=0.0032; Accession=PF00665.16; Description=Integrase core domain
  Pfam module annotation: Pfam domain module=RnaseH::rve; Domain location=237-374::415-510
MLLGFIVSERGIEANPEKIAPITNMGPIKDLKGVQRVMGCLAALSRFISRLGERGLPLYRLLRKTERFTWTPEAEGALENLKALLTRAPILVPPAAGEALLIYVAATTQVVSAAIVVERQEEGHALPIQRLVYFISEVLSETKIRYPQIQKLLYVVILTRRKLRHYFESHPVTVVSSFPLGEIIQCREASSRVAKWAVEIMGETISFAPWKAIKSQVLADFVAEWVDTQLPAAPIQPELWTMFFDGSLMKTGAGAGLLFISPLGKHLRYVLRLHFPASNNMAEYEALVNGLRIAIELGVRRLDARGDSQLVIDQVMKNSYCRDPKMEAYCDEVRPSGILQRCISIAEGQGLLQEIHSGACGHHAPPRALVGNAFLLGFYWPTAVADAIRIVRPCQGCQFYARQTHVPSHALQTKPITWPFAVWGLDLVGPLQKAPGGFTHLLVAIDKFSKWIEVRPLSSIRSKQAVAFFTNIIHRFGVQNSIITDNGTQFTGRKFLDFCEDHHIRVDWRL

SEQ ID NO: 52047 - protein, 147 aa, Zea mays
  Coding DNA Sequence Number=SeqID_10268
  Gene Ontology: Mol. function=protein serine/threonine kinase activity; Cellular component=chromosome, pericentric region; Biological process=protein amino acid phosphorylation
  Homolog annotation: Hit_ID=Q9LSF1; Match level="QueryCoverage=36%, HitCoverage=12%, E-value=2e-19, Identity=75%"; Hit description =Serine/threonine-protein kinase OXI1
MEDYVAPEIIAGRDHDFTVDWWGLGVVLYEMLYGRTPFRGQSRKETFYRVLTKQPGARRRVARPPFIPPPPPQDEGEDGDEALDVEKVVREVFASNDAEGGKAWPVADGGRVGGGDGDGMETGSLSDGDAVSFGIEMPEKRDLRGEL

SEQ ID NO: 52048 - protein, 177 aa, Zea mays
  Coding DNA Sequence Number=SeqID_10269
  Homolog annotation: Hit_ID=Q9LSF1; Match level="QueryCoverage=29%, HitCoverage=12%, E-value=1e-10, Identity=53%"; Hit description =Serine/threonine-protein kinase OXI1
  Subcellular localization annotation: CTP_CleavageSite=84; ConfidenceScore=5.40e-01
MAVRNGKHSAAPAGFLALPRLGDGAATRSAGLGLVTGASGSCDGAGSRVERSKSTSMMWPLSWMRTFSGLRSRYTMPRLCRYSSASTSSAAYNLRLEKPKKTIRAEISGRNCQTLARLSTASTLRSSLRKILQYDRRDEPKDTFTELVVPHMLRKANEVTNVTLTEYEFNKKNVPHL

SEQ ID NO: 52049 - protein, 56 aa, Zea mays
  Coding DNA Sequence Number=SeqID_10270
MTSSEPWRRFEESLAYTKTSFVVLGFVPFVCDIYGEKYLDYYQKYVFIPLLALDYH

SEQ ID NO: 52050 - protein, 743 aa, Zea mays
  Coding DNA Sequence Number=SeqID_10271
  Gene Ontology: Mol. function=metal ion binding; Cellular component =intracellular; Biological process=thiamin biosynthetic process
  Homolog annotation: Hit_ID=Q9C6T2; Match level="QueryCoverage=75%, HitCoverage=93%, E-value=1e-137, Identity=44%"; Hit description=PPR -repeat protein, putative
  Pfam annotation: Domain name=PPR; Domain location=106-141; Score=3.0; E_value=3.3; Accession=PF01535.11; Description=PPR repeat
  Pfam annotation: Domain name=PPR; Domain location=208-242; Score =29.5; E_value=1.2e-05; Accession=PF01535.11; Description=PPR repeat
  Pfam annotation: Domain name=PPR; Domain location=309-343; Score =36.9; E_value=7e-08; Accession=PF01535.11; Description=PPR repeat
  Pfam annotation: Domain name=PPR; Domain location=344-378; Score =19.5; E_value=0.012; Accession=PF01535.11; Description=PPR repeat
  Pfam annotation: Domain name=PPR; Domain location=412-445; Score =12.6; E_value=0.24; Accession=PF01535.11; Description=PPR repeat
  Pfam annotation: Domain name=TPR_4; Domain location=379-404; Score =11.6; E_value=1.5; Accession=PF07721.5; Description=Tetratricopeptide repeat
  Pfam annotation: Domain name=TPR_4; Domain location=414-439; Score =8.2; E_value=3.9; Accession=PF07721.5; Description=Tetratricopeptide repeat
  Pfam module annotation: Pfam domain module=PPR::PPR::PPR::PPR::PPR::TP R_4::TPR_4; Domain location=106-141::208-242::309-343::344-378::412 -445::379-404::414-439
MVGGLVLSQAQTHHTAAPRTAAPAPAQALEKRPRDQAQPCGTAAAAVSVRSLDEVRKAHARHIKLGLDRSPRHARPLLAACALSGWPGGMELAASIFESLVEPEAFDYNTLMRGHVGGGREPAAALRMYVDMLEAGVRPDSYTFPFALKACAQLAALQEGRQAHIVKLGFQHDEHVQNSLISFYGKCVEPAMARLAFDRVEAEERTAASWSALLAAYTKAGLWGECLESFGAMVLDGWRPDESSTVSALSACAHLGAFDVGRSLHCALLRNTARLNTIMQTSLVDMYAKCGSIEKAAAVFDAMDDKNAWTYSAMLSGLALHGDGRKALQVFDAMVRERHAPDAATYVGVLNACSRAGLLEDGLRCFDRMRLEHNVAPNAQYYGCMVDLMARAGRLDDARALIGSMSTGPTDTAWRSLLNACRIHGDLDLAERALQELRRLGAANAGDYVIVADMHARAKDWAAAAQLRTEAVDWGLAQSPGVSAVEVRGELHRFVSQDRSHPRTSDIYEMLHQMEWQLRFDGYKPDTSEVALDVGEEEKRRVVAAHSQKLAMAFGLLSTAEGAPVRIVTNLRMSKECHAYSALISEIFGREIVIRDRNRLHRFRRGVCSCRDYCVACAAPTAEPLDRVRLTAAKSGPRRHGKLRFARPQGSDSGSAPEDDELRSARPQGLDSGSAPEDDELRFARPQGSDSGSAPEDDELRSAQPQGSDLGSAPEDDELRFARPQGSDSGSAPEDDELRFARP

SEQ ID NO: 52051 - protein, 70 aa, Zea mays
  Coding DNA Sequence Number=SeqID_10272
MANKHEAREPGTKPVVWARWFRASLDAASTDDVEHDDDAREEYDDEDWGRGESCEKEVAVGAGGGGGSAV

SEQ ID NO: 52052 - protein, 173 aa, Zea mays
  Coding DNA Sequence Number=SeqID_10273
MTGNNVGVAQAPRATIRFGNPDNVLDNEEATNRASEAPTLPKGDSLDIVGSFDHLHLDPLGGGNVRPCSLFSIFTKVVEALGLVQGLLSGLPPVKVRKRTWFLAEWDHPHLGLGMIHDLVDWGNPLYSQEASRRPSPMSWVRSVASALSHPDLSCRELPLGRVPCSRQPRSSC

SEQ ID NO: 52053 - protein, 60 aa, Zea mays
  Coding DNA Sequence Number=SeqID_10274
MGSTGGSVDASGVRRKPHRVNLTPGIDPAPFAREASLKEKCALGQISMSILVIRFPTHIN

SEQ ID NO: 52054 - protein, 168 aa, Zea mays
  Coding DNA Sequence Number=SeqID_10275
MNSEQNCPSYSRKFFNLEDEILLRGPPPPLALFSLSPLFPTLAAASQAPPPDPTPRPKPRARTPADRPAPRPTPDGTQAEQPLSASSLPELAPYSLSLSSPFEPPPPSPEFATPLPEPMELAGATPPTVPSLRLDTRPSTVCRSSRVDYELDEPNTFEDDQQDTFEQG

SEQ ID NO: 52055 - protein, 179 aa, Zea mays
  Coding DNA Sequence Number=SeqID_10276
MGVEWNPKVSGRQTTAPPHIGDGIGIARRTGGARHGLRRNWIGQVGRQEQAYGEVYGESEFSGLDGQKRREPTENTVEAARMGAETNTHRREEDRADLDPRADPTALGGMRAARGRSGRTRAAAEGAGVGRRGVADGVATGDDGIVWVSNLRAGVEGKRLGGGRWGLSLVCGFTYPIVG

SEQ ID NO: 52056 - protein, 93 aa, Zea mays
  Coding DNA Sequence Number=SeqID_10277
MKKLLLRLMQLSRCLLLHLLLSLSISGSLVQAILILTSSTCSKGSRHIWMADFRTHFDNFDGLHSELTELHTHIQDTVHDPIITRMNNVHQSF

SEQ ID NO: 52057 - protein, 46 aa, Zea mays
  Coding DNA Sequence Number=SeqID_10278
MKSIEDNGSPCRCPRRSKIISPRMPALCIDEEDGQALHNYNNPSLR

SEQ ID NO: 52058 - protein, 116 aa, Zea mays
  Coding DNA Sequence Number=SeqID_10279
MGAVEAGLKANVTATTCLGEIERWSESTSTRIPPPQRQQQHWCHANGGTEQQRVVPQHEEAALRRRQHVFATGTREILGGVADVEEKARGEGERSRDRGGTKVGSRGEQRGQKAGV

SEQ ID NO: 52059 - protein, 103 aa, Zea mays
  Coding DNA Sequence Number=SeqID_10280
  Subcellular localization annotation: CTP_CleavageSite=51; ConfidenceScore=5.36e-01
MAPSRRPAHHPPEAQHATSTKINLKVHTSTSLSLTIGFGESAKSEASTHVRSSDLRETPRRSHSLLFTARSELLTSRRMFGPTLILSIIDLQAHKSNLDSKVS

SEQ ID NO: 52060 - protein, 111 aa, Zea mays
  Coding DNA Sequence Number=SeqID_10281
MGLSTAARAYWRSIERVGLGGSDESGVSSDEPDSSDSSEEWSGGDGDDEGDDSGDDSGEGDDSDDGGKGVSEGDDGSGSGDNSDCGDGGIKGDGGDGDSGDGKASGIAPLV

SEQ ID NO: 52061 - protein, 53 aa, Zea mays
  Coding DNA Sequence Number=SeqID_10282
MAVLHHADRFSSPRPNFSTVIGTEGSPPENVVASQFSIDRSPRGSLIKVIGVD

SEQ ID NO: 52062 - protein, 185 aa, Zea mays
  Coding DNA Sequence Number=SeqID_10283
MGTHRYHPWRRSREPPLTCNHGKYGRHTCPVAIKTKEDKRRLKRHAIALKRRLKKHVTAIKQKAGGITPSVTNQLLSSISSKTIQAMDRHRSPTTMPLRQLGEFVSWQCCHETKTVWGTKKPPTNKSSTSVSVRHGSSLKRNELPDVTDADIVSAFTYDTTNEALVHELGRGRPKTTIDLLDIAT

SEQ ID NO: 52063 - protein, 229 aa, Zea mays
  Coding DNA Sequence Number=SeqID_10284
  Gene Ontology: Mol. function=transcription factor activity; Cellular component=nucleus; Biological process=regulation of transcription, DNA-dependent
  Homolog annotation: Hit_ID=Q8H443; Match level="QueryCoverage=99%, HitCoverage=72%, E-value=1e-72, Identity=56%"; Hit description =Putative indeterminate spikelet 1
  Pfam annotation: Domain name=AP2; Domain location=24-88; Score=86.5; E_value=8.1e-23; Accession=PF00847.10; Description=AP2 domain
MRNWTKEEFVHILRRQSTGFARGSSKYRGVTLHKCGRWEARMGQLLGKKYIYLGLFDSEIEAARAYDRAAIRFNGPDAVRNFDSVSYDGDVPLPPAIEKDVVDGDILDLNLRISQPNVHDLRSDGTLTGFGLSCNSPEASSSIVSQEAPMQEEENRSEPACPQPFPSWAWQTQGSRAPVLPATTAASSGFSTAAATGVDAATAGHSVPPPSGSLRQFSGYHQLRFPPTA

SEQ ID NO: 52064 - protein, 230 aa, Zea mays
  Coding DNA Sequence Number=SeqID_10285
  Gene Ontology: Mol. function=nucleic acid binding; Cellular component= ribonucleoprotein complex; Biological process=mRNA processing
  Homolog annotation: Hit_ID=Q8LHN4; Match level="QueryCoverage=93%, HitCoverage=92%, E-value=1e-55, Identity=52%"; Hit description =Putative 29 kDa ribonucleoprotein A, chloroplast
  Pfam annotation: Domain name=RRM_1; Domain location=152-224; Score =80.6; E_value=5e-21; Accession=PF00076.12; Description=RNA recognition motif. (a.k.a. RRM, RBD, or
  Subcellular localization annotation: CTP_CleavageSite=51; ConfidenceScore=5.69e-01
MAAALFSSSLSPRFLALSSPKPAAPAATAFLPFRLPPRAVSAPGRRVFEPVAVAVSSEYKTEGAEQEGEDGSEEFSEDLKLFVGNLPFSVDSAQLAGLFEQAGSVEMVEAFQGRQLRVNCGPPPPRDESTPRAPRGGGGGGGGGFVDSANKVYVGNLAWGVDNSTLENLFSEQGQVLDAKVIYDRDSGRSRGFGFVTYGSAQEVNNAISNLDGIMYRKNNVSEIFKKDNN

SEQ ID NO: 52065 - protein, 129 aa, Zea mays
  Coding DNA Sequence Number=SeqID_10286
MTREDLGSEEGLNKYPPPHEKPRISVVASVVSATSFTRQGAGIIQAVTQYVTLLAASIHTELYRLLTKLTLLVRLHTAARRPLRALHVLRRFRHEFDVEVYKSHPSHLPERSALQTGDRQWFFFSQTGD

SEQ ID NO: 52066 - protein, 74 aa, Zea mays
  Coding DNA Sequence Number=SeqID_10287
MAGDRAGGVRGAGEGPGLPPVGGGDVAGLFWTADEPSFAEDAAACRAMVVAAGGGRDARMSLFQFVAFLENGLC

SEQ ID NO: 52067 - protein, 154 aa, Zea mays
  Coding DNA Sequence Number=SeqID_10288
  Subcellular localization annotation: CTP_CleavageSite=43; ConfidenceScore=5.47e-01
MGDGAVRGARSSRPSARSEGQPASVSGSGRPVLGRGARSPGATATMGAAGEEDPPEPLQALRESRGGLSQRGCPRSREERGSKGDRSGGGRAGAPWALAGDEGGCREEDEVAGILGVDGDWGRRRLRRGTARTISTVRTQLGQAVWVEVLAGRI

SEQ ID NO: 52068 - protein, 214 aa, Zea mays
  Coding DNA Sequence Number=SeqID_10289
  Gene Ontology: Mol. function=heat shock protein binding; Cellular component=integral to membrane; Biological process=protein folding
  Pfam annotation: Domain name=DnaJ; Domain location=37-96; Score=19.1; E_value=6.2e-05; Accession=PF00226.21; Description=DnaJ domain
MAMEIPAQVRRYWLPILLFTAGFLFQVLVLPRHFPPTHYDVLGVERFASVERVVEAYESLSKEWLSETSHQPTVDIIKIRYAYELLTNPVLKRDYDLFGLDEHKVYSKGSPRCAQFIEYWKQIGSGTQLDGIVRTAMVEVGDSQVAGYFAEKRFSKRPFFRNGVPTLVAYPANCKSPSCYMSIPKMRFYATPFPICAEDMSYLVGDLNSHVFYA

SEQ ID NO: 52069 - protein, 114 aa, Zea mays
  Coding DNA Sequence Number=SeqID_10290
  Subcellular localization annotation: CTP_CleavageSite=27; ConfidenceScore=5.30e-01
MVLHSSLSNVVHYTCGAVFATAAAQIGATAVAGHPSAQSVLLFLTGAGLSSPNFSAVAVVTWSGSGRFCYDTRGEFFYCSSSCRFRVVVFGPWSRARTTSSAKLAAATMARLQA

SEQ ID NO: 52070 - protein, 48 aa, Zea mays
  Coding DNA Sequence Number=SeqID_10291
MVADEEEYNCKDQYEPKNRRHVRNPNIYGKIVADEEEYNYKDEFEPKS

SEQ ID NO: 52071 - protein, 40 aa, Zea mays
  Coding DNA Sequence Number=SeqID_10292
ARIKKIMQADEDVGKIALAVPVLVWLMSDSQLSTSSIAMW

SEQ ID NO: 52072 - protein, 59 aa, Zea mays
  Coding DNA Sequence Number=SeqID_10293
MASRLPLMASINGESFCGRSACASRCSLAHAPGLGAGASRAGFLCAALRGVTRWPLVRL

SEQ ID NO: 52073 - protein, 193 aa, Zea mays
  Coding DNA Sequence Number=SeqID_10294
  Gene Ontology: Mol. function=hydrolase activity, acting on ester bonds; Biological process=lipid metabolic process
  Homolog annotation: Hit_ID=Q6KAI2; Match level="QueryCoverage=79%, HitCoverage=42%, E-value=2e-77, Identity=85%"; Hit description =Putative anther-specific proline-rich protein
  Pfam annotation: Domain name=Lipase_GDSL; Domain location=1-169; Score=-13.3; E_value=0.022; Accession=PF00657.12; Description=GDSL -like LipaseAcylhydrolase
MDMGAVWFAPGTAATCVAATDLAVLHALVCRGCTSWGARRVIVTGTGPLGCVPAELALHSQNGECAAELTRAVNLFNPQMVDMVRGLNRAIGADVFVTANTYRMNFDYLANPQDFGFTNVQVACCGQGPYNGIGLCTAASNVCDNRDVFAFWDAFHPTERANRIIVAQFMHGDTDYMHPMNLSTILAMDQEGL

SEQ ID NO: 52074 - protein, 163 aa, Zea mays
  Coding DNA Sequence Number=SeqID_10295
MVKNKLIGHKYSRMQIAISPYPDSRVGLRKEKLYEAFYASFLGPLASSSSSRIRIRARLGTEMLIRRHRGSNFRPGRPGDSVEINPRCHNTATRPKVKNKNWIPHPHRVRSWYWHLLNQVRIGAQGGGGVFLGWRDNVQSQAVQRMFNREDELAAVLIVKWIE

SEQ ID NO: 52075 - protein, 716 aa, Zea mays
  Coding DNA Sequence Number=SeqID_10296
  Homolog annotation: Hit_ID=Q5D892; Match level="QueryCoverage=19%, HitCoverage=12%, E-value=3e-35, Identity=57%"; Hit description =Meiotic recombination protein MER3
MKHVEIDRFFIKEKIDVGALKLNTINQIKIPTIFFSKAQGKYALNYIKKRKALFHHSKKDVRPGCGARAYPFWPIDQQSSICCVPSAKRKNSTLRRPRFPDSPVVIKALKTAGVYSFETLATADARKIELATGRNYPFGNHIKESMSSLPPKIDIHIEETGNRLGKSTITVTLTRLSQAVKSSKRNCADMVVASEEDNVILFHENIRTHEFHSPYSVKVFVPCPQNARVTLKVDLIFEEYGNITIRTTRTSRSQSHTEQNPLSKEVYVIEDDGAAVSAVSALEKADDAVGTIKFNNLASLSAYSTTFVLDGFGPQMVFLGDLLLDPLLFGINLEVPSFDLLPEEEYGAPGPAEAECKGATDSTIFDHIRKKSKDFPTLMLSKSMDCSYEPLILKKMKISRDQFGVKHGCLHAGEATTMDFDPVEPRVSPTNTAEKFRGILGRSSERSRMLFGKMDSPFEKSEMLGTTPAESSLRFAGGKDSSLEKNKTLIRTPAENSLQIAARGKESKVSKVLTNLDKSPLGFAGGKESKMSNVPSTSAENSLQFAARRVRSSEKSKMLTTPYESSQAFLGEKDSPSEKSKILINSPVEYPFKKGSPGENPFKTCSPVENSLKFAAQRDSPSEKRKSCISNPLPPFQQAVQCTKQVGVAGQPFDIKEYCKEILRSRNDSQGGDPFAGYKMLSAEAWTVHGQGPDGPRPGAGLGFLHDVPDGHSRRL

SEQ ID NO: 52076 - protein, 166 aa, Zea mays
  Coding DNA Sequence Number=SeqID_10297
  Gene Ontology: Mol. function=nucleic acid binding
MTNETRKHRSKWDTKEGSDVVEISDDESPDKTGVHRKGGDLHTKPDTSMHHRGAGHEKEHADGSNEDMKEMQHKAPSERSQPLRMVDERDNNEWSKATGNQGTNRYADDRRRGDGWGRLLIQMHGGSAAYFHLQEGFGTNHAGTGVVPEAEAEAEAETEVGAEAGV

SEQ ID NO: 52077 - protein, 202 aa, Zea mays
  Coding DNA Sequence Number=SeqID_10298
MEEDPAGGEDLSSTAASGHSCSGDDGEESGWTSYIDYFMETQQRRRRKQGDVSRAAAGDGPSTDDDAGRRRSSTAECSSGAGVGASSSCLAPPVLVDPPVVVVSRRLSLREGWRRKKVLHDESLEDTATSPISSPKRKNSTGGDVNNGANTRTDTAAVKEDSAAYSNDDEAEEEISRPNLVGPAYACFSCIADGDANKFIGC

SEQ ID NO: 52078 - protein, 774 aa, Zea mays
  Coding DNA Sequence Number=SeqID_10299
  Gene Ontology: Mol. function=sequence-specific DNA binding; Cellular component=nucleus; Biological process=regulation of transcription, DNA-dependent
  Homolog annotation: Hit_ID=Q8W0T5; Match level="QueryCoverage=93%, HitCoverage=91%, E-value=0.0, Identity=80%"; Hit description=OCL5 protein
  Pfam annotation: Domain name=Homeobox; Domain location=85-141; Score =81.8; E_value=2.2e-21; Accession=PF00046.19; Description=Homeobox domain
  Pfam annotation: Domain name=START; Domain location=276-505; Score =249.7; E_value=6.2e-72; Accession=PF01852.10; Description=START domain
  Pfam module annotation: Pfam domain module=Homeobox::START; Domain location=85-141::276-505
MDFEKIVDNMMDGHHQLAMMQQQHQNHGQQQAATSESDARGPRHDELLMESKSGSDNMEGGARSGGSGGEELQEEDLGLRQPARKKRYHRHTQHQIQELEAFFKEYPHPDDKQRKELSRELGLEPLQVKFWFQNKRTQMKTQQERHENMQLRAENEKLRAENARYKDALANASCPSCGGPAATAVIGEMSFDEHHLRVENARLRDEVDRISTIAAKYVGKPAGSLLLLPPNNLSNNVSGPALSSHHHLLPGGTDVFGGLHRHAGGGFDFDKGLVVELAVAAMEELVRMALLGEPLWIPALAVDGATTETLNEEEYARGFFPRGVGPKLPELRSEASREAVVVIMNHVSLIEMLMDVNQWSTLFSSIVSRAATLEVLSTGVAGNYNGALQLMTAEFQMPSPLVPTRECQFLRYCKQHTDGSWAVVDVSVEGQLLRTGSRQGRGRGRRRPSGCLIQEMPNGYSRVTWVEHAEADDMMVHDLYRPLVCSGLAFGARRWASTLERQCERLASAMASGVVVPAAAAGPAAGVVTSPEGRRSMMRLAERMVASFCGGVTASTTHQWTTLSGSGAEDVRVMTRKSVDDPGRPPGIILNAATSFWLPVAPARVFGFLRDDATRSEWDMLSNGGDVQEMAHIANGRDHGNAVSLLRVDNANSNQGNMLILQECCTDATGSYVIYAPVDVVAMNVVLNGGDPDYVALLPSGFAILPDGGGGGGGGSLLTVAFQILVDSVPTAKLSLGSVATVNSLIACTVERIKAAVAADNAGVAAAAAATSHH

SEQ ID NO: 52079 - protein, 406 aa, Zea mays
  Coding DNA Sequence Number=SeqID_10300
  Gene Ontology: Mol. function=protein binding; Cellular component =nucleus; Biological process=regulation of transcription, DNA -dependent
  Homolog annotation: Hit_ID=Q7FS94; Match level="QueryCoverage=86%, HitCoverage=76%, E-value=0.0, Identity=89%"; Hit description =Fertilization-independent endosperm protein
  Pfam annotation: Domain name=WD40; Domain location=202-244; Score =4.6; E_value=11; Accession=PF00400.22; Description=WD domain, G-beta repeat
  Pfam annotation: Domain name=WD40; Domain location=248-287; Score =26.4; E_value=0.0001; Accession=PF00400.22; Description=WD domain, G- beta repeat
  Pfam annotation: Domain name=WD40; Domain location=293-333; Score =35.3; E_value=2.1e-07; Accession=PF00400.22; Description=WD domain, G-beta repeat
  Pfam annotation: Domain name=WD40; Domain location=360-396; Score =11.9; E_value=1.5; Accession=PF00400.22; Description=WD domain, G -beta repeat
  Pfam module annotation: Pfam domain module=WD40::WD40::WD40::WD40; Domain location=202-244::248-287::293-333::360-396
MESDREKQQSHGKKQGDHGSKMHDSDGNKNVSDEKSQESGGKEHKSNIKKHESRRKSAAPAQPRRKKSPREVSVPVAAASNPKPRPLPVHNKENQAEGKVAEEGAATEEGEKYRAEPEILPLPPAMAKLGPGQGLGCEAAEGSLVPSRKREYKPCGKHTEGKRPLYAIGFNFMDARYYDVFATVGGNRVTTYRCLENGSFALLQAYVDEDKDESFYTLSWARDHVDGSPLLVAAGSNGIIRVINCATEKLAKSFVGHGDSINEIRTQPLKPSLIISASKDESVRLWNVHTGICILIFAGAGGHRNEVLSVDFHPSDIERFASCGMDNTVKIWSMKEFWLYVDKSYSWTDLPSKFPTKYVQFPVLIAAVHSNYVDCTRWLGDFILSKSVDNEIVLWEPKTKEQSPGE

SEQ ID NO: 52080 - protein, 97 aa, Zea mays
  Coding DNA Sequence Number=SeqID_10301
MGLDPHVRNPNPLEGSGPPRIQNGPPSRDPDPRDRPDVTTQATAHAPMHVTVPAYAATHTSAFTHMLTRHDEGEDGQEIRTATKRRCLSTDDISCSM

SEQ ID NO: 52081 - protein, 70 aa, Zea mays
  Coding DNA Sequence Number=SeqID_10302
MKTQELILASQEKSLRLAPKINAMRGKKRPDSWLFIQRIIFSEDGLVSESSAQVNGARSSDAGVARLEAL

SEQ ID NO: 52082 - protein, 140 aa, Zea mays
  Coding DNA Sequence Number=SeqID_10303
  Subcellular localization annotation: CTP_CleavageSite=44; ConfidenceScore=5.05e-01
MAITARSARRGRPGVAPSLSLVLALAPACPLLPAAWHARPSPPGARHAPTRSPPPRLATPCPWQGLELGQRVAPWHSARRGCLLPRVWRDARDPLRSSLARRAMSWRGGDENDGFGIDYGNGEDEAVEGDFQEFQDYDEF

SEQ ID NO: 52083 - protein, 329 aa, Zea mays
  Coding DNA Sequence Number=SeqID_10304
  Gene Ontology: Mol. function=DNA binding; Cellular component=nucleus; Biological process=regulation of transcription
  Homolog annotation: Hit_ID=Q6Z1A3; Match level="QueryCoverage=71%, HitCoverage=72%, E-value=5e-43, Identity=44%"; Hit description =Putative NAC domain protein NAC1
  Pfam annotation: Domain name=NAM; Domain location=5-161; Score=141.2; E_value=2.9e-39; Accession=PF02365.6; Description=No apical meristem (NAM) protein
MEARLPPGFRFHPRDDELVLDYLCRKLSGKGGGGAYGGIAMVDVDLNKCEPWDLPGIPSGPTLRYRIYIDLLQTRRAWAAASGTSSACTTASTPRGSGPTAPTRTGYWKATGKDRPISVSGRRGAGDTAALVGMRKTLVFYQGRAPRGSKTEWVMHEFRVDGPPVADRPGSPLLQLQLQEDWVLCRVFYKSRTASTRPAAGPDEAGPLSSQLIGGLPMPRMAAPADAAYLSFDVTPAAGGYYHHQDSGPADARHHLPPPPAQPFSRSSLSSLRDLLSSMVEGSDAAAAVRETELHLQLEGWTEAAYAQQQGGAMPAHPQQTWSPFLSSG

SEQ ID NO: 52084 - protein, 494 aa, Zea mays
  Coding DNA Sequence Number=SeqID_10305
  Gene Ontology: Mol. function=protein binding; Cellular component =nucleus; Biological process=transcription from RNA polymerase III promoter
  Homolog annotation: Hit_ID=Q1SJP5; Match level="QueryCoverage=68%, HitCoverage=94%, E-value=1e-129, Identity=64%"; Hit description =Cyclin-like F-box; Serine/threonine protein phosphatase, BSU1
  Pfam annotation: Domain name=F-box; Domain location=151-198; Score =21.4; E_value=0.0031; Accession=PF00646.23; Description=F-box domain
  Pfam annotation: Domain name=Kelch_1; Domain location=238-280; Score =4.5; E_value=1.2; Accession=PF01344.15; Description=Kelch motif
  Pfam annotation: Domain name=Kelch_1; Domain location=282-328; Score =40.6; E_value=5.3e-09; Accession=PF01344.15; Description=Kelch motif
  Pfam annotation: Domain name=Kelch_1; Domain location=330-376; Score =34.5; E_value=3.8e-07; Accession=PF01344.15; Description=Kelch motif
  Pfam annotation: Domain name=Kelch_1; Domain location=383-423; Score =3.8; E_value=1.4; Accession=PF01344.15; Description=Kelch motif
  Pfam annotation: Domain name=Kelch_2; Domain location=193-232; Score =4.7; E_value=9.3; Accession=PF07646.5; Description=Kelch motif
  Pfam annotation: Domain name=Kelch_2; Domain location=238-280; Score =6.1; E_value=6; Accession=PF07646.5; Description=Kelch motif
  Pfam annotation: Domain name=Kelch_2; Domain location=282-328; Score =21.7; E_value=0.0026; Accession=PF07646.5; Description=Kelch motif
  Pfam annotation: Domain name=Kelch_2; Domain location=330-376; Score =9.1; E_value=2.4; Accession=PF07646.5; Description=Kelch motif
  Pfam annotation: Domain name=Kelch_2; Domain location=383-423; Score =11.3; E_value=1.2; Accession=PF07646.5; Description=Kelch motif
  Pfam module annotation: Pfam domain module=F-box::Kelch_1::Kelch _1::Kelch_1::Kelch_1::Kelch_2::Kelch_2::Kelch_2::Kelch_2::Kelch_2 Domain location=151-198::238-280::282-328::330-376::383-423::193 -232::238-280::282-328::330-376::383-423
  Subcellular localization annotation: CTP_CleavageSite=42; ConfidenceScore=5.30e-01
MASQPSTSSATRSAAGSIHITVGVKHGNRGDSKSVRKRVKIRQIMEELQDCNSRSLVALPGSLVLRLFRLFGQQDQSSWQKYILAYFLLVRNEYFSGESKKHSDVFCDISELDFFLYATDLDSEELELKEQKPITKAQSGGDSSGNRSNDCYFPGLHDDLSQDCLAWASRSDYPSLSCLNKRFNLLINSGYLYRLRRKYDIVEHWVYLACSLMPWEAFDPSRKRWMRLPRMPCDECFSCADKESLAVGTQLLVFGREYTGLAIWMYNLLTRSWSPCTPMNLPRCLFASGSSGEIAIVAGGCDKNGQVLRSAELYNSEIGHWETIPDMNLPRRLSSGFFMDGKFYVIGGVSSQRDSLTCGEEYNLETRTWRRILDMYPGGTSASQSPPLVAVVNNQLYAADQSTNVVKKYDKANNAWNILKPLPVRADSSNGWGLAFKACGDRLLVIGGHRGPRGEVILLHSWCPEGGEDGADWEVLSVKERAGVFVYNCAIMGC

SEQ ID NO: 52085 - protein, 298 aa, Zea mays
  Coding DNA Sequence Number=SeqID_10306
  Subcellular localization annotation: CTP_CleavageSite=17; ConfidenceScore=5.07e-01
MDRRRRLPLPPSTRFVLCALAGRSPVTVCAADCAVMQSRTILLPRNSSNRQLRPPPLANQPYLSAPLQTVRHPRLPDRRILPPPLPNARRYRTPAAAHAPRIPHARRRESRRYRTARTPAAANPAATEPPAYHPHAREPYGRRDCRISAPTPPAMPRNTRLPTPLNNCRDRPLPSFAATASWSRTSASPPPVATTASPRTLAPPNPIDAMVSKASKRKAIGEIVEQIPEESGRSYLEICDDLEKKPPKIMWNQSFDLRSPIATSDDATPAASMGARKDGDQLAIGKETGRRLGMGTNM

SEQ ID NO: 52086 - protein, 1194 aa, Zea mays
  Coding DNA Sequence Number=SeqID_10307
  Gene Ontology: Mol. function=protein kinase activity; Cellular component=integral to membrane; Biological process=protein amino acid phosphorylation
  Homolog annotation: Hit_ID=Q9FL28; Match level="QueryCoverage=95%, HitCoverage=95%, E-value=0.0, Identity=43%"; Hit description =Receptor protein kinase
  Pfam annotation: Domain name=LRRNT_2; Domain location=42-92; Score =35.4; E_value=2e-07; Accession=PF08263.3; Description=Leucine rich repeat N-terminal domain
  Pfam annotation: Domain name=LRR_1; Domain location=120-142; Score =11.8; E_value=1.8; Accession=PF00560.23; Description=Leucine Rich Repeat
  Pfam annotation: Domain name=LRR_1; Domain location=144-166; Score =11.7; E_value=1.9; Accession=PF00560.23; Description=Leucine Rich Repeat
  Pfam annotation: Domain name=LRR_1; Domain location=168-190; Score =13.5; E_value=0.77; Accession=PF00560.23; Description=Leucine Rich Repeat
  Pfam annotation: Domain name=LRR_1; Domain location=216-238; Score =11.0; E_value=2.5; Accession=PF00560.23; Description=Leucine Rich Repeat
  Pfam annotation: Domain name=LRR_1; Domain location=240-262; Score =21.4; E_value=0.0033; Accession=PF00560.23; Description=Leucine Rich Repeat
  Pfam annotation: Domain name=LRR_1; Domain location=264-286; Score =4.5; E_value=42; Accession=PF00560.23; Description=Leucine Rich Repeat
  Pfam annotation: Domain name=LRR_1; Domain location=288-310; Score =16.3; E_value=0.11; Accession=PF00560.23; Description=Leucine Rich Repeat
  Pfam annotation: Domain name=LRR_1; Domain location=312-334; Score =11.1; E_value=2.4; Accession=PF00560.23; Description=Leucine Rich Repeat
  Pfam annotation: Domain name=LRR_1; Domain location=336-358; Score =12.1; E_value=1.6; Accession=PF00560.23; Description=Leucine Rich Repeat
  Pfam annotation: Domain name=LRR_1; Domain location=360-382; Score =12.5; E_value=1.3; Accession=PF00560.23; Description=Leucine Rich Repeat
  Pfam annotation: Domain name=LRR_1; Domain location=384-406; Score =16.2; E_value=0.12; Accession=PF00560.23; Description=Leucine Rich Repeat
  Pfam annotation: Domain name=LRR_1; Domain location=408-430; Score =16.8; E_value=0.079; Accession=PF00560.23; Description=Leucine Rich Repeat
  Pfam annotation: Domain name=LRR_1; Domain location=432-454; Score =3.7; E_value=57; Accession=PF00560.23; Description=Leucine Rich Repeat
  Pfam annotation: Domain name=LRR_1; Domain location=456-480; Score =13.2; E_value=0.97; Accession=PF00560.23; Description=Leucine Rich Repeat
  Pfam annotation: Domain name=LRR_1; Domain location=481-503; Score =13.9; E_value=0.6; Accession=PF00560.23; Description=Leucine Rich Repeat
  Pfam annotation: Domain name=LRR_1; Domain location=505-527; Score =10.6; E_value=3; Accession=PF00560.23; Description=Leucine Rich Repeat
  Pfam annotation: Domain name=LRR_1; Domain location=529-551; Score =10.2; E_value=3.5; Accession=PF00560.23; Description=Leucine Rich Repeat
  Pfam annotation: Domain name=LRR_1; Domain location=553-575; Score =9.6; E_value=4.6; Accession=PF00560.23; Description=Leucine Rich Repeat
  Pfam annotation: Domain name=LRR_1; Domain location=577-599; Score =11.5; E_value=2; Accession=PF00560.23; Description=Leucine Rich Repeat
  Pfam annotation: Domain name=LRR_1; Domain location=601-623; Score =11.2; E_value=2.3; Accession=PF00560.23; Description=Leucine Rich Repeat
  Pfam annotation: Domain name=LRR_1; Domain location=625-648; Score =15.0; E_value=0.27; Accession=PF00560.23; Description=Leucine Rich Repeat
  Pfam annotation: Domain name=LRR_1; Domain location=675-697; Score =11.3; E_value=2.2; Accession=PF00560.23; Description=Leucine Rich Repeat
  Pfam annotation: Domain name=LRR_1; Domain location=699-722; Score =18.3; E_value=0.027; Accession=PF00560.23; Description=Leucine Rich Repeat
  Pfam annotation: Domain name=LRR_1; Domain location=724-746; Score =10.2; E_value=3.6; Accession=PF00560.23; Description=Leucine Rich Repeat
  Pfam annotation: Domain name=LRR_1; Domain location=748-770; Score =13.8; E_value=0.63; Accession=PF00560.23; Description=Leucine Rich Repeat
  Pfam annotation: Domain name=LRR_1; Domain location=772-795; Score =14.2; E_value=0.46; Accession=PF00560.23; Description=Leucine Rich Repeat
  Pfam annotation: Domain name=LRR_1; Domain location=96-117; Score =0.9; E_value=2e+02; Accession=PF00560.23; Description=Leucine Rich Repeat
  Pfam annotation: Domain name=Pkinase; Domain location=893-1180; Score= 87.9; E_value=3.2e-23; Accession=PF00069.15; Description=Protein kinase domain
  Pfam annotation: Domain name=Pkinase_Tyr; Domain location=893-1180; Score=45.0; E_value=3.1e-15; Accession=PF07714.7; Description =Protein tyrosine kinase
  Pfam module annotation: Pfam domain module=LRRNT_2::LRR_1::LRR_1::LRR_ 1::LRR_1::LRR_1::LRR_1::LRR_1::LRR_1::LRR_1::LRR_1::LRR_1::LRR_1: LRR_
  Pfam module annotation: Pfam domain module=LRR_1::LRR_1::LRR _1::Pkinase::Pkinase_Tyr; Domain location=42-92::120-142::144 -166::168-190::216-238::240-262::264-286::288-310::312-334::336 -358::360-382::384-406::408-430::...
  Pfam module annotation: Domain location=432-454::456-480::481 -503::505-527::529-551::553-575::577-599::601-623::625-648::675 -697::699-722::724-746::748-770::772-795::96-117::893-1180::893-1 80
MASWKNTCSYSYTPVSNAVAMLALALLVLAAPAASAVPDASASVHLEALLAFKKAVTADPNGTLTSWTVGSGGGGGGGRYPQHCNWTGVACDGAGHVTSIELVDTGLRGTLTPFLGNISTLQLLDLTSNRFGGGIPPQLGRLDGLEGLVLGANNLTGAIPPELGGLGSLQLLDLSNNTLRGGIPRRLCNCSAMAGLSVFNNDLTGAVPDCIGDLTNLNELVLSLNSLDGELPPSFARLTRLETLDLSGNQFSGPIPPGIGNFSRLNIVHMFENRFSGAIPPEIGRCKNLTTLNVYSNRLTGAIPSELGELASLKVLLLYGNALSSEIPRSLGRCASLVSLQLSMNQLTGSIPAELGELRSLRKLMLHANRLTGEVPASLMDLVNLTYLSFSYNSLSGPLPANIGSLQNLQVLVIQNNSLSGPIPASIANCTSLYNASMGFNEFSGPLPAGLGQLQNLHFLSLADNDKLSGDIPEDLFDCSNLRTLTLAGNSFTGSLSPRVGRLSELSLLQLQGNALSGAIPEEMGNLTKLIALQLGGNGFVGRVPKSISNLSSLQKLTLQQNRLDGALPDEIFGLRQLTVLSVASNRFVGPIPDAVSNLRSLSFLDMSNNALNGTVPAAVGSLDHLLTLDLSHNRLAGAIPSALIAKLSALQMYLNLSNNGFTGPIPTEIGALTMVQSIDLSNNRLSGGVPSTLAGCKNLYSLDLSANNLTGALPAGLFPHLDVLTSLNISGNELDGDIPSNIGALKNIQTLDASRNAFTGALPSALANLTSLRSLNLSWNQFEGPVPDSGVFSNLSMSSLQGNAGLCGWKLLAPCRHGGKKGFSRTGLAVLVVLLVLAVLLLLVLVTILFLGYRRYKKKGGSTGANSFAEDFVVPELRKFTCSELDAATSSFDEGNVIGSSNLSTVYKGVLVEPDGKVVAVKRLNLAQFPAKSDKCFLTELATLSRLRHKNLARVVGYACEPGKIKAVVLEFMDNGDLDGAIHGPGRDAQRWTVPERLRACVSVAHGLAYLHTGYDFPIVHCDVKPSNVLLDSDWEARVSDFGTARMLGVHLTDAAAQSATSSAFRGTIGYMAPEFAYMRTVSAKVDVFSFGVLMMELFTKRRPTGMIEEEGVPLTLQQYVDNAISRGLDGVLDVLDPDLKVVTEGDLSTVADVLSLALSCAASDPADRPDMDSVLSALLKMSKQWLIGGEKE

SEQ ID NO: 52087 - protein, 93 aa, Zea mays
  Coding DNA Sequence Number=SeqID_10308
MTTVSGWDDESVLLNVMVIEATLVYESHRKRRASTCSNDDDTRSNTKYGDTVDRSVLILTPLLQQGSSLPRCEGVLSNGANHAHPRDLGLNAD

SEQ ID NO: 52088 - protein, 120 aa, Zea mays
  Coding DNA Sequence Number=SeqID_10309
MTSGRMLLPGGPRPCPQLERQGRAEGRRVGGPPPRCGGWVPHVMQVSLGQKKPNRRARCVQPPSSYKWLSTFAQTSGRKGGQPCRRHATAPSGRTSPTSNTPSLEDQAHTSFNWCVGCYV

SEQ ID NO: 52089 - protein, 115 aa, Zea mays
  Coding DNA Sequence Number=SeqID_10310
MESMCSGLRASALRGCGLRSVAGASASGGGSLAGEHVVGRCKGPAVAARQEQHNATWLLKQLERDVRATLQQDKEAQRLGKSDVQNAVDRVLALDAVAGERRPAAGLELEEAGGG

SEQ ID NO: 52090 - protein, 44 aa, Zea mays
  Coding DNA Sequence Number=SeqID_10311
MPCAFADYYIKDCGVISVPEVLGHGEKLDRLQEHTKARYHDVPI

SEQ ID NO: 52091 - protein, 116 aa, Zea mays
  Coding DNA Sequence Number=SeqID_10312
  Gene Ontology: Mol. function=sequence-specific DNA binding; Cellular component=nucleus; Biological process=regulation of transcription, DNA-dependent
  Homolog annotation: Hit_ID=Q43353; Match level="QueryCoverage=92%, HitCoverage=44%, E-value=2e-25, Identity=60%"; Hit description=ZAG2 protein
  Pfam annotation: Domain name=K-box; Domain location=1-67; Score=34.6; E_value=3.5e-07; Accession=PF01486.8; Description=K-box region
MPRHLVGDSVGNLSLKELKQLESRLEKDISKIRARKSELLAAEINYMAKRETELQNDHMNLRTKSQANVWLTSTCRTQEHALQATDQKINLQDTKNMPYRPLKCQSCCPGFFCPDH

SEQ ID NO: 52092 - protein, 693 aa, Zea mays
  Coding DNA Sequence Number=SeqID_10313
  Gene Ontology: Mol. function=poly(A)-specific ribonuclease activity; Cellular component=nucleus; Biological process=meiosis
  Homolog annotation: Hit_ID=Q9LG26; Match level="QueryCoverage=88%, HitCoverage=88%, E-value=1e-167, Identity=49%"; Hit description =Poly(A)-specific ribonuclease PARN
  Pfam annotation: Domain name=CAF1; Domain location=38-469; Score =164.3; E_value=3.2e-46; Accession=PF04857.10; Description=CAF1 family ribonuclease
MQVPGRLRRVLRAPPPRILLYRAISSPPPGGGSGVAVKQVTRGNMEEALEKLRGRVREAAFVGLDLEMSGVTSAPWRDTFELDRADVRYLKLRDSAERFAALQLGVCPFRWDPAKSAFVAHPHNFFIFPRKELPSDCSSHEFLCQTTSIEFLAKYQFDFNTCFREGISYLSRAQEEEALQKFNMLHHGRTVTSSTNSEEDGDMPLKSASDILFTERMKMNFKEWRDAIASKPMVDNHLSGNIKCGSGQFQTVFFKMRPAIILNGFSSHQLKLIQQVLRKNFRDLIFVCTFGEDDTSEKKVVYSDTDEDRILLMKDVQEDLLKNREERIKSAIGIRHVIDLLSSERKLIVGHSCFLDIAQVYSKFVRPLPSSIKEFALSFHKFFPHIADTRHLMSVNQAVQKLMKHKSKSLSSAFLLLCPASYSSVEKPSSHSPVTIEVEGDETMSSRFISGAKHEAGYDAYMTGCIFAQLCAYLGIQFEQFSPLDNLATNTKLQKHINFLSPSWNSGTVLDLSTGMETPDPGYTRRYPAAVYDNIVVIWGFLSKVRPKEIKDCICKVFGSGSVTTVFSIDSTAALVQFKKQESVNDFLDLKAVLERADSAISILHPLSTILEGGQTRAAKYDTYRDICSSSESKYLFADQAEAVCATSKNQLIENVDGNLISDVLDGVALASVTEEDGIIPSSKNQNVAEATC

SEQ ID NO: 52093 - protein, 103 aa, Zea mays
  Coding DNA Sequence Number=SeqID_10314
MADTFLEYSSPFHFFESFNEIQSISSLSSALLCWFEDCFEINKKTHDVVESSPTGDESEAHGQQQGDNAKEVDDHVTQSELRDSLMKGVKYPNIEVVNETVKQ

SEQ ID NO: 52094 - protein, 458 aa, Zea mays
  Coding DNA Sequence Number=SeqID_10315
  Gene Ontology: Mol. function=nucleic acid binding
  Homolog annotation: Hit_ID=Q651Z0; Match level="QueryCoverage=23%, HitCoverage=21%, E-value=6e-07, Identity=39%"; Hit description=RNA -binding protein-like
MDGDDAGGQLPAAPASPRTEEAIAAAHDDARLPPTPSDGEDYDDLYVATPVAAPSPASGTPARACAPSASPSRNQDRYQATPAAAAYPVRAETPHDAARWRRLQLVVAQVHVAVHQRAPLVDDGRGSGGPLSRSRRTVPPPRYTASTSTPKRSPACRAASAAPISSIQPRPPRPATALHGHAFHGRKCVASLAPSPSLNLLGDDLDSYAEAAWSRNPTGGLGNGGHGASDATAGRGNVALALADRLPLARPQLSVVPRPTPRSVPFAGIGGYGGFQSMRQYSAGMGIAMMPSALAHRVNPPFLALQGSGFWYDQGISGSFWGAQQERNFGGCQMPWQQLMAPRQQQHQQAQQQFGNWNYGMQGRGLRHERLSNTRSIGNVRYLDRRQANCDGGDRYKENDCEKGRHREGILDKEREQEKHWNQRDRHGGDNQMDRRVRARSRSQSRDDSDDDNPRRRR

SEQ ID NO: 52095 - protein, 47 aa, Zea mays
  Coding DNA Sequence Number=SeqID_10316
MASRGLHHDLFCCFQPSTLDNLFLNSNQELHVHRHLHCKNAERGIVV

SEQ ID NO: 52096 - protein, 108 aa, Zea mays
  Coding DNA Sequence Number=SeqID_10317
  Subcellular localization annotation: CTP_CleavageSite=51; ConfidenceScore=5.34e-01
MSSLAVSILLIVSLLTLHLPIACGRRHVVVLNPSDNGMMNSRGKKVSSTVGAAAAAATTRTVKMRAAVKHGYAVAEVYEMLRRDYASKARRRRPINNGATPLQVNKKP

SEQ ID NO: 52097 - protein, 648 aa, Zea mays
  Coding DNA Sequence Number=SeqID_10318
  Homolog annotation: Hit_ID=Q5QMV0; Match level="QueryCoverage=9%, HitCoverage=15%, E-value=8e-22, Identity=85%"; Hit description =Putative Altered Response to Gravity
  Pfam annotation: Domain name=DnaJ; Domain location=505-540; Score =5.2; E_value=0.0014; Accession=PF00226.21; Description=DnaJ domain
  Subcellular localization annotation: CTP_CleavageSite=13; ConfidenceScore=5.33e-01
MRRSQWPRSFWISASGTRRRGRAGALGACAGGSRGGRGGFAGRARGTRRGRREEAGGCRALRESRGRAAVRGVLAGFSACVVGELFAAARIPEGGRAEAGACGAVAMKTEVGRTGLGTVCGGDEYGGRAAGVGGRFAGFPCSGGVVIGGGGGLHTALNCYTSCMPVIKNGGSTEDFLPASACSVLEGRLEKEQNAEGRVAVSKVKELVEGFSSGSVSRDFISSRVGQMIFDESEMLFMSGPYGDSVQYKNGEPTKQFAKCDGVRILSNSSMIVIHRVSVFITSSVGIGNKIPAALLYNVRDHYGRQNKDSVQLGITGLTQWWLNAFSSGNSGMAVQSQPNIQRNSMNKLRGLSFRMVYDKGKENIVADTFSQGGSLMATYGDLAIQIDIPKSIVTNSYALDKLPIVTIHSPHGVVYSVQWGKVKRLHQFGKQCLVSEQAKEEQQLFGGFWHLFSVLQGIWKGLKSDFLEDFPIPEGCDFIMLLQCVAQDHLPRWKTLPPFVELWYRPDKNASNPEASELFKEVAYSYNILSDPEKQRQYDNADFEAFENEGVDMEIELSNLGTCRSPERDRARLSTTWGPAPQRPRDHLGAASALCSPGVSATGLRCIRNAAPQVLPTYSAYSGFGSITAEVVYANYANYAIAAREQE

SEQ ID NO: 52098 - protein, 128 aa, Zea mays
  Coding DNA Sequence Number=SeqID_10319
  Pfam annotation: Domain name=zf-CCHC; Domain location=47-64; Score =25.2; E_value=6.8e-05; Accession=PF00098.13; Description=Zinc knuckle
  Subcellular localization annotation: CTP_CleavageSite=71; ConfidenceScore=5.25e-01
MEVVLVLVIMHLKAHQLMAVLSNRPQSAPPQVNTLAGQVAPNTSTSRSCFKCGQPGHYPNYCPNRATYTSPAPMKQGQASGGKSQPLSINRGQVNHVEAEAEPGEPENPEEVPVEGEEANEEGNEQQD

SEQ ID NO: 52099 - protein, 291 aa, Zea mays
  Coding DNA Sequence Number=SeqID_10320
  Gene Ontology: Mol. function=hydrolase activity, hydrolyzing O -glycosyl compounds; Cellular component=cell wall; Biological process= carbohydrate metabolic process
  Homolog annotation: Hit_ID=Q6ZAN8; Match level="QueryCoverage=98%, HitCoverage=97%, E-value=1e-130, Identity=75%"; Hit description =Putative xyloglucan endotransglycosylase
  Pfam annotation: Domain name=Glyco_hydro_16; Domain location=30-215; Score=305.1; E_value=1.3e-88; Accession=PF00722.11; Description =Glycosyl hydrolases family 16
  Pfam annotation: Domain name=XET_C; Domain location=239-288; Score =57.4; E_value=4.7e-14; Accession=PF06955.3; Description=Xyloglucan endo-transglycosylase (XET
  Pfam module annotation: Pfam domain module=Glyco_hydro_16::XET_C; Domain location=30-215::239-288
MWQLSRAYRMASFCLISLAAAAVSPATGDMADTVDMMWGNTQVLYDSSSGRQTVSLSLDRWTTSAFRSKSTYLFGRFDVDIKLVPRDSAGTVTTVYMVTEGPWQYHDEIDLEFLGNTTGEPYTLHTNIYARGKGDREMQYRLWFDPTEDFNTYSIIWNPHMILILVNGVPLRRMKNRMRDDTPFPLFQPMRLYASIWDADEWATQGGRIKTDWSHGPFTAFFRNYTANACVPYNRAWICGQGSGDSSWFNQELDEEGQQKLSEVNGRNKIYDYCTDSRRFPSGYPPECGSQ

SEQ ID NO: 52100 - protein, 143 aa, Zea mays
  Coding DNA Sequence Number=SeqID_10321
MDLGGWKVLEPGSGGIRQKQEQVTNDEIVVICGLLKSGGRTLGLLYCDAFQETFDVAVDSVALGDGWLYHCSEQDYNRCEMSCDLARAPRQGLSLPLPARGRAEAAIAIPALIRAWHVLTKEGYPRESKLIRKGMGWNTVPMP

SEQ ID NO: 52101 - protein, 124 aa, Zea mays
  Coding DNA Sequence Number=SeqID_10322
MDGFLVSSNEVIHQSLGERAGDGVTRGSIEDAGHGRAACGCAGDDEAAHGSMGDFGATCGVVGVDGAACDSARDDSVVRGSVGDSGITRGSMGASGLRMARWGQTNQGNNRGTIESVLRRVSNA

SEQ ID NO: 52102 - protein, 120 aa, Zea mays
  Coding DNA Sequence Number=SeqID_10323
  Homolog annotation: Hit_ID=Q6QP54; Match level="QueryCoverage=33%, HitCoverage=14%, E-value=5e-10, Identity=82%"; Hit description =Putative kinase
MSWLSEEQRSLAEGQLLERLVMMALPVDVAGLCPWLGDVEAPPKPGSSLSSMAVAESEPLGRARRRSSAEAESEPLRRARRRLSAEAESEPLGRARRRSSAEAESEPLGRARRSSSSSGA

SEQ ID NO: 52103 - protein, 252 aa, Zea mays
  Coding DNA Sequence Number=SeqID_10324
  Gene Ontology: Mol. function=sequence-specific DNA binding; Cellular component=nucleus; Biological process=regulation of transcription, DNA-dependent
  Homolog annotation: Hit_ID=Q94CT0; Match level="QueryCoverage=71%, HitCoverage=85%, E-value=1e-28, Identity=42%"; Hit description=MADS -box protein-like
  Pfam annotation: Domain name=SRF-TF; Domain location=17-67; Score =68.0; E_value=3e-17; Accession=PF00319.9; Description=SRF-type transcription factor (DNA-binding and dimerisation domain)
MVKVVKSTKGRQRIEMKCIQGEEARQVCFSKRRPSLFKKASELSTLCGAEVAVVTFSPGGKCFSFGHPSTSSVTDRFLAVHTLDDGRAMASGSHGSRRGLTDTSHAMNQQLMELQRFMETEKRRKERAMEAMVRESGGPVMQLLSANVGALGIRELEELRKELCMVENMVKERAREVLRDAMQTRRLPPQSHVHMALPSQVPFGGQRAGTMYANFSSLSNNGPREGLHVNSMLHGFGLGGLGDYYLNGQFGG

SEQ ID NO: 52104 - protein, 198 aa, Zea mays
  Coding DNA Sequence Number=SeqID_10325
LGSHRRTAADRGSHRRRVARVGALVRGPWPEGWAPGHLGTAAEQRTLARRLGTEGQKVGAAGRGIATAGGSTQRRTADGVSVWPEGWAQRAAAKGSVSPWRFGGRQLCSKKGAEPCFSPRSFLFIVGPLRRECDSWAIPFASVSRCFVFARPREAGSRRGMDPKNRNPNWDRWGAKDAPQGSQSWGKPESQLAVEDWI

SEQ ID NO: 52105 - protein, 224 aa, Zea mays
  Coding DNA Sequence Number=SeqID_10326
  Subcellular localization annotation: CTP_CleavageSite=28; ConfidenceScore=5.06e-01
MVVTGDLGVFPSPPTNFPLRGLTLLYKRMAAVGNCGTRREFVAEPSGAAAEPPVPWVGDGIRSGEGITMVRLIGDQRPQLDLALIKSGRSILDWATSRSDRRHSTAPPDPRARTRAKTRKTANSASPDPRARTRAKTRKTANSAPPDPRARTRAKTRKTANSAPPDPRARTRAKARKTANSAPPDPRARTRAKTRKTTKLRFARPQGSDSALASAERLPPRPTP

SEQ ID NO: 52106 - protein, 670 aa, Zea mays
  Coding DNA Sequence Number=SeqID_10327
  Gene Ontology: Mol. function=ferredoxin-NADP+ reductase activity; Cellular component=thylakoid membrane; Biological process=electron transport
  Homolog annotation: Hit_ID=O23877; Match level="QueryCoverage=55%, HitCoverage=98%, E-value=0.0, Identity=84%"; Hit description =Ferredoxin--NADP reductase, embryo isozyme, chloroplast precursor
  Pfam annotation: Domain name=NAD_binding_1; Domain location=234-350; Score=132.9; E_value=9e-37; Accession=PF00175.11; Description =Oxidoreductase NAD-binding domain
  Subcellular localization annotation: CTP_CleavageSite=63; ConfidenceScore=5.72e-01
MAPPALGSQVAAAASVPVGSDSLAKGAALKGNSTLNFRTKPCIGMALAWKNRTQQPRRLNKVLCMSVQQASRSKVAVVPIELEKAKEPPLHLYKPKEPYTATIVSVERLVGPRAPGETCHVVIDHGGNVPYWEGQSYGVIPPGENPKKPGSPNTVRLYSIASTRYGDSFDGKTASLCVRRAVYYDPETGEEDPSKRGVCSNFLCGSKPGDKVQITGPSGKIMLLPEDDPNATHIMIATGTGVAPYRGYLRRMFMEDVPTFKFGGLAWLFLGVANSDSLLYDEEFTNYLQQYPDNFRYDKALSREQKNKSGGKMYVQDKIEEYSDEIFRLLDGGAHIYFCGLKGMMPGIQDTLKKVAEQRGESWDQKLSQLKKNKQWHVEAEPSSSAPQGAPTTADARAPRATYRGHPHYRTSHCPNHPLPATSFSASPLCSFGRKSARLRFTTTRPLQLPPLSPTRHALGGEQLNPTPAARNGANKALKRTLRLLPMARIQLVSLSVPPCLCVRNSVVVRWGLGLLELAGAVRSGDGRCCHAYLVAVAGDASRASSAARVLPFWRIEVDGRKRNLHCFASMRALLLVREGVGFCCFGTGKSTARGELLCSSLVTSQRPILHCCWLLRHAFTLAEWERNGIVVYGTAVLAYWCSVPVLQLSLLAITSHPSPEFLYSVSSTG

SEQ ID NO: 52107 - protein, 1009 aa, Zea mays
  Coding DNA Sequence Number=SeqID_10328
  Gene Ontology: Mol. function=protein binding
  Homolog annotation: Hit_ID=Q69VA2; Match level="QueryCoverage=91%, HitCoverage=66%, E-value=0.0, Identity=49%"; Hit description =Putative leucine rich repeat protein
MPLDDANLDGDDLKDDAFVTDASHIRDSLLCHEARTNTSLFVFPRGHGIAYLMLYVDDIVLTAFSTPICSHIYGAIQYFHSLFGALTDSTFSFLLEQWNNKLPQGYMVNKAYVDHPFEEDPCHCHFRFTNLGGEGELVLKYQWFLGGKTPTDFVAIPGASSEVYWPKREDVGRCLKVECTPIVNGAEFSPVFAVSLPVSPVKVLRKFICSCATFFVLVREFFLQGTGCPKVINLAVSGEVVEGNILSGVPEIAWCGGTPGKGVASWLRRRWNGNAVVIDGAEGMEYQLTVNDINSSLVFMYTPVTDEGVKGEPQCTMTDFVKAATPSVSNVHVLGDIVEDNIIVGKGKYFGGREGLSKIRWFREKENGEFLLVLSDSMEYTLTKEDVGRHLKFVYIPVNLEGQEGESACAITDVVKKAPPKVFNLKIVGESMEGSKISASATVTGGTEGSSRVQWYKASSSEFKNEHELEALTPSRVSKTFRIPLGAVGYYIVAKFTPVAPDGEVGEPAYATSDGLVETLPPSLNFLTVTGEFSEGQILTASYGYIGGHEGNSLYSWHLHEAEDDEGTPLSEATGLLQYCVTKEAVGKFVSFKCTPVRDDDIVGEARSFIGKDRVTPVQSDTYLETQYFSCSVEEKTAGMPTLLSLEVTGDAIEGTTMFASKRYWGGEEGDTMFRWILTNSDGTEKEIEGATSSSYTLKCNDIGFYISVLCKPVRNDGVDGSLVSTEAIGPIIPGPPTCQSLELAGSMVEGGRLTFHAVYTGGLRGSCIQEWFRLHDDGHKDKLTADECLDLDLADIDCRIELMYTPVREDGVHGLPRSVTSDTILPGEPKGVNLILPECFEDNEISPIKTYFGGKEGTGKYTWFRNKEKLDNLEFDLVAESSEVVGETLKYKPSLNDVSSYLILYWVPTRRDGKVGDPLMAISDDPVMADPYPCITLAAFPSVSDVHLEQKSSDVYCGLGIYYGGYEGLSLYRWYRESSDGTRLHIDGADSVTYEVTDADYSCRLLFG

SEQ ID NO: 52108 - protein, 115 aa, Zea mays
  Coding DNA Sequence Number=SeqID_10329
MAGKMQKQRMAHEMRMWKSSRVMDMRSRQHADETHNITRFHEDEAYVEDKSSDEGENLLGSNHVSVTPAVHPSQGNPTNACWSSKMSNMIKLSRLEDLESNPELKQTKNGKMVKN

SEQ ID NO: 52109 - protein, 94 aa, Zea mays
  Coding DNA Sequence Number=SeqID_10330
MELGRGSEISPVLGVVAASTGRGSEGFYQTPQAIRQLEVATAKTRWTGKVLVYPAAESVSMPRSRRDGADPARGPRDTETLLKLRHLKYIVHIG

SEQ ID NO: 52110 - protein, 136 aa, Zea mays
  Coding DNA Sequence Number=SeqID_10331
  Subcellular localization annotation: CTP_CleavageSite=62; ConfidenceScore=5.35e-01
MALISHASGIQLESLYPSSIASRPPPLAPWAGVTAVRLAPPRAPRFGPNRGPHVPSSRRLVRSSPGGAHRPWTLTPQDKFAAACRDSHRIARPELAPAMVPVNDLDLPGHEDPGLVAPSDCTHATWRSTIVYSPEE

SEQ ID NO: 52111 - protein, 613 aa, Zea mays
  Coding DNA Sequence Number=SeqID_10332
  Gene Ontology: Mol. function=phosphopantetheinyltransferase activity; Cellular component=integral to membrane; Biological process =macromolecule biosynthetic process
  Homolog annotation: Hit_ID=Q8H012; Match level="QueryCoverage=87%, HitCoverage=91%, E-value=0.0, Identity=73%"; Hit description =Putative endosomal protein
  Pfam annotation: Domain name=EMP70; Domain location=75-571; Score =989.6; E_value=1.1e-294; Accession=PF02990.7; Description =Endomembrane protein 70
  Pfam annotation: Domain name=Oxidored_q3; Domain location=327-527; Score=-35.3; E_value=0.089; Accession=PF00499.10; Description=NADH -ubiquinoneplastoquinone oxidore
  Pfam module annotation: Pfam domain module=EMP70::Oxidored_q3; Domain location=75-571::327-527
MLLKIIVDQHRYNSSIVSTVSTHAGIKHRDAGVIHQKWWHVGKGNLAIANRQTMREKDFPKQGRNTVLLACVGSETYRYYDLPFCAPEHPKDKKEALGEVLNGDRLVDAPYELNFKEDRNSKVLCKKVLSKEQVAKLRDAVAKDYYFQMYYDDLPLWGFLGKLDKDKEQGDVKYLLFKHIHFDIMYNDNRVIEINVQTDPNVAVDITEDKEVPIEFSYSATWKKTDIPFEKRMDKYSKSSSMPQHLEIHWFSIINSCVTVLLLTGFLATILMRVLKNDFIKYSHEDESLEDQEETGWKYIHGDVFRFPKQKSVFAAIIGSGTQLLALAIFIFLLALVGVFYPYNRGALFTALVVIYALTSGIAGYTATSFYLQLEGTNWVRNLVLTGCLFCGPLFLTFCFLNTVAIAYSATAALPFGTIIVIILIWALVTSPLLVLGGIAGKNSDTEFQAPCRTTKYPREIPQLPWYRSTVPQMAMAGFLPFSAIYIELYYIFASIWGHKIYTIYSILFIVFIILIIVTAFVTVALTYFQLAVEDHQWWWRSVLCGGSTGIFIFFYCIYYYHARSDMSGFMQTSFFFGYMTCVCYGFFLMLGTVGFRASLFFVRHIYRSIKCE

SEQ ID NO: 52112 - protein, 395 aa, Zea mays
  Coding DNA Sequence Number=SeqID_10333
  Gene Ontology: Mol. function=protein serine/threonine kinase activity; Biological process=protein amino acid phosphorylation
  Homolog annotation: Hit_ID=Q2R8P3; Match level="QueryCoverage=62%, HitCoverage=45%, E-value=1e-51, Identity=49%"; Hit description =Protein kinase domain containing protein, expressed
  Subcellular localization annotation: CTP_CleavageSite=59; ConfidenceScore=5.30e-01
MAAAAPAPYISSHMCSRDPSAHGRLPTNRASPTAHDRLTLRDALPWQPARPRQKFLTICAAAIPPRTGDSFPSMPTHPWQPSRPRQIFLPICAAAPANLASPRRPSIHGVSTSSAPLLAHNIFLPILSLKDLVHLVSRLPSPTASAQGLRALSSGEYRVCGVLSSRELHCWRWRGLNISRDLRFAVAAVGDSFFLDVRAYDKAFCGVFMANYSLVCWALVCWGEPEFNATNRLVFGRVLPGPCLPMSLCQCGVLPGSANLCDDGRCVCVDCAFELNVARPNASLVPVKGDRIHAGPVVSPAPRRCRNEQDTSGGAQQLLMPPRVGSSRSRGPGSVVVENFTLDMLHASTDGFSDDSQIGTGSFGSVYRGTLPDGREVAIKHIEDSAKASSSVAWH

SEQ ID NO: 52113 - protein, 381 aa, Zea mays
  Coding DNA Sequence Number=SeqID_10334
  Gene Ontology: Cellular component=integral to membrane
  Homolog annotation: Hit_ID=Q5VMW3; Match level="QueryCoverage=64%, HitCoverage=78%, E-value=9e-65, Identity=54%"; Hit description =Embryogenesis transmembrane protein-like
MASPNRGEGLNKPKVGRPPSTSHQMTGNHQTPQVEGLWDPESEDYAWLPRTQYIRLYMYASIVLVFFNKDEAQRSRAITVADCAPGDATPAVTEISATGKRGIPVLVAPLHSQRECEGSGGRRASAEEMMSMGFQGFLLLEEKDDDDPVAQRKKWFKEMRGWLMVLATVAASVTYQAGLNPPGGFWQDGDRAGNPVLRDRHWSRYMIFYYLNATAFVTSLVIMVLLMNERFYHTETKVVALMLTTFIDLISLIGAYIAGTTRFFSSCIYIIVIVCVAFAGVIYFGEVMAEICKFTVRKMPCMLRLTQNKWFPMPAEVVKGLQQEEERISQKRTTAGNVSLENRAVSSFKRIPINITEKKQFLVCSETSAGLMTNFYSWGIE

SEQ ID NO: 52114 - protein, 63 aa, Zea mays
  Coding DNA Sequence Number=SeqID_10335
MESARRADDAESPLKAGKACAKELDAELSRERRASEELQKMFSEVRDVRKVKLNGVWFLGMNL

SEQ ID NO: 52115 - protein, 140 aa, Zea mays
  Coding DNA Sequence Number=SeqID_10336
MRPHPPRPLRLATPKLSETLQRDEVASGAASISEVMRASAELNQRGDLKDTTEKIFEFLEEEYEGQPIKPSYIEMGRSIMKASDLEVMKELGMIAIVLKKYEVYMHHLTPNPIVRLSVFIWGVQSQGVRIDASISLSILD

SEQ ID NO: 52116 - protein, 109 aa, Zea mays
  Coding DNA Sequence Number=SeqID_10337
MAINDIDVSAQRFPFDEDNGMMTFKHHADSGHQKGEDKVEQGRTGFDGLDGTHGRSELENSEQGGRHGWQNGPKGCERVEATKCKTEIGEARRLDKDAEAKRGKPERDQ

SEQ ID NO: 52117 - protein, 161 aa, Zea mays
  Coding DNA Sequence Number=SeqID_10338
MSISEYRDRFLQLSRYVPEDVGTDVKRQYRIWKIENARWVDRRLRAVAAPASQAVHPNNTSRVTHKDISNRANVRNNNNFRGSTLSNSGNSTVSTTNWEEINTRDRAIRHLAFLPQQIIRATKRSQHQEEAEDASIMGSKATGRSIARRKQLNSSQLPTHQ

SEQ ID NO: 52118 - protein, 517 aa, Zea mays
  Coding DNA Sequence Number=SeqID_10339
  Gene Ontology: Mol. function=transferase activity, transferring glycosyl groups; Cellular component=chloroplast; Biological process =purine base biosynthetic process
  Homolog annotation: Hit_ID=Q6I5V5; Match level="QueryCoverage=97%, HitCoverage=98%, E-value=0.0, Identity=77%"; Hit description =Putative amidophosphoribosyl transferase
  Pfam annotation: Domain name=GATase_2; Domain location=82-253; Score =84.0; E_value=4.5e-22; Accession=PF00310.11; Description=Glutamine amidotransferases class-II
  Pfam annotation: Domain name=Pribosyltran; Domain location=304-456; Score=42.6; E_value=1.3e-09; Accession=PF00156.17; Description =Phosphoribosyl transferase domain
  Pfam module annotation: Pfam domain module=GATase_2::Pribosyltran; Domain location=82-253::304-456
MGIVAAAAATTATSRLLYRYAAAGSDRHNRHHLRYYASPYPLSLRCGSGRREAAARALLPDRVTPFSYGVDEDADDHPREECGVIGVVGDPDASSLCYLGLQKLQHRGEEGAGIVAVGGDGKLKSVTGLGLVADVFADPSRLASLPGPAAIGHVAVAHNGNLVNYQALRNKLEARGSIFNTSSDTEVILHLIATSLSRPLLARVCDACERLAGAYSLLFLTADKLFAVRDPHGFRPLVMGRRRNGAVVFASETCALDLIDATYEREVEPGEVVVVDRRDMSVASACLVPHRPRRACVFEHIYFSLPNSVVFSHAVHERRTAFGQALAEESPAPGADVVIPVPDSGFYAALGFARASGLEFQQGLIRWHYSGRSFIQPTQAIRDLAVKLKLAPVRGVITGKSVVVVDDSLVRGTTSSKIVRLLRDAGAREVHMRIASPPVVGSCLYGIDTPSEGELISNRMDLDGVRREIGSDSLAFLSLDKLHSIYGEESGNYCDACFSRKYPVLPTLADPAAELED

SEQ ID NO: 52119 - protein, 52 aa, Zea mays
  Coding DNA Sequence Number=SeqID_10340
MRHTLNASQGIEALEGVKGPPSPFEALGRSASFQVEMAMGTRDPIPDGYLLH

SEQ ID NO: 52120 - protein, 162 aa, Zea mays
  Coding DNA Sequence Number=SeqID_10341
  Gene Ontology: Mol. function=transporter activity; Cellular component= membrane; Biological process=oligopeptide transport
  Homolog annotation: Hit_ID=Q9SK99; Match level="QueryCoverage=81%, HitCoverage=16%, E-value=2e-23, Identity=42%"; Hit description =Similar to LeOPT1 [Lycopersicon esculentum]
MADGDEQGAGAGAAADGAAVDAAVDHRGRPASRATTGGWKSASFIIGKSRPRSDRPYPCSAYRIAEVDLHRARLGRGSGGRPANAAVEIAERFSFYGVSANLITFLTGPLGEGVAAAAAAINAWNGTAQLLPLLGGTLADKWLGRYRTIVLASVVYILVRKK

SEQ ID NO: 52121 - protein, 46 aa, Zea mays
  Coding DNA Sequence Number=SeqID_10342
MDKAGLWLKQLIENLRVYAQAMKVQAEVDNFDKEEDLRTQMHIEAS

SEQ ID NO: 52122 - protein, 274 aa, Zea mays
  Coding DNA Sequence Number=SeqID_10343
  Gene Ontology: Mol. function=receptor activity; Cellular component =mitochondrion; Biological process=protein amino acid phosphorylation
  Homolog annotation: Hit_ID=Q1S1U3; Match level="QueryCoverage=96%, HitCoverage=55%, E-value=2e-45, Identity=61%"; Hit description=Trp repressor/replication initiator
  Pfam annotation: Domain name=DUF668; Domain location=189-274; Score =148.5; E_value=1.7e-41; Accession=PF05003.3; Description=Protein of unknown function (DUF668)
  Subcellular localization annotation: CTP_CleavageSite=49; ConfidenceScore=5.18e-01
MAWARQKPVSEVSSILGRASTVGLEKAVEVLDTLGSSMTSFNSSRGFVSSSAAKGNKISMLAFEMANTIVKGSNLMHSLSELSIKHLKEVVLHSELQKVFNTLYPKILMNCSRWQLPTKGDSLDILKQAVKVQSKHVKSMKKKSLWSKNLEEVVVKLVDIVHFLHLEIYNAFGHPDKEEPQERGKHHNRLGPAGLALHYASIINQIDNLVSQSCAMPPNARDALYHSLPPIIKSALRYKLQSFEVKEELTASQVQAEMEKTLWWLVPLASNTNK

SEQ ID NO: 52123 - protein, 429 aa, Zea mays
  Coding DNA Sequence Number=SeqID_10344
  Gene Ontology: Mol. function=GTP binding; Cellular component =intracellular; Biological process=small GTPase mediated signal transduction
  Homolog annotation: Hit_ID=Q5TKI5; Match level="QueryCoverage=70%, HitCoverage=81%, E-value=1e-141, Identity=81%"; Hit description =Putative GTP-binding protein
  Pfam annotation: Domain name=MMR_HSR1; Domain location=217-327; Score= 72.8; E_value=1.1e-18; Accession=PF01926.13; Description=GTPase of unknown function
  Subcellular localization annotation: CTP_CleavageSite=41; ConfidenceScore=5.56e-01
MAAASWSAPTTSFAPAPAPPWGRWRTKAAPLPIRTLPRRVLLNAVGESAMVAAGDTLLGLYEKERLGLLQYADDESKEERYWETLDADLRYWTRSLRPVQWYPGHIAKTEKELKEQLRLMDVVIEIRDARIPLSTSHPKMDSWLGNRKRIIVLNRKDMISTEDMNAWATYFGNQGIKVVFSNGQLGMGTMKLGRMAKSVASVANTKRKEKGLLPRPVRAGIVGYPNVGKSSLINRLLKRRMCPAAPRPGVTRELKWVRFGTDLELLDSPGILPMRISDQTSAIKLAICDDIGERSYDFADVAAILVQMLIRHPAVGSEAFRRRYKIDVDITNDMSFLQHFAYSIRYRIYDTSLLLILLASHTVSFSPEFNGRPCYSYLILSNCLYRGWGFKTADDHIQVYVPNHCTDANPVFANSPTQPKPWYALIIGH

SEQ ID NO: 52124 - protein, 60 aa, Zea mays
  Coding DNA Sequence Number=SeqID_10345
  Subcellular localization annotation: CTP_CleavageSite=41; ConfidenceScore=5.18e-01
MDSPVGVFAVSLRSRMTTFFMYMPRWTSPFKDRAHTSAFVSLAAYLALENLVGCNTRALA

SEQ ID NO: 52125 - protein, 123 aa, Zea mays
  Coding DNA Sequence Number=SeqID_10346
MAPKRKNQNSATVVIPPIDPNSQLPFAGDSKLNFAPSGILRGASYNSPDCPVYHQTVSGAPEESDSELASFGNPLRYNSPDMSEEQCTRGWHTRQSTVLVRCTTGQAGGPTSQSSNGRNPTAW

SEQ ID NO: 52126 - protein, 81 aa, Zea mays
  Coding DNA Sequence Number=SeqID_10347
MGKSKKGGSSSHHSGDKRKREPSPPSEDFGDSEYSEEEFSSKSEGSPGLRLSPDNCRAVLDHVNVLEVTAELYWATSALQR

SEQ ID NO: 52127 - protein, 124 aa, Zea mays
  Coding DNA Sequence Number=SeqID_10348
MHLLCPLATTALELDPFIGDAKTRTVDVRLRALPLLAVWVPLRGHPAEAPQPPRCRPLMAPEHSSRLRESVSSLCPSVGSAVPLPRGRGQGQALPVHAVRAPVQPAASYRYCVLEAGLHFTYML

SEQ ID NO: 52128 - protein, 140 aa, Zea mays
  Coding DNA Sequence Number=SeqID_10349
  Subcellular localization annotation: CTP_CleavageSite=31; ConfidenceScore=5.52e-01
MSLACLVCHGMSSPSHSLRSYSVSSSEEESRCGAVVACLARRVTPAGTSTSVGTSKVTPFPPVVSDQVGTEGAPRLQRSRAVSRDLVRDWNFDEVELVYGSIVGSPIDRNPSHLFGRGLDSFLDEAQQKYARYSKNPTRY

SEQ ID NO: 52129 - protein, 177 aa, Zea mays
  Coding DNA Sequence Number=SeqID_10350
MKEQRSSNYRQQLTDLLKLPIHVVLLVDLCEQRRGHAQQLQRGVRASNNGRALLAPSSGSRCPGRGLPRAPHGANAGSHSQACTIMRKKTSGTGREVENPSITTGINLFAECRKHSAKALKTLGKGFAECNTRQRRLGKQCIGKDFFAEYFFSGTRKRSLPSVRVHSAKKRDRYGAG

SEQ ID NO: 52130 - protein, 63 aa, Zea mays
  Coding DNA Sequence Number=SeqID_10351
MPKPDKTFPLLILQVLPSLHNPWGWTTTVRRDPNSWNDVVFWSEWAVMYLQFEGNESTSVTQK

SEQ ID NO: 52131 - protein, 216 aa, Zea mays
  Coding DNA Sequence Number=SeqID_10352
  Homolog annotation: Hit_ID=Q6ZIK5; Match level="QueryCoverage=77%, HitCoverage=36%, E-value=2e-11, Identity=39%"; Hit description =Putative growth-regulating factor 1
MRRNLGFCYAKSAGRKASARAAPRASESSTHVAVPWSADRMAPPVSDPVRYNAYGTRSFADQLVLEAMDPSSSMENPCHHRLPPSQSSSFALSSYPQLGARLSDLGQQQQGTVSSLPKTERQPQPQQQPLSFLGRSDLAAMDSAASAKQEEEECQTLRPFFDDEWPRARASSWPGIPGENASFPSATAQLSMSMSTPIACSEFPVAWSAPRRRSNG

SEQ ID NO: 52132 - protein, 46 aa, Zea mays
  Coding DNA Sequence Number=SeqID_10353
MKAVPIGPLRRPCDGDIWHKTMDERGYGSLVYGLVMMKDDSEKGPS

SEQ ID NO: 52133 - protein, 162 aa, Zea mays
  Coding DNA Sequence Number=SeqID_10354
MDISKHAPMHKEKRGGITVPKLSDSHILTSKGADGAIGSCLTTKQVFDLGTECGISYRELKTKESGKDNHIQARMCYLIRNGSFDGCKKLNQFLKTVREKNELTLPQFPIAKYKVMIKSSKVKKEKEFEVEENPEEDPEEDPKEESKGEPSKEDKASDPDFD

SEQ ID NO: 52134 - protein, 78 aa, Zea mays
  Coding DNA Sequence Number=SeqID_10355
MGMVKESQRFRVTNMSNVSKLRKVRHDFRVMGDIYGTKNGILGRLNVKRCQDYAQGVAYQIIMHTEQALMALLSLFTT

SEQ ID NO: 52135 - protein, 630 aa, Zea mays
  Coding DNA Sequence Number=SeqID_10356
  Gene Ontology: Mol. function=DNA binding
  Homolog annotation: Hit_ID=Q1SFS3; Match level="QueryCoverage=70%, HitCoverage=81%, E-value=6e-25, Identity=23%"; Hit description =Lambda repressor-like, DNA-binding
MESGFLDKVEDNAAVRTWSETTQQEKGDSLANGHVSELWDFTHINATQNNLQELKEIWGQWSDEVRQLFYDNYGDLPYLLDVKVDKRLFQALAQFWNPAYSCFTFGKVDLVPTIEEYMALLHCSKFQVDRVYSRAVNVPTFSKKLMSVTGMSEQWVVTRIKQKGDSKCVPWRGLKDTILTHPDVRKRLDVFALSIYGLVVFPKALGYVDETVTDLFDQLDKKVTPIPAILVETFRSLSACRKTGEGRFIGCAQLLLAWFHSHFWKVDKVSYRVFYKNYSPLKEIVATPRRDDISKEKWIAILQNLREEDIEWRAPWLLPDEILYRCGSFDWVPLLGVWGATGYTPLLVLRQYRSRQFIPATQGIADCEYSYKDDGYRKKDFERKNADLEKRIEQMEAEKMNLRLDIDVQKLENERLKKEKNKVDEEIGSLKTDYKKLRLSIRTAGLGKTSEQWRVEIQEEKGKANRWEQKFQEMQRRNEALEKSLLESQKEKGELKDRVIVLERSLRQYRSRNSTIELKASLSKIEEMEKRIEELETELQNCEIQIKHLKVNESHSNEQLHHFQNQVRSRDHLIKKAVVQIREVADHIQTLAVQADTLSVKYESESKRGQELALLLRKIRVLGTRAKSYL

SEQ ID NO: 52136 - protein, 122 aa, Zea mays
  Coding DNA Sequence Number=SeqID_10357
MSRKRTRSSKTSTENPVVIQDEEARERFDSIFRNQPMMLEKAFNLESNYKMVMPLSIRKTINALNWEQFYNAHSMSNKDLVREFYANLTTLNANEVLIHKKKYKARGECGIECDKEGKRKKT

SEQ ID NO: 52137 - protein, 70 aa, Zea mays
  Coding DNA Sequence Number=SeqID_10358
MENNINDEQSKWQTNMVDSPSMGHFAHDQNMRRMFISPREMLQKLRIEKEGVVKEKGDMLKMKEEELATK

SEQ ID NO: 52138 - protein, 203 aa, Zea mays
  Coding DNA Sequence Number=SeqID_10359
  Gene Ontology: Mol. function=oxidoreductase activity, acting on paired donors, with incorporation or reduction of molecular oxygen, 2-oxoglutarate as one donor, and incorporation of one atom each of oxygen into both ...
  Gene Ontology: Mol. function=donors; Cellular component=cytoplasm; Biological process=protein metabolic process
  Homolog annotation: Hit_ID=Q53CF1; Match level="QueryCoverage=91%, HitCoverage=71%, E-value=8e-63, Identity=57%"; Hit description =Prolyl 4-hydroxylase
  Pfam annotation: Domain name=2OG-FeII_Oxy; Domain location=48-166; Score=19.3; E_value=0.0015; Accession=PF03171.10; Description=2OG -Fe(II) oxygenase superfamily
  Pfam annotation: Domain name=ShK; Domain location=148-189; Score =31.1; E_value=3.8e-06; Accession=PF01549.14; Description=ShK domain -like
  Pfam annotation: Domain name=Toxin_7; Domain location=147-189; Score =6.4; E_value=0.039; Accession=PF05980.3; Description=Toxin 7
  Pfam module annotation: Pfam domain module=2OG-FeII_Oxy::ShK::Toxin _7; Domain location=48-166::148-189::147-189
MVADNESGDSIESEVRTSSGMFLQKAQDEVVADIEARIAAWTFLPAENGKSMQILHYENGQKYEPHFDYFHDKANQELGGHCIATVLMYLSDVESGEETVFPNAESAFCRENFLSQRMIAGQIVQKMDMQIHVRSFDTAKRQSVNRDCVDENENCANWASAGECEKNPSYMIGSEDYYGYCRKSCKIKNPKINEERRKLLISH

SEQ ID NO: 52139 - protein, 259 aa, Zea mays
  Coding DNA Sequence Number=SeqID_10360
MQSSPNCSGFPGILPNTIILIYIKLGVRITKLYIDQGKADDQLNWRVRQSEKLTNLKEKLRRSKEQLAQGKVKIERVSHELKVKYGVLKSARGTLEKNRVEKLEKFYPNLICTQSLGHVHLDEERRDGSSGQYDLICNARLPRGLDPHSVPSEELAASLGYMVQLLNLVVHNLAAPALHNSGFASFRFPVTIFKRGLAPEYGNGILIGMHVLLLEAMNIRFLYHAKITAPLVGIIHGQIKALVRVQICAIDMTCHIVVW

SEQ ID NO: 52140 - protein, 58 aa, Zea mays
  Coding DNA Sequence Number=SeqID_10361
MKVSVASDLSWGHYRAQMAVATDIIEALEGFVNQGITSTVSELSVHSELPIHVNHQYI

SEQ ID NO: 52141 - protein, 55 aa, Zea mays
  Coding DNA Sequence Number=SeqID_10362
MKHLVVKLTLRERVSLFVGNKIGMLMMIVEGHRNEILAAELSEDSRDQSKRFWAT

SEQ ID NO: 52142 - protein, 799 aa, Zea mays
  Coding DNA Sequence Number=SeqID_10363
  Gene Ontology: Mol. function=helicase activity; Cellular component =nucleus; Biological process=tRNA processing
  Homolog annotation: Hit_ID=Q9FHU9; Match level="QueryCoverage=58%, HitCoverage=85%, E-value=2e-74, Identity=35%"; Hit description =Similarity to nonsense-mediated mRNA decay trans-acting factors
  Pfam annotation: Domain name=ResIII; Domain location=300-411; Score= -39.3; E_value=0.09; Accession=PF04851.6; Description=Type III restriction enzyme, res subunit
MERGRGGSGGRGGGRTFQRNNAGEEWPNLVGVVLSWSLADVMNKDLFKDKFKLLSTLRAYDAKSLETPVPIFSLSHLCVSLTARFFSMVKQIPSTFPNLKSYLECYTSPLLEELRAEMSSSLESLSTVPSVRISRIEEKRDKHEIYLASDCQVAKPHNRPECYTPSVGDVILLSDVKPGHISDTTRNGRPYRVAFVTDADGGDEYDDSPPAKYGIVASGKIDAADDERQDGKSTSLFAACLLNIVTYIRIWRCLDYEALRTNRGLIEKMVNYQPISSTSENSTEDAGPTDSVEIWTKLSAMELNTSQNDAVLNCISKMHSKSSTFTLIWGPPGTGKTKTISVLLWLMREMKHGTLVCAPTNLAIKQVASRFLKLVQEHSGDTRCLGDVLLIGNKERMCVDGDLKQIYLYDRVRRLFGCFAPLTGWKHHLSSLSDFLENGYSQYLQHLQDSQEGDTPSFFSYARKRFAVIYMELRRCFNDLLLHVPKSSILEVNYNSILLLLEMLEEFNHMIQCSSTKITANKKVEFLVVDEAAQLKECETLIPLRLWTLKHAVLIGDECQLPATVKSKVCTDALFGRSLFERLSSLGHEKHLLNMQYRMHPSISIFPNTSFYEGRISDATNVMEKEHRRMYLPACFKTKRKVTVGVICPYNAQVVAIQGKIEKMRFDPLQVKTNSVDGFQGGEEDIIILSTVRSNSVGKVETRSPNDLNEQGTSSTSVSHYAGIPSSDIVVVSEFQRPSNKNEDVEDITVIPNKENDKDINAMPVIPDKGNVVDGNHILAIPCAMLSNLARWCIRSFRS

SEQ ID NO: 52143 - protein, 338 aa, Zea mays
  Coding DNA Sequence Number=SeqID_10364
  Pfam annotation: Domain name=ACT; Domain location=264-324; Score =16.5; E_value=0.029; Accession=PF01842.15; Description=ACT domain
MPAPHIPVMPMDERREMDSVTDAHRVAWLQHGLLGLLVLRQLHPIRPSICLHLHGDATVRHPIMGGARGHGGQLLLPEAASARRFFAGARDRRLFFYDHAMGEGRGPTLPSAAAWPFSGGGPPAASREPPRVHRHLTPHPTAPSTRIPLVCSISAQICNPWSGPRPSLSNRVLHGFRFLGKDRRNPWSLPTCARPLHVRSLPRAACCQICGSNDRSIESWVLVKKPCSVVPGDDAGSPSWDSSGASPATNQLPEIEARFLNKNVMVRIHCEDGKGVVVRVLAELEELPLSIVHANVIHHCEVLDVSAPQRGPRRIATVALEKAEADGNIVALKNYLKT

SEQ ID NO: 52144 - protein, 114 aa, Zea mays
  Coding DNA Sequence Number=SeqID_10365
MLDALLSGNEGTRAKLSDDQIIDLLITLIYSGYETVSTTSMMAVKAASNQALGVLGRDAFWLCFLEKKQQTRGGLASTTGRCRPSWSNHSANASEELHAPVARPSPALPSQLLA

SEQ ID NO: 52145 - protein, 335 aa, Zea mays
  Coding DNA Sequence Number=SeqID_10366
  Gene Ontology: Mol. function=endonuclease activity
  Homolog annotation: Hit_ID=Q6ETZ9; Match level="QueryCoverage=64%, HitCoverage=43%, E-value=1e-31, Identity=38%"; Hit description=TRNA -splicing endonuclease positive effector-like
METSAAPLFMLSAFSVAPNVLGLLDIPIGVNGREAQLISWAARVLFALQRIICFNEKRNHIDIKYHYIREIVVEESELKDFLKKSAQIRKSKRRMQAVASYWNRKKSSFGLGHLERKVFSWSVPDIFNRDLLRHQVKRIPDIFESFASYLNSFAYPFIEEVHADLFSSLDGYVHASFIEVIQVARLDEERPIFGLDVAEPVKDGERSREVYEPTRGDIIVMSSQKPKHVSDLTRNQVSYVLGSVLKSHREEDDSLPPNCCIVQLSSAILIDSYHQTKKPKGQLFAVFLISMETYNRVWKCLHMGPNDAIVELRNKKCTDLVNSVWQYKRRYIAFV

SEQ ID NO: 52146 - protein, 286 aa, Zea mays
  Coding DNA Sequence Number=SeqID_10367
MEAYVLFARAKEQEEDIGCPSESSAARSTSSSSDGVDLADDASSSGSTCHFEMASLMTHLPIKRGLSKFFAGKSQSFASLAAVGGIDDLPKPPAKRLKTSWSCGVGLEDARRGPPSVTTANKQASSRARLTPSALGSTPRRLDVSAVVIGADLLFKKRRLGSYLNKWCAWLVHKFIYKYSKSTVRNTVDYFGQEKFFGKITQARTVRALAVDRPRHPSGLGQEHCINGSQTLWIVRWKSKHRPGPGADRSVGTTKNPEGDRFGKMNYSVLTDHPGYTIGPSATAFI

SEQ ID NO: 52147 - protein, 342 aa, Zea mays
  Coding DNA Sequence Number=SeqID_10368
  Gene Ontology: Mol. function=DNA binding; Biological process =regulation of transcription, DNA-dependent
  Homolog annotation: Hit_ID=Q6EU30; Match level="QueryCoverage=75%, HitCoverage=62%, E-value=2e-45, Identity=58%"; Hit description=RAV -like B3 domain DNA binding protein-like
  Pfam annotation: Domain name=B3; Domain location=86-181; Score=94.7; E_value=2.7e-25; Accession=PF02362.12; Description=B3 DNA binding domain
MEFASSSSRFSKEEEEQEEEEDEEVSPREIPFMTAAATAGTGATSSSPSPSAAASASASSSAAALRSSGGGGGGDDDMEVVEKEHMFDKVVTPSDVGKLNRLVIPKQHAEKYFPLDAAANEKGLLLSFEDRAGKLWRFRYSYWNSSQSYVMTKGWSRFVKEKRLDARGHRLLLPWRRRRCAGPPLHRLEEAQRRLLPPPAPHAATPPAPHAATRVALRLWPLGRRRGRFLRAARHTLRAPPLPPGPRLPQRQRRGRAGQAAPLLRLSRHAPARVHPAAAAAAAAISAQHYDGATQPRGHGRPAHASRLGAARQQPDGSREASPPVRGQPRQPAARQQCRVKP

SEQ ID NO: 52148 - protein, 657 aa, Zea mays
  Coding DNA Sequence Number=SeqID_10369
  Gene Ontology: Mol. function=protein-tyrosine kinase activity; Cellular component=integral to membrane; Biological process=protein amino acid phosphorylation
  Homolog annotation: Hit_ID=Q339I2; Match level="QueryCoverage=95%, HitCoverage=95%, E-value=0.0, Identity=64%"; Hit description=Protein kinase domain containing protein, expressed
  Pfam annotation: Domain name=Pkinase; Domain location=349-618; Score=- 98.7; E_value=0.011; Accession=PF00069.15; Description=Protein kinase domain
  Pfam annotation: Domain name=Pkinase_Tyr; Domain location=371-614; Score=-102.0; E_value=3.3e-06; Accession=PF07714.7; Description =Protein tyrosine kinase
  Pfam module annotation: Pfam domain module=Pkinase::Pkinase_Tyr; Domain location=349-618::371-614
MTPLPLHLHHLLLALLAASAAQATDPSGCGGGEDRCGDLVLPYPFHLNSSCASAGGANSSLFRLSCNASGSATLTLALGSATFRVLAFLPSGSLLLDYAPAASKSPCDAAYAAFSRPSSPATALDAAPFLAVTPANVLRLYACEDSSLCRAGCDDVATCGGRSGCCYPLSDGSVWKPGNGLGVFADYGCRGFSSWVRNRSSAAAGAARGVVRGVEVEWAVPRGSAMAKCADGAALVNATALHDGVRCACAAGLVGDGFAQGTGCTKGTSCSNGGGEHASDGRDCCQGRFCSRKAVVLAGFFVSLFFLAAAVSFWLFLRQPSKESRRWDLDPACIPKILRSVCDARQFTYEQLEEATRRVDGEKAVDTADDGAVHAGVLDDGSLVAVQRIGYETQGRLRLVLDRMELLSEISHPSIARVVGFCLDSSSNALLLVHEHFAGGTLEEHLRQVRRRVVLSWYHRVNIAIELASALTYLQAHEAAPTFLHDLRSSDIFLDAGFTAKIAGYKLTGPGPATACCSAAASSCEQDVVCNFGHLLVELLTGLRQQVPLDSVAPKVREGRVHEVIDPTLLSSGGGNGKQLPASHDEVRKVFELAVRCLSCAETGLCMLAVAKELMHILRDNNGSSSKIEISLEETFSSSSLLQMISMSPETLHHHLP

SEQ ID NO: 52149 - protein, 110 aa, Zea mays
  Coding DNA Sequence Number=SeqID_10370
MSVRSASATRSGFWHACCVRPAWNGRYVLHTRLASHAALSLYVLHTRLARSAHATILGTGWLISTRPVSLARSPLFGFGLSLARSGSMRAQADPARISGPGSDKKLGTVI

SEQ ID NO: 52150 - protein, 477 aa, Zea mays
  Coding DNA Sequence Number=SeqID_10371
  Gene Ontology: Mol. function=transferase activity, transferring glycosyl groups; Cellular component=cytoplasm; Biological process =metabolic process
  Homolog annotation: Hit_ID=Q6Z684; Match level="QueryCoverage=99%, HitCoverage=99%, E-value=0.0, Identity=78%"; Hit description =Putative UDP-glucose glucosyltransferase1
  Pfam annotation: Domain name=UDPGT; Domain location=17-476; Score =8.5; E_value=4.7e-11; Accession=PF00201.9; Description=UDP -glucoronosyl and UDP-glucosyl transferase
  Subcellular localization annotation: CTP_CleavageSite=61; ConfidenceScore=5.04e-01
MGSLGSAAQQQPQQPHAVCLPYPAQGHITPMLNVAKLLHARGFHVTFVNTEYNQARLVRTRGAAAVAGLPGFRFATIPDGLPPSEDDDVTQDIPSLCKSTTETCLGPFRRLLADLSDPPVTCVVSDVVMGFSIDATKELGLPYVQLWTASTISFLGYRHYHLLKSRVEQLTNGFLDTAVEDVPGLRNMRFRDFPSFIRSTDPDEYMVGYVLQETGRTAGASAVILNTFDELEGEAVAAMRSLGLARKVYTLGPLPLLAREDPPTPRSAISLSLWKEEEECLRWLDGRDPGSVVYVNFGSITVMTSEQLVEFAWGLANSGRPFLWIIRRDLVRGDTAVLPPEFLSETAGRGLMATWCPQQAVLDHPAVAAFLTHSGWNSTLEAMCGGVPVISWPFFADQQTNCRYQCNEWGVGMEIDSNVRRDAVASLIAELMEGEQGKEMRRRALEWRDKAIEVAKPGGTSHRNFDDLVRNVLLPKN

SEQ ID NO: 52151 - protein, 484 aa, Zea mays
  Coding DNA Sequence Number=SeqID_10372
  Gene Ontology: Mol. function=transferase activity, transferring glycosyl groups; Cellular component=cytoplasm; Biological process =metabolic process
  Homolog annotation: Hit_ID=Q6Z688; Match level="QueryCoverage=99%, HitCoverage=99%, E-value=0.0, Identity=81%"; Hit description =Putative UDP-glucose glucosyltransferase
  Pfam annotation: Domain name=UDPGT; Domain location=12-480; Score= -13.6; E_value=6.1e-10; Accession=PF00201.9; Description=UDP -glucoronosyl and UDP-glucosyl transferase
MSSGKAQRRPHAVLIPQPAQGHVTPMLHLAKALHARGFRVTYVNSEYNHRRLLRSRGQDSLAGTDGFHFEAVPDGLPQSDNDDVTQDIAALCLSTTAHSAAPFRDLLARLNAMPGSPPVSCVIADGVMSFAQRVAEEMGILALVFWTTSACGFMGYLHFAELIRRGYVPLKDESDLTNGYLDTAIDWIPGMPDIRLKDIPSFIRTTDRDDVMLNFDGGEAQNARRARGVILNTYDALEQDVVDALRREFPRVYTVGPLAAFANAAAGGELDAIGGNLWKEDTSYLRWLDTQRPGSVVYVNFGSITVMTAAQLAEFAWGLAGCGRPFLWVIRPDLVSGETAMLPEGFVTDTKGRGILASWCPQELVLSHPSVGLFLTHCGWNSTLESVCAGVPMLCWPFFAEQPTNCRYVCDKWGIGMEIDNDVRREEVARLVRAAIDGERGKAMRVKSVVWKEKARQAVEDGGSSRKNLDRLVDFLLAGSDLPC

SEQ ID NO: 52152 - protein, 113 aa, Zea mays
  Coding DNA Sequence Number=SeqID_10373
  Gene Ontology: Mol. function=nucleic acid binding; Cellular component= nucleus; Biological process=type I hypersensitivity
  Homolog annotation: Hit_ID=Q69U07; Match level="QueryCoverage=82%, HitCoverage=33%, E-value=5e-33, Identity=73%"; Hit description =Putative SEB4D
  Pfam annotation: Domain name=RRM_1; Domain location=29-99; Score =68.8; E_value=1.8e-17; Accession=PF00076.12; Description=RNA recognition motif. (a.k.a. RRM, RBD, or
MATSSSSSGPGGPYHHHRSRFGDTTLTKVFVGGLAWETPSEGLRHHFEAYGDILEAVVITDRETGRSKGYGFVIFRDPGAAALAVQNPNPVIAGRRANCNIAAFGPPFSAQPR

SEQ ID NO: 52153 - protein, 93 aa, Zea mays
  Coding DNA Sequence Number=SeqID_10374
  Subcellular localization annotation: CTP_CleavageSite=7; ConfidenceScore=5.04e-01
MTEWKTRAVLVQSKTLSPSRRAHGWDPPLLRTVTTVLSKPVLPLSGRGGGGGAVREPHGPDQPPQGSPYSYRLPSQMTPPQAAAVLYSPQYGG

SEQ ID NO: 52154 - protein, 126 aa, Zea mays
  Coding DNA Sequence Number=SeqID_10375
  Gene Ontology: Mol. function=nucleic acid binding; Cellular component= nucleus; Biological process=type I hypersensitivity
  Homolog annotation: Hit_ID=Q9S7D7; Match level="QueryCoverage=79%, HitCoverage=36%, E-value=1e-31, Identity=66%"; Hit description =Putative RNA-binding protein; 24808-23340
  Pfam annotation: Domain name=RRM_1; Domain location=29-99; Score =63.7; E_value=6e-16; Accession=PF00076.12; Description=RNA recognition motif. (a.k.a. RRM, RBD, or
MATSSSSSGPGGPYHHHRSRFGDTTLTKVFVGGLAWETPSEGLRHLFEAYSDILEAVVITDRETGRSKGYGFVIFRDPGAAALAVQNPNPVIAGRRANCNIAAFGPPRTAQPRAYTILPPLLLLFL

SEQ ID NO: 52155 - protein, 151 aa, Zea mays
  Coding DNA Sequence Number=SeqID_10376
MALGSSSQESHTTFITMVDHIRTWDLVQEFLANQTFLTLSGSRMLKPRREMKRRRVVCLRSKQRLNRVMNAMVFEYPNYPKISEEANEDGSNQFESPRIGPDQFGLKITSFANFHGCMCTTYFICSFAPADLEGPGRKSCANYSFGSSNFT

SEQ ID NO: 52156 - protein, 140 aa, Zea mays
  Coding DNA Sequence Number=SeqID_10377
  Gene Ontology: Mol. function=protein-methionine-S-oxide reductase activity; Biological process=regulation of transcription
  Homolog annotation: Hit_ID=Q53MB4; Match level="QueryCoverage=83%, HitCoverage=19%, E-value=1e-20, Identity=56%"; Hit description =SCARECROW gene regulator, putative
MPFLFDTSFLARVIEAVTLIHCAQAVAASNRPSAVDLLGKIWGDTTQRLAHCFAEGLEARLAGMGTQQLTAAMKCAAVVEILRAYQLYLAACSFTAMAYKLLGSSGVEVAGRRREEEGAHRGLRRPLLRFPVAVVAGLLG

SEQ ID NO: 52157 - protein, 202 aa, Zea mays
  Coding DNA Sequence Number=SeqID_10378
  Subcellular localization annotation: CTP_CleavageSite=41; ConfidenceScore=5.02e-01
MGGEERKKEKPAASVLSCAQVGCACSRGRVQAPGRARRRLSSEAKAESEPWSQARRSSSSSEAEPESEPWGRARQSSSSSGAEPESEPWGRARRSSSSSRAEPESEPWGRSRRSFLWRPRSDLAAVSLTLSSGTAVGATQAALSTCQAGQWSGKAILALNAPVIRSVGVAIWPRLLLGEDWASGEPKLCADGGYQLRLGVLG

SEQ ID NO: 52158 - protein, 169 aa, Zea mays
  Coding DNA Sequence Number=SeqID_10379
MVTNGLVDGELGNEEGVSERESSEWRRESCCGREKRRARLGFYREREEEQRSSGASWLPLMAVGSNGEEETIVLKVHNAGRRTDGRAGRGRGIVGRLRGRAGAGHGRLARPVAGGYSSVSGSGSRAVAAGALLGAALVRDGAGLGSWRGRRGGGWSLGLEQGRGSRARA

SEQ ID NO: 52159 - protein, 164 aa, Zea mays
  Coding DNA Sequence Number=SeqID_10380
MVTNGLVDGELGNEEGVSERESSEWRRESCCGREKRRARLGFYREREEEQRSSGASWLPLMAVGSNGEEETVVLKEQGADGWLGQSLAAARRCQARGHARSRLGRCWARLWSGMARDLAPGVDAEAGAGRSAWSRGEEAGRARYQGVTKSTPLKKNLVLEIKKG

SEQ ID NO: 52160 - protein, 304 aa, Zea mays
  Coding DNA Sequence Number=SeqID_10381
  Gene Ontology: Mol. function=heat shock protein binding; Cellular component=integral to membrane; Biological process=protein folding
  Homolog annotation: Hit_ID=Q337K3; Match level="QueryCoverage=78%, HitCoverage=72%, E-value=5e-78, Identity=61%"; Hit description=DnaJ domain containing protein, expressed
  Pfam annotation: Domain name=DnaJ; Domain location=46-100; Score= -8.9; E_value=0.033; Accession=PF00226.21; Description=DnaJ domain
MASGLRLLLLAVALVASAVKRRRGAVVVAADAAAAAGSAEFGDEENPYELLGIRPLDSFDHMKMAYKKKRKDAEETGDDEFLAKLDRAYDTVMMQQLQYRKKGVTYGSVQHSKEYNVFVICSFITSLKVSKDIKYADNQPVVPWGPRFSRSTMKDMRINMAVSAAFVVWIAIMGNADWKPLQFLCFAFFYRILQKLRATEPPITPIYNEYGEVEGRGIRMAKRVVRALGLIFGCVFAASLGYTAAINLIELSMQYTPRLVYYYQCLTWLENVVIESFSIILAACFWCDKILVILAVFREEMTNG

SEQ ID NO: 52161 - protein, 69 aa, Zea mays
  Coding DNA Sequence Number=SeqID_10382
  Subcellular localization annotation: CTP_CleavageSite=35; ConfidenceScore=5.01e-01
MAHRTVRCTPDMSGATATSPNAVGFDRWSSVFWARLDVRWRTGRDGNGYPKPETRWVKTLLGHGHDVAI

SEQ ID NO: 52162 - protein, 384 aa, Zea mays
  Coding DNA Sequence Number=SeqID_10383
  Gene Ontology: Mol. function=protein phosphatase type 2C activity; Cellular component=nucleus; Biological process=protein amino acid dephosphorylation
  Homolog annotation: Hit_ID=Q1SGL9; Match level="QueryCoverage=90%, HitCoverage=96%, E-value=1e-120, Identity=59%"; Hit description =Protein phosphatase 2C-like
  Pfam annotation: Domain name=PP2C; Domain location=86-364; Score =127.5; E_value=3.8e-35; Accession=PF00481.12; Description=Protein phosphatase 2C
MPTRNTELGWGRQGRIGIGIGICICMHRSQRMRQISSLLQGLARSLSVGRDRDRDRDRKGNGAGDRKTAVPAVLRTSGTLWGDGSDTFAAVCSRRGEKGINQDCSIVWEGFGCQEGTIFCGIFDGHGQWGHYVAKAVRDSLPPSLLCHWQEALALASLIDDGEKKLGDCQFDLWKRSYVAACAAVDDELRRSRRLDAVQSGCTALSIVKQGDLMIVANVGDSRAVLGTTSDDGAIAAVQLTVDLKPNLPQEKERIRRCNGQVYCLADEPGVHRVWQPSRESPGLAMSRAFGDYCVKDCGVISTPEVTQKRISSSDQFIILATDGVWDVLSNDEAVHIVAGTPDRAKAAKRLVECAVRAWRRKRRDIAVDDCSAICLFFHPPPPS

SEQ ID NO: 52163 - protein, 126 aa, Zea mays
  Coding DNA Sequence Number=SeqID_10384
MSGAADDLGTLSDVEKPDRILAQLQSINNRLDSHDNRLAKLEQARVGSSASTTGGLGAGNVGTSDEGGLGTIEGGLGVSDGGLGTGEGGHMGSCGGALEEADEPCEVVTNLGLGEIITPTGTVAYI

SEQ ID NO: 52164 - protein, 248 aa, Zea mays
  Coding DNA Sequence Number=SeqID_10385
  Homolog annotation: Hit_ID=Q5EFI5; Match level="QueryCoverage=35%, HitCoverage=3%, E-value=3e-20, Identity=63%"; Hit description=Target of rapamycin
  Pfam annotation: Domain name=HEAT; Domain location=189-226; Score =17.4; E_value=0.053; Accession=PF02985.12; Description=HEAT repeat
MTLRPGKLPSEGIDNNALLLPGPSSEALMFLLGSHNNFVRLEGFDEGELGHNDVGGRDDRMTIDGGKLGAEDVAQRVGTTIPSPVVARSGWRKPAIVVGNGAEAHVGVSAATVSWGGMSPARVGWSVGALEPAWVPCVAWERVGAVAATKEALVTRLCEGTGPNANNALAAGVLATVGELAKVGGFAMRQYLPELMPVVVDSLLDGGAVSKREVAVSTLGQIIQSTGRTAPQYIKEIKGSKKTSHPNS

SEQ ID NO: 52165 - protein, 587 aa, Zea mays
  Coding DNA Sequence Number=SeqID_10386
  Gene Ontology: Mol. function=phosphotransferase activity, alcohol group as acceptor; Cellular component=cytosol; Biological process =signal transduction
  Homolog annotation: Hit_ID=Q5EFI5; Match level="QueryCoverage=94%, HitCoverage=22%, E-value=0.0, Identity=96%"; Hit description=Target of rapamycin
  Pfam annotation: Domain name=HEAT; Domain location=142-178; Score =0.5; E_value=37; Accession=PF02985.12; Description=HEAT repeat
  Pfam annotation: Domain name=HEAT; Domain location=183-219; Score =22.5; E_value=0.0015; Accession=PF02985.12; Description=HEAT repeat
  Pfam annotation: Domain name=HEAT; Domain location=271-306; Score =12.5; E_value=1.3; Accession=PF02985.12; Description=HEAT repeat
  Pfam annotation: Domain name=HEAT; Domain location=489-525; Score =15.8; E_value=0.16; Accession=PF02985.12; Description=HEAT repeat
  Pfam module annotation: Pfam domain module=HEAT::HEAT::HEAT::HEAT; Domain location=142-178::183-219::271-306::489-525
MKPSPHFPEIGKKPKDLIAKDHTFNIAAYISSGADVIAAALRKHVEEEARDLSGEAFLRFMDQLYEQISSLLQSNDVNENLLALRAIDALIDMPFGEGASKVSKFASFLRNVFEVKRDPEILVPASEVLGHLAKAGGAMTADEVERQIKTALGWLTGERVEYRRFAAVLILKEMAENASTVFNVHVPEFVDAIWVALRDPKQAVREKAVEALRACLHVIEKRETRWRVQWYYRMCEAAQVGLGRNASVHSIHGSLLAVGELLRNTGEFMMSRYREVADIVLDYLKHRDQLVRRSITSLLPRIAHFLRDRFVTNYLKICMDHILFVLRTPDERASGFVALGEMAGALGVELVPYLPAITSHLQDAIAPRRGRPSLEAISCVGSFAKAMGPAMEPHIRSGLLDAMFFAGLSDKLIDALESISTSIPSLLPTIQERLLDCISQALPKSSIRPGASVGRASRSNNLQQFVDSNSPVLVQLALWTLANFNFKGHELLEFARESVILYLEDEDSSTRKAASLCCCKLVAHSLSASSASQFGSNRTNRIGGAKRRRLVEEYHMLKIRSELSTTFLDTLLTFFWLTIFCDSKPFM

SEQ ID NO: 52166 - protein, 417 aa, Zea mays
  Coding DNA Sequence Number=SeqID_10387
  Gene Ontology: Mol. function=pepsin A activity; Cellular component =cellulose and pectin-containing cell wall; Biological process =proteolysis
  Homolog annotation: Hit_ID=Q6Z675; Match level="QueryCoverage=75%, HitCoverage=61%, E-value=1e-82, Identity=57%"; Hit description =Putative chloroplast nucleoid DNA-binding protein cnd41
MPICLLHAASLAIDPAWGVRLGVATTTSPEPMYLQGPRHGSLEKQAERPAWPTGFARPRPTIDDTFLELRARRSGASSLAAPSVADTLRAGPAPGGVHTEEWCRGHGQRRALSCGTPRAAGDDDGASELGVRHRHAQLRGDGEPRHAGRGADHGGGHRQRPVVGAVQAVRRGAVVLQPEGPALRPRPVVVLRRRAVRGAVCAGLGIYATSVCSAAQCGYVVSYGDGSNTTGVYSSDTLTLSASSAVQGFFFGCGHAQSGLFNGVDGLLGLGREQSSLVEQTAGTYGGVFSYCLPTKPSTAGYLTLGGPAGAASGFSTTQLLPSPNAPTYYVVMLTGISVGGQQLSVPASAFAGGTVGRVDPGRRRALPFHGGWGAQIQDQRGFSFHGWRERGDSGDLQPNHSGEPSTRTPTTSLIRL

SEQ ID NO: 52167 - protein, 1315 aa, Zea mays
  Coding DNA Sequence Number=SeqID_10388
  Gene Ontology: Mol. function=phosphotransferase activity, alcohol group as acceptor; Cellular component=phosphoinositide 3-kinase complex; Biological process=regulation of progression through cell cycle
  Homolog annotation: Hit_ID=Q1T2M9; Match level="QueryCoverage=97%, HitCoverage=60%, E-value=0.0, Identity=60%"; Hit description=PIK -related kinase, FAT; PIK-related kinase, FATC; Peptidase M, neutral zinc ...
  Homolog annotation: Hit description=metallopeptidases, zinc-binding site; FKBP12-rapamycin- associated protein, FKBP12-rapamycin-binding
  Pfam annotation: Domain name=FAT; Domain location=298-658; Score =332.2; E_value=9.1e-97; Accession=PF02259.13; Description=FAT domain
  Pfam annotation: Domain name=PI3_PI4_kinase; Domain location=971 -1216; Score=347.5; E_value=2.3e-101; Accession=PF00454.17; Description=Phosphatidylinositol 3- and 4-kinase
  Pfam annotation: Domain name=Rapamycin_bind; Domain location=841-940; Score=230.1; E_value=4.9e-66; Accession=PF08771.1; Description =Rapamycin binding domain
  Pfam module annotation: Pfam domain module=FAT::PI3_PI4 _kinase::Rapamycin_bind; Domain location=298-658::971-1216::841-940
MHQQILMSHVFYNNDDLRKDAAEALCCLAHALGEDFTIFIPSIRKILVKHHLRYRKWDEIENRLLRRELLITENLSVQKYTQCPPDVIRDPLDDCDGTPSEIADDTQRQARSHQVNDVRLRSAGEASQRSTREDWAEWMRHFSIALLKESPSPALRTCARLAQLQAEFMEHDEKPLPIDTRLLGALAEKCRAFAKALHYKEMEFEAVCTKKMGANPVTVVESLIHINNQLQQHEAAIGILTYSQQNSEVQLKESWYEKLHRWDEALKAYTVKSSQTSGPFTKLGCYIRSNEVSSSFGSAANAAWHMGEWDHMADYVSRLDDADENKLRMLGNATASGDGSSNGAFFRAVLLVRYKKYDDARMYVERARRCLATELAALVLESYERAYNNMVRVQQLSELEEVIDYCTLPMESPIADGRRELIRNMWNERIKGTKRNVEVWQALLAVRELVLPPNEDRDTWIKFAELCWKNGRISQARSTLVKLLQFDPESSPELTLYHAHPQVALAYLKYQYAVGDELKRRDAFSKLQELSVQVATTMGNLPGTSANHGTMSNAGVPLIARVYLTLGSWKKALSPALDDDSIQEILISYHNATLSAKDWGKAWHIWALFNTEVMSRYTFRGRPDIAGKYVVAAVTGYFYSIACASTTKGVDDSLQTVLVSTSNDWRAAILCPTIDDVCFENWWRICSYKVANHLKGSNSLVILGAWTIWNHRNKKNNSAGEGKTALPDILRLLTLWFNHGDTSEVQTALQKGFSLVKIEMWLVVLPQIIARIHSNNRVVRELIQSLLVRIGKGHPQALMYPLLVACKSISILRQRAAQEVVDKIRQHSGGLVDQAQLVSKELIRVAILWHEMWHEALEEASRMYFGEHNIEGMLAVLEPLHAMLERGDETIKENAFIQAYGHELLEAHECCLKYRATGEDAELTKAWDLYYHVFRRIDKQLPSLTTLDLHSVSPELLKCRKLELAVPGTYAAGHEDLRQDERVMQLFGLVNTLLENSRKTSEKDLSIQRYAVIPLSPNSGLIGWVPNCDTLHALIREYRDARKIFLNQEHRLMLAFAPDYDHLPLIAKVEVFQHALQNTEGNDLAKVLWLKSRTSEVWLERRTNYARSLAVMSMVGYLLGLGDRHPSNLMLDRYSGKILHIDFGDCFEASMNREKFPEKVPFRLTRMLVKAMEVSGIEGTFRTTCENVMQVLRTNRDSVMAMMEAFVHDPLINWRLFNFNEVPQVSNYGNVHAHTVVSSEEAVANRELMQPQRGARERELLQAVNQLGDANEVLNERAVAVMARMSDKLTGRDFSSGSALAGAGGVRSGELSWKQ

SEQ ID NO: 52168 - protein, 101 aa, Zea mays
  Coding DNA Sequence Number=SeqID_10389
  Gene Ontology: Mol. function=RNA-directed DNA polymerase activity; Biological process=RNA-dependent DNA replication
  Homolog annotation: Hit_ID=Q10AV7; Match level="QueryCoverage=96%, HitCoverage=14%, E-value=5e-20, Identity=43%"; Hit description =Retrotransposon protein, putative, LINE subclass
MKLFHQYARYRKKKNFVAKLNSEGNSFTEHNDKAKLVHEYYSSLLGCCLDRSASINLDVLGIQADDLAVLDSPFTEHEIWEVIKGLPSDKAPGPDGFTGRF

SEQ ID NO: 52169 - protein, 145 aa, Zea mays
  Coding DNA Sequence Number=SeqID_10390
MAMGHHQPVANPLVAVGCMGEHLRAANSSPELTGGGQAAPHGVGRVGVIMAGELPSPGIAFTSLTRCWIVLVFGAPGGPSPLSPTTVAAAGGRWSPDACVQGRKKGGWACDVKPTVGIRSCRTFSLGRVPAVDLIIGRLCLDWDS

SEQ ID NO: 52170 - protein, 142 aa, Zea mays
  Coding DNA Sequence Number=SeqID_10391
MDFYAPDLKWMDRIDTGKPDELRGAQRKGIYMHTKLTEDKVAHRQHTTRRGRGRNSSSGEKFKAKARVLSPNSAKGTFASPRRSLPTDAIGRSAYGFEFHGGGESHPRGARQRSGGGFWLLRMIMALWVRSMHQAPNYTLSY

SEQ ID NO: 52171 - protein, 195 aa, Zea mays
  Coding DNA Sequence Number=SeqID_10392
  Homolog annotation: Hit_ID=Q3E0G9; Match level="QueryCoverage=40%, HitCoverage=16%, E-value=2e-09, Identity=40%"; Hit description=Ig -like, group 1
MAPAWSLADELGRWPVASAHHGHAARPGLRHHRKLRSARPRARTRAQPRKTANSAPPDPGLGLGLSPGRRRTPLRPTQGSDSGSAPKDDELRSARPRARTRAQPQKTTNSVSPDPRARTQPWPQPTVSASPNPGARTQAQPQKTTNSVSPDPRARTQAWPQPTVSASPDPGARTRPRPRKTDSTSTSEEPPHRPT

SEQ ID NO: 52172 - protein, 90 aa, Zea mays
  Coding DNA Sequence Number=SeqID_10393
MAPYTSHELPPLYNGSSSLISCEKQMIRIEFLTMQVTALVPTIASLGDLVSGQVRWKVRARLHSGGLELQPIFINFQKFCKNYSSLSLVQ

SEQ ID NO: 52173 - protein, 552 aa, Zea mays
  Coding DNA Sequence Number=SeqID_10394
  Homolog annotation: Hit_ID=Q1SF96; Match level="QueryCoverage=94%, HitCoverage=85%, E-value=1e-178, Identity=59%"; Hit description =Membrane attack complex component/perforin/complement C9
  Pfam annotation: Domain name=MACPF; Domain location=58-256; Score =62.1; E_value=1.8e-15; Accession=PF01823.10; Description=MACPerforin domain
MAPRSGRQQLISLQILQRFGSMSELLNQKSSVQGKVPSGYFNALFELSGAWLTDAKETKHLAFDGYFISLYNLHLKASPLVLRDEVKKAVPSKWDPIALSWFIKNYGTHIIVEMGIGGQDVICVKQSHSSTISTVDLKLHLEDLGDFLFSDGKNHSPIHRKTKDGKSKVPDVFVRIVQQPNNLHLSSYSETSTKDGLTVTCSKRGGEAYLPNHSKWLQTVAKKPDAIMFKFVPITSLLTGIPGSGYLSHAINLYLRYKPDLQDLQYFLEFQVPLQWAPMFNELVLGPQKRKSSYPSMQFRFLGPRLQVSTSQVSSSQKPVVGLRLYLEGRKCNRLAIHVQHLSSVPSMIGDSVASSMSEWRESQDSDPGYVEAIQWKKYSCVCTSVVKYNPEWHKRAPGGVFIVTGAQLVTKGAWSKKVLHLRLLYTHIPNCTIQRTEWTNAPAASQKGSFLTTISTTLSSPFTQRDTHQGKHEPVQLNSGVYPDGPPVPLRSRKLLKFVDISEVVKGPHDVPGHWLVIAAKLVKERRKIGIHVKFALLGYEGLSQNDSFMG

SEQ ID NO: 52174 - protein, 168 aa, Zea mays
  Coding DNA Sequence Number=SeqID_10395
MANGGSKPGTTAKRQQVDSRPGCDEPSQERARPSHCIYLQAIHMDYLGARAPASSICARTHPRHWPSKLKCPSHALEVATHLNWNNPSVLRSSLIKPLIQDQIPLTHLMYKGSSSLISYEKQRIQIEFLNLARKLTGRRHLDRIESLNVRRLLFNHLFFSCGGVREQE

SEQ ID NO: 52175 - protein, 131 aa, Zea mays
  Coding DNA Sequence Number=SeqID_10396
MKASGEAQKAAEDDVFKLSLAYNDVIATQLSPLLPARFPLIDRMRALPSHVEHAVFEGVFHRDSLALGRMVSHFDEIDATIIEEGFAFGRFDEDLDAIEGQVRPHARSLASRVDVRILLTRPVSQEPPDDG

SEQ ID NO: 52176 - protein, 127 aa, Zea mays
  Coding DNA Sequence Number=SeqID_10397
MADLRPKRPPVRELQMNGCYLSIKERMRARGGRWRPRGAPGVRCHRYWRSSPYHEHIHGVGRQRVLRHGGDECGGWQWGRRREGGKRGAYIHSKVEPQPHGEGLWSFTRIPIPARTEQSGGDFAGLL

SEQ ID NO: 52177 - protein, 80 aa, Zea mays
  Coding DNA Sequence Number=SeqID_10398
MTIPSGRLRVAPDGLSRGESGHGIYLLEPKKSRSPAKGTARAESTVVVGASSGEEDEPDMRAPATSEEARAARLTDWVHL

SEQ ID NO: 52178 - protein, 62 aa, Zea mays
  Coding DNA Sequence Number=SeqID_10399
MRAPATSEEERTARLTDWVHLFNGYHISRHVFSTFKRLTQGCGEIFGGRIGSWLLVFLMDSS

SEQ ID NO: 52179 - protein, 144 aa, Zea mays
  Coding DNA Sequence Number=SeqID_10400
MEHPLGPPLWRAQALPAFDPMVDPKRRAKSNDPGWNYGFWTEIGNRDKGQQGEEDSATSMQQPSSGTTAKRKRAAFQFRTAAWPHTSNKEKEKGKTATMPRRTPEQVVDERLSSGSHQQTTMEACTKSKADRDYVNKQWGYVVL

SEQ ID NO: 52180 - protein, 380 aa, Zea mays
  Coding DNA Sequence Number=SeqID_10401
  Gene Ontology: Mol. function=nucleic acid binding; Cellular component= nucleus; Biological process=ubiquitin cycle
  Homolog annotation: Hit_ID=Q6ASW7; Match level="QueryCoverage=94%, HitCoverage=45%, E-value=1e-135, Identity=65%"; Hit description =Putative zinc finger protein
  Pfam annotation: Domain name=PHD; Domain location=110-167; Score =23.3; E_value=0.00026; Accession=PF00628.19; Description=PHD-finger
  Pfam annotation: Domain name=SAP; Domain location=16-50; Score=35.0; E_value=2.7e-07; Accession=PF02037.17; Description=SAP domain
  Pfam module annotation: Pfam domain module=PHD::SAP; Domain location =110-167::16-50
MASPDDPVLSACKKNLSHFRIKELKDVLHQLGLSKQGKKQDLVDRVMAVLLSQQDQGINEILANYRLLLPVSRKMQDPTNTVAVSRSHELGDSVTCKKKPDDSAQAVKVRCPCGDSKPNDSMIKCIDPQCNIWQHVGCVVIPDTEKSADNISPELPSCFYCEVCRLSRADPFWVTVNHLLLPILIGPSTVAADGSYTVQYTAKSFQLSRANREILQQAECNIQVWCILLSDKVPFRMHWPLHSDMQVNGIYVRVVNRQPTQKLGANGRDDGPLLTDYLKEGPNKISLSRNDTRTFCLGIRIAKRRSLEQVLNLVPKEQDGENFDDALARVRRCVGGGAEANNADSDSDIEVVADFVSVNLRCPILNELLIKWAIALIYVY

SEQ ID NO: 52181 - protein, 179 aa, Zea mays
  Coding DNA Sequence Number=SeqID_10402
MGSWVAWVSCQACLVLKLDMVIYRRLTDGPILHVVDPLGLHCAHVDMKKVDDGEGWSLASEMTSFDYTTFPRFVVEERDFNDNVFGNCCKGRWKGKGVAAGQGGSEALARDTKRKKETSSLKAKKTRVQIQVPMGTSSTSTNNFNTEAVDVVFAEELGTTYESPRSSLGDSASATAFAK

SEQ ID NO: 52182 - protein, 146 aa, Zea mays
  Coding DNA Sequence Number=SeqID_10403
MGGIGPTHEVPAMTEELGILDYEVCSFGLMSEADMLVLGSSPRFDIDDSRDHSSGDDPVTDCDGDGQLVEGKVPVMWPAQGEEVDVIYAKMEPLDFMGVEGFHLVGLEEGNQKQHTMFYQKNFCVILNMIVDTVFALVHCEILDGD

SEQ ID NO: 52183 - protein, 117 aa, Zea mays
  Coding DNA Sequence Number=SeqID_10404
  Subcellular localization annotation: CTP_CleavageSite=46; ConfidenceScore=5.13e-01
MNRLSHGVHGLPIQRRPTRPRGALLLAARPQAVRSRGGHARVVLVMCHMAKAPVVVALVLTSPADRNFLLVGQMLQHWGLENIWLMDFGCSCHMIGSNKWFSSLDPVIGKEYITFED

SEQ ID NO: 52184 - protein, 253 aa, Zea mays
  Coding DNA Sequence Number=SeqID_10405
  Gene Ontology: Mol. function=protein disulfide oxidoreductase activity; Cellular component=chloroplast; Biological process=cell redox homeostasis
  Homolog annotation: Hit_ID=Q2QX01; Match level="QueryCoverage=87%, HitCoverage=77%, E-value=1e-110, Identity=86%"; Hit description =Glutaredoxin-related protein, expressed
  Pfam annotation: Domain name=Glutaredoxin; Domain location=164-231; Score=89.1; E_value=1.3e-23; Accession=PF00462.14; Description =Glutaredoxin
  Subcellular localization annotation: CTP_CleavageSite=65; ConfidenceScore=5.74e-01
MASTATAAASLRLAFPLLSAPASSSSSPPNPSWSTKTPCLLRPGSTGVYDAAGELQFVGISRNVRASVEGHRRKVPANLCASVKVAVSDEEAPDRSALNNAWKSWMEEHIAATGKAPPGNVAGNHTWVGAPQRPPDLRLTPGRHVQLTVPLEQLIDRLVKENRVVAFIKGSRSAPQCGFSQRVVGILEAHAADFVTVDVLDEEHNHGLRETLKAYSSWPTFPQVFVGGELVGGCDIISSMAERGELAALLIQK

SEQ ID NO: 52185 - protein, 252 aa, Zea mays
  Coding DNA Sequence Number=SeqID_10406
  Gene Ontology: Mol. function=hydrolase activity, hydrolyzing O -glycosyl compounds; Cellular component=cellular_component; Biological process=carbohydrate metabolic process
  Homolog annotation: Hit_ID=Q2QZT0; Match level="QueryCoverage=69%, HitCoverage=22%, E-value=6e-36, Identity=46%"; Hit description=Beta -D-xylosidase, putative, expressed
  Pfam annotation: Domain name=Glyco_hydro_3_C; Domain location=139 -251; Score=-63.8; E_value=0.014; Accession=PF01915.12; Description =Glycosyl hydrolase family 3 C terminal domain
MKPSRSNSKLRGTRTRRQSEKDERMRLCPLPPHPREDFAPLASLHNRPTPTTSPFLASSSPKSSTTPIPSLPPLAYTRTPEDAAAATLRVGLDLDCGPFLALYAGSIVAAGKVADADVDVALLNTGAPGPGARRGAHRVMLLKNWCGAKHNRDVLPLRPAAHRVVAVVGPHADATVAMIGNYEGKPCRYTTPLQGIAAYAARVVQQAGCTDVACRGNQPITAAIEAARQAEATVVVAGLDQNVEAEGLDRTC

SEQ ID NO: 52186 - protein, 414 aa, Zea mays
  Coding DNA Sequence Number=SeqID_10407
  Gene Ontology: Mol. function=protein serine/threonine kinase activity; Cellular component=integral to membrane; Biological process=protein amino acid phosphorylation
  Homolog annotation: Hit_ID=Q84PD4; Match level="QueryCoverage=74%, HitCoverage=80%, E-value=8e-54, Identity=40%"; Hit description =Receptor kinase-like protein
  Pfam annotation: Domain name=Pkinase; Domain location=127-407; Score =4.2; E_value=8.3e-09; Accession=PF00069.15; Description=Protein kinase domain
  Pfam annotation: Domain name=Pkinase_Tyr; Domain location=127-407; Score=3.8; E_value=1.1e-12; Accession=PF07714.7; Description=Protein tyrosine kinase
  Pfam module annotation: Pfam domain module=Pkinase::Pkinase_Tyr; Domain location=127-407::127-407
MWDGLESAATVAQLVGLDVGGLITMIGQAARKARQNTKDCEHLARRVGMLAELVPHLQDPEAQAGGGRAQRCARGGSPAHHILPEEGAHVPAVLGVQAGRQSAGGAEDREFTLAEIAVATNNFAVVLSNDADTGTKVYKGRLLQNGPEVAVKRLNRARRGAEDAFFAEQHILSPLRHDRIVRLLGTCADDGERMLLTQYMPNGSLHDHLHGHHLSSSSASPVTASWRTRVQVLVGTARAVEHLHCHAVPLIIHGNVASSNVLLDAAWAPRLAGFGASVWRAAGVDSQPVEVAGAASCGGYADPEYCGTGRIRPASDVYGLGVLMLEVLTGQPPVVSVWDAAKQGVVAVTLASFALPSIQAGRLGDVLDRRPAPQQLQPLQLVANMAARCLHLQGGSRPAISDVVANLEQALRLI

SEQ ID NO: 52187 - protein, 76 aa, Zea mays
  Coding DNA Sequence Number=SeqID_10408
MEGRFAKIHRTVRCAPDCPVRQRSNGYLAPTVDSDSEQCATVHAAEVRAEGQRGTGLSERERVEKDPSLSGLLNGD

SEQ ID NO: 52188 - protein, 139 aa, Zea mays
  Coding DNA Sequence Number=SeqID_10409
  Homolog annotation: Hit_ID=Q33AG5; Match level="QueryCoverage=41%, HitCoverage=9%, E-value=6e-24, Identity=84%"; Hit description=ATPase, histidine kinase, DNA gyrase B-, and HSP90-like domain containing protein, expressed
VYENLSAELLQILINLPLLHQLPLAMDGSGRALDCRSFWKAGAYEAPTAPTREFQDALETGDFDRARVHPKFLHTNATSHKWAFGDRYQYTSPLVRHLFDWKIWLNNLGQQREAVASVSSKGTANRDNELEHWSGEHER

SEQ ID NO: 52189 - protein, 350 aa, Zea mays
  Coding DNA Sequence Number=SeqID_10410
  Gene Ontology: Mol. function=nucleotide binding; Cellular component =nucleus; Biological process=multicellular organismal development
  Homolog annotation: Hit_ID=Q33AG5; Match level="QueryCoverage=50%, HitCoverage=29%, E-value=5e-89, Identity=90%"; Hit description =ATPase, histidine kinase, DNA gyrase B-, and HSP90-like domain containing protein, expressed
  Pfam annotation: Domain name=HATPase_c; Domain location=27-137; Score= 4.2; E_value=0.032; Accession=PF02518.16; Description=Histidine kinase-, DNA gyrase B-, and HSP90-like ATPase
MSKKASDEELISSPCVLFSPSRCREKAVREAEKTTIAELLDNAVDEISNGATFIKVDKSINLKDNSSMLVFQDDGGGMDPEGVRRCMSLGFSTKKSKTTIGQYGNGFKTSTMRLGADAIVFTRAIRGGNVTLSIGLLSYTFLRKTLKDDIVVPMLDFKIQDGDIVPLVYGSQGDWDSSLKIVLDWSPFSSKEELLQQDVGSHGTKVVVYNLWMNDDGLLELDFEDDDEKEGAIDEDGDAVEAVVEEEADAEDDVVKPPWTRRAPGEEAGVATHQGSSSRSGESYDTQEEETRRRQWSVTTVLVGKELEDERGTDQRRRSARDDVIPTKASVRHDPDRDLRDVSLVKPDTS

SEQ ID NO: 52190 - protein, 74 aa, Zea mays
  Coding DNA Sequence Number=SeqID_10411
MACSAKDSLVWVHQTVRWCTRQCPVRQADSDELATLGTSTTVYGYKSPDCPVVHRTVRVRCANGSESATVGFAK

SEQ ID NO: 52191 - protein, 107 aa, Zea mays
  Coding DNA Sequence Number=SeqID_10412
  Subcellular localization annotation: CTP_CleavageSite=54; ConfidenceScore=5.46e-01
MAETRSAGSKTGSAAVDRVSSGALQLVTMEARKTAKTRRPWTLRSAGSKPGSAAADRVSSGALQLVTMEARKTAADPQTMDVAECRSRNDRTGPHRPCLHVACSLRG

SEQ ID NO: 52192 - protein, 142 aa, Zea mays
  Coding DNA Sequence Number=SeqID_10413
  Gene Ontology: Mol. function=aminoacyl-tRNA ligase activity; Cellular component=cytoplasm; Biological process=tRNA aminoacylation for protein translation
  Homolog annotation: Hit_ID=Q84PX0; Match level="QueryCoverage=89%, HitCoverage=35%, E-value=1e-56, Identity=77%"; Hit description =Putative tyrosyl-tRNA synthetase
MAATKFQSAKFWMLSHSDMLPGFKEGQEKMSKSDPSSAIFMEDDEAQVNVKIKQAFCPPKIVEGNPCLEYIKYIVFPWFGRTFTSMDELISDYETGALHPADVKPALAKAINEILQPVRDHFNNNNEAKVLLNTVKKYRVTS

SEQ ID NO: 52193 - protein, 198 aa, Zea mays
  Coding DNA Sequence Number=SeqID_10414
  Subcellular localization annotation: CTP_CleavageSite=72; ConfidenceScore=5.44e-01
MATPGVLQRPTHPPPSPAPHPPTPIPSTEPQPVGVHTQKAPTCPRLCQRSCPAHPPAAPALSAPVINCPLPCAPQKSRREIPPKPRHTLLRGVPFDSEALLGGNGVVVVEAKTLHLDGTQASRWPKDVGRKSRRATSLPTPRKPNTEKRMPTSDVPCCDRHAKKADGMPRSDMPNSCLTNRGTLVLLGCCPRIDGKLF

SEQ ID NO: 52194 - protein, 104 aa, Zea mays
  Coding DNA Sequence Number=SeqID_10415
MAATKSDGEGADAVKPSEKVLLGDVHVAELPGERVPQRHVRAAGQQRREEEEAAAEGHKAPRSFAAKGVSFLPSRRFLGGGKQRRTHGARTAAVSTTLIVVHYW

SEQ ID NO: 52195 - protein, 183 aa, Zea mays
  Coding DNA Sequence Number=SeqID_10416
  Gene Ontology: Mol. function=protein serine/threonine kinase activity; Biological process=protein amino acid phosphorylation
  Homolog annotation: Hit_ID=Q851M7; Match level="QueryCoverage=79%, HitCoverage=14%, E-value=2e-53, Identity=72%"; Hit description =Putative receptor-like protein kinase
  Subcellular localization annotation: CTP_CleavageSite=29; ConfidenceScore=5.25e-01
MGVCSYNGTSPVCGCPSLNFQLSDPSKPRAGCTRKVELASCPGNSTTLELDNTQFLTYPPEITTEQFFVGITACRLNCLSGGCFFANPAPNFFNNCEPIVDINCLSGGSCVASTALSDGSGLCFLKVSSFVSGYQSAALPSTSFVKVFRGGTTAGDNFRGERRRGCLEISGSEENKQSSLVRF

SEQ ID NO: 52196 - protein, 317 aa, Zea mays
  Coding DNA Sequence Number=SeqID_10417
MESWKHNFLSSMKLSRRTREQAQQEEQGGNQIEPAVEAHLEVNDGAADADASVNNANQVVTTEGLENRVVEMVDREVKRDEPRVGENICPRCEMQMRHMPSVGSRVEKWNPAISSKGALDLAWFRITGIPSERDLLLIGRFPNHAGNQWIGNEEDKANTKMGIWKMKVRIKFETGNHKLFSKGLDDIVEEREQEVTTGRAISLSPQKGCQEAPVVELSGQEESVKVIQVTTSAAKGVENQQVFKCFIMIAETAKEKWAKVCGDIPSRKVDLQYKFNLEWNKANENQKISQVGMESQEAGIQVEQESNAETVDGLKDH

SEQ ID NO: 52197 - protein, 126 aa, Zea mays
  Coding DNA Sequence Number=SeqID_10418
  Gene Ontology: Mol. function=carbonate dehydratase activity; Biological process=one-carbon compound metabolic process
  Homolog annotation: Hit_ID=Q947Y6; Match level="QueryCoverage=98%, HitCoverage=8%, E-value=3e-13, Identity=35%"; Hit description =Putative retroelement
MPTWERFKELCHLQFGPPVRDSRLAELGRLQFRSMVQEFMERFNTVLCHTRNLDVVQKAELFVGGLSDDVRVDVAMRATKDLPTTVYLAQAFELRANNIMVMAPSGPMQPTWSLPLQPKVAPRGAA

SEQ ID NO: 52198 - protein, 81 aa, Zea mays
  Coding DNA Sequence Number=SeqID_10419
MEVSHTLNCVAPSPIDHGRWLNGNGKFWQSPQPHRGHYTAKEAKRGRNGLDPNQLSGDEVPDDEGPRAIDRGNARNGENGH

SEQ ID NO: 52199 - protein, 299 aa, Zea mays
  Coding DNA Sequence Number=SeqID_10420
  Gene Ontology: Mol. function=catalytic activity; Biological process =alkaloid metabolic process
  Homolog annotation: Hit_ID=Q6ZC62; Match level="QueryCoverage=88%, HitCoverage=69%, E-value=1e-121, Identity=80%"; Hit description =Putative PIR7A protein
  Pfam annotation: Domain name=Abhydrolase_1; Domain location=62-269; Score=40.8; E_value=4.7e-09; Accession=PF00561.10; Description =alphabeta hydrolase fold
MDHLVAYISLSYAAICSKDCICFQAPIVLENLETKKIVLVHGEGFGAWCWYKTISHLEEAGLDPVALDLTGSGIDHTDTNSIATLADYSKPLIDYLDRLPEDEKVILVGHSCGGASVSYALEQYPRKISKAVFLTATMGLTLTYIRQLRSADVFLQESQFLVYGNGKDKPPTGLMFDKQQIKGLIWALAAVSMRPIPLAPIMEKLSLTPENYGSVRRYFIQALDDHMLSPDAQEKLVRENPPDGIFKIKGGDHCPFFSKPQSLNKILLEIAQIQAPAALLKASSPEETAAAMVTGPAKS

SEQ ID NO: 52200 - protein, 301 aa, Zea mays
  Coding DNA Sequence Number=SeqID_10421
  Gene Ontology: Mol. function=nucleic acid binding; Cellular component= cytoplasm; Biological process=spliceosome assembly
  Homolog annotation: Hit_ID=Q6ZC63; Match level="QueryCoverage=96%, HitCoverage=97%, E-value=1e-118, Identity=76%"; Hit description =Putative survival motor neuron domain containing 1; splicing factor 30, survival of motor neuron-related
MEDLSVEELASNLSTYKEQLREVKKLIKEKKDDAGISEYIDMEKELQEVITLTEEILATAKQTESAQNVAGLSPPSYSAGVQSESCGRDWMTFHIPISLPLVLEFKLCGVKMENGIMQPLKLLTPNGYYVAYDGWGNSEEVDPDNVRLLEEEAADALGQAEKEAEATKMAIKRKIEQAATSDFQARSLPAKLRIEPSDPEDVKAAKRKKIHAFKSKSRFEQLEFAQNKRQNAWQQFQTKGKAKKVGFFSGRKKESIFKSPDDHRGKVGVTGSGKGLTDFQRREKHLHLKGGSGDAADDDEE

SEQ ID NO: 52201 - protein, 117 aa, Zea mays
  Coding DNA Sequence Number=SeqID_10422
MADFGCMGKIPVSTDRANQRGWGRTEGCPKLLTVRRNSPRQQARLCHKEGHKSYQCKAKTRDKPKQKLKQKPISKISNTCINKVDKKVATPYLIKKKKNGKVIAIKANKQASKGKGA

SEQ ID NO: 52202 - protein, 189 aa, Zea mays
  Coding DNA Sequence Number=SeqID_10423
MAGVAVHGISTLNSNANRFDALREGKAEISPHDEARILAGTRPGEQFTPSWSTSLANSGRITTSRPNRSATVLRAASISVTKRVAPMEAEGLRVESLTKAPAPLSLPRKGPQGAGLTGRNGEPTPPGSLISVEGDGGAWSAREGVDPMAPLVRDPVVISRAGVTGRWPQGIGAQARRLTESRAQAVGTN

SEQ ID NO: 52203 - protein, 125 aa, Zea mays
  Coding DNA Sequence Number=SeqID_10424
  Subcellular localization annotation: CTP_CleavageSite=21; ConfidenceScore=5.18e-01
METRTTTGQKWGFWQKQIAIRNSSKSATALALAAAAFLVIEITFTIVATTTFTANITAPSMVAAVVALIAIVALAVVVVLVVLDLLLALLLRATENGVLHNLDEGPLGWSQVIRLKGNERRETEA

SEQ ID NO: 52204 - protein, 108 aa, Zea mays
  Coding DNA Sequence Number=SeqID_10425
EAPLKIPEGAKFGLESPGAPDTVRASPSGFVPHNRSMRDLLLVMELLGYSGWLLGQECELPRYSDASTDFLPAGCSDGTAAAAEGTASGTGAGAGGDADANDLEGDLA

SEQ ID NO: 52205 - protein, 144 aa, Zea mays
  Coding DNA Sequence Number=SeqID_10426
MMDDVDVGRPRLPWTAAGDGGGRARGREQTAATVDDGGRGRRRASAGARAGAAAMGGSATVGGWWSCAWREHAARARGARGGRRAAWAAATGGVGRARGAGGTAAWAARVEKGRRNRKIEERGSRRRLFRITPVGLAARPTGVI

SEQ ID NO: 52206 - protein, 98 aa, Zea mays
  Coding DNA Sequence Number=SeqID_10427
MATAQGMSPFLKADFPDHAPKRHGQGLPQCAPGFPFYDMGARPHTSYKLAQSAKKANRRARSVQPSCGYSPFHLHHNQRKVSPPIVPIPRLLEAVAED

SEQ ID NO: 52207 - protein, 35 aa, Zea mays
  Coding DNA Sequence Number=SeqID_10428
MAPPDAQVFVVSFSGNKQDMDFALQKPKFKPKDSI

SEQ ID NO: 52208 - protein, 92 aa, Zea mays
  Coding DNA Sequence Number=SeqID_10429
  Subcellular localization annotation: CTP_CleavageSite=5; ConfidenceScore=5.00e-01
MNSVMSGTPPNYPNTPRGRWSPAKSPKPREKKNEERTPSKEASDKHKEESASSIKSYRKGDKKKKKMKKVVYYETDSSSPSTSDAESTTSKR

SEQ ID NO: 52209 - protein, 47 aa, Zea mays
  Coding DNA Sequence Number=SeqID_10430
MATGRPQCPDHIHDEIFSPGVVIRAILSVNRNAGQNPYRFKDIELQS

SEQ ID NO: 52210 - protein, 531 aa, Zea mays
  Coding DNA Sequence Number=SeqID_10431
  Gene Ontology: Cellular component=endoplasmic reticulum
  Homolog annotation: Hit_ID=Q2HRE1; Match level="QueryCoverage=65%, HitCoverage=82%, E-value=1e-113, Identity=50%"; Hit description =Lipopolysaccharide-modifying protein
  Pfam annotation: Domain name=DUF821; Domain location=143-525; Score =810.7; E_value=7.9e-241; Accession=PF05686.3; Description =Arabidopsis thaliana protein of unknown function (DUF821)
  Subcellular localization annotation: CTP_CleavageSite=39; ConfidenceScore=5.56e-01
MASAAAAVIPDGRRWSKGPGSSSSPVTTAIFLFFFVVVVGVLVSARWITTTTHLSTTNLDQWSSKLAILTATHTTSSIPAIPAAPPPPRPTYSLSCPAPPLHRDPTIPSNISQTLDLVLSPNASSASTCAAFPDPPPLPANSNASSTCPAYFRFIHEDLHPWRAAGGITRAMVDRARATANFRLVVIRGRAYIERIAPAFQTRDLFTIWGILQLLRRYPGRVPDLDLMFDCVDWPVVHADQYQGENATLLPPLFRPEINIKPWDALQKELNGGNKRVKWLAREPYAYWKGNPDVAVTRQELVKCNVSSKHEWNARIYKQDWLKEIKAGYKQSDLASQCTHRYKIYIEGSAWSVSEKYILACDSMTLVVTPKYYDFYSRVLMPMQHYWPIWDDNKCSSIKFAVDWGNSHKQKAQRIGKQGSNFIQKELSMEYVYDYMFHLLTEYAKLLRFKPRKPPEAIEVCPESLACQAIGREKKFMEDSMVRSASDAGPCDLPPPFSPEEFKALRRRREKAMKRIETWVQKTSRPMVSKP

SEQ ID NO: 52211 - protein, 178 aa, Zea mays
  Coding DNA Sequence Number=SeqID_10432
  Homolog annotation: Hit_ID=Q942E9; Match level="QueryCoverage=82%, HitCoverage=48%, E-value=4e-18, Identity=36%"; Hit description=6b -interacting protein 1-like
MPQPKFKERESAHLATCISGLSTSKWVYYDKMVSILCPSPLPLPVPLPLPLQLLPLVAKHRRDMQPPRRFQWGVKAPERLLGGGEDVVGPRVSGSGSTRMESSKRQHMVEVEQMRRDLQKDLDAKWREILEKAHAEIARLSNEDGDEDDVDEDGDVGDGKRLEDGGDEQTNSAMDAST

SEQ ID NO: 52212 - protein, 105 aa, Zea mays
  Coding DNA Sequence Number=SeqID_10433
MDFFGATIGWSFNWKIALFLLVTVLELSTVHEEALDDADIDPITWASSSGPASSPDAEGGGGHRSEERMEAVGGVEVEDGWNSRRLKSEVGGDDAGGGGGDAGPL

SEQ ID NO: 52213 - protein, 205 aa, Zea mays
  Coding DNA Sequence Number=SeqID_10434
  Gene Ontology: Mol. function=protein serine/threonine kinase activity; Biological process=apoptosis
  Homolog annotation: Hit_ID=Q8W0E0; Match level="QueryCoverage=90%, HitCoverage=38%, E-value=1e-33, Identity=39%"; Hit description =Fusarium resistance protein I2C-5-like
MENGSKIVVTSRLEKIAALGTTEALRLEALSREAYWYVFKSLVFGAADPGDQPKLASLGKQIVELLDGSFVAGNIVASLMRANMSAGFWLRVLHCLRDYTRKHLLMFGERPSHLRQKGETVKLWRMARAHDVVTICNVYQLPYTQDDVPDVTVQDLLSGRVTREGNFSAVAWRSTIPPCYTYLVRCTSQTARCSTVKKRPRDARE

SEQ ID NO: 52214 - protein, 114 aa, Zea mays
  Coding DNA Sequence Number=SeqID_10435
  Subcellular localization annotation: CTP_CleavageSite=46; ConfidenceScore=5.49e-01
MKGPADQAQQLCAPALARLGSLPVGARASALSLSPCNRTRVRGRLYAAASRNDRRPIAVDSWPGDKSRGHLPTSPHLQPRQLAERHCQGRELVLQRGAEGRGNPPSPSDACDAT

SEQ ID NO: 52215 - protein, 283 aa, Zea mays
  Coding DNA Sequence Number=SeqID_10436
MPPIAIPRKLEWGATTVKKEKKCPFTTVEIEDISDDKVLNDEGFSRAAQLAIETTENEQIVVKPDVALQGPGGGVVAILCRVRLTAAKSGFRRHRKLRFARPQGSDSGSAPEDDELCFARPQGSDSGSAPEDDELRFARPQGSDSGLAPEDDELRFARPQGSDSGSAPEDDELRFARPQGSDSGLAHEVDADGSKDTSAAPLRAPPMAAAGECPCVAVRPSPTAFELPRAQSGQGVVGGATMDVGSRRPAELHPDLTIGVHKRHPAPAPAPLASARCAMTDVA

SEQ ID NO: 52216 - protein, 118 aa, Zea mays
  Coding DNA Sequence Number=SeqID_10437
  Subcellular localization annotation: CTP_CleavageSite=51; ConfidenceScore=5.22e-01
MAHVSTSHYHPPHPPLRAAPVAIPARHLCASGVSLAPALLSVVHIICPRLPATREQSLCTRIPRPRAEPLLSTLSASDPLLPRKENLQISLPSPPAICARWPSTGYARAIAVGSPCGG

SEQ ID NO: 52217 - protein, 150 aa, Zea mays
  Coding DNA Sequence Number=SeqID_10438
MGAVTFPRKPYFDQEVEDVVPEDILSKPPKADNPTICSEVRDGGLLLHDSTGQEVTRVVSRASSNLEGGLPCENVDLSHPAPMDVAEESSALEVAAAEGPAPEGGAGSDPAPRDFLGGVSAQLRSCSAPIPDQALSLMQCVRKMNLEPFG

SEQ ID NO: 52218 - protein, 211 aa, Zea mays
  Coding DNA Sequence Number=SeqID_10439
MGRGRRGSGWPRRADGKSKRAPSPPSEDFGDSEYSKEASFESDHSPALASPLASSEDSDDSMGLSTTARAYWRSNERAGLGGSDESGVSSDEADSSNSSEQWSGDDGDDEGDDSSSGDDDGSDGSKGSGGEGDGDGSNGDDKGVGDGSSDDGEGDGDNSRGGSSKGDGDNGSGNGDGGRGDSDDDGGRGDGGNSGKGYDGCSKASGIMPLV

SEQ ID NO: 52219 - protein, 162 aa, Zea mays
  Coding DNA Sequence Number=SeqID_10440
  Gene Ontology: Mol. function=DNA binding; Cellular component =mitochondrion; Biological process=DNA integration
  Homolog annotation: Hit_ID=O24587; Match level="QueryCoverage=90%, HitCoverage=14%, E-value=7e-64, Identity=80%"; Hit description=Pol
MTVWEARAWARSANFDYAGCKVDRKSTSGTCQFLGWSLVSWSSKKQNYVALSTAEVEYAAASQCCAQLLWMRQTLRNFSYNLSKVILLSDNESAIRLADNPVEYSRTKHIDIRHHFLRDHQQWGDIYICHVSTDHQLADIFTKHLDDRRFCELNVLDSWNLD

SEQ ID NO: 52220 - protein, 169 aa, Zea mays
  Coding DNA Sequence Number=SeqID_10441
MANRKSMTGQDVIGKLNDSDDLTATDVAGITKILRQLRINSETTTGTYERSSTRKLDTPLRAENFRAHGKQRKSELRVRRGLDNLQQGLAGREQRKEVESERWACHERTEGAGGSRREQRSRHAGENNGRARARASPACREEGCAERRQGKDPGSSAAGHCTVELRARI

SEQ ID NO: 52221 - protein, 63 aa, Zea mays
  Coding DNA Sequence Number=SeqID_10442
MGPCEVELPMAPEAGLSCCQPHSIEWHSSQSDAGGAVFLSGDLAKVASLRRLGLGRAEGVSVA

SEQ ID NO: 52222 - protein, 130 aa, Zea mays
  Coding DNA Sequence Number=SeqID_10443
MEHPTFDATLVTVGAGVGVRTATTTSAGLLPDVGLLALTDTGVVFPDTAADLLPAASSSISSRNNSKLIVDGAPFIVGLGPSPEAPVVLSVQQGARRSSPGFLAHYPPSSSPREPTSSHPRRPLRLSLPP

SEQ ID NO: 52223 - protein, 173 aa, Zea mays
  Coding DNA Sequence Number=SeqID_10444
  Gene Ontology: Cellular component=integral to membrane
  Homolog annotation: Hit_ID=Q5JLY8; Match level="QueryCoverage=98%, HitCoverage=32%, E-value=3e-35, Identity=45%"; Hit description =Golgin-84
MKIEKIRPLPPADSSIVDTSDSEPEVTQIDVKEVGNEGTLEKEEKATDGLKTDGSGIVNTMVEVQLMEKNSNNATLDGVIHANSEIAVESYFLVLDAKNSLESIEDRRKQKTDTISVKEQDQLEEAQGSLKSDVKTGQSKEARLARVCAGLSSCLQEYKSKNAQLEELLVQEV

SEQ ID NO: 52224 - protein, 78 aa, Zea mays
  Coding DNA Sequence Number=SeqID_10445
  Gene Ontology: Mol. function=ribonuclease H activity; Biological process=RNA-dependent DNA replication
  Homolog annotation: Hit_ID=UPI00004C1733; Match level="QueryCoverage =65%, HitCoverage=3%, E-value=3e-19, Identity=88%"; Hit description =UPI00004C1733 related cluster
MPGIPRDVAEHSLDIRARAQPMKQHLRRFDEEKRRAIGEEVHKLMAAGFIKEKRYIPSGINESQTKVTKGKTFRKIDK

SEQ ID NO: 52225 - protein, 289 aa, Zea mays
  Coding DNA Sequence Number=SeqID_10446
  Gene Ontology: Mol. function=protein binding; Cellular component =cytoskeleton; Biological process=phagocytosis
  Homolog annotation: Hit_ID=Q2R485; Match level="QueryCoverage=81%, HitCoverage=83%, E-value=1e-133, Identity=94%"; Hit description =Phagocytosis and cell motility protein ELMO1, putative, expressed
  Pfam annotation: Domain name=ELMO_CED12; Domain location=109-270; Score=315.7; E_value=8.1e-92; Accession=PF04727.4; Description =ELMOCED-12 family
MTDQATQPLIHYFEKIILNHRLNSKTSQQSLCLLDMALLGSRVSHRWGGIRFDETSCGSPRWIGRGLSCVCIKRKGTYERICMNLTPVQEERLQRLKHRMKVYFDPSRRDHQEALKALWHATYPDQELEGLISEQWKDMGWQGRDPSTDFRGAGFISLENLLFFAKTFSASFQRLLNKQCGNRATWEYPFAVAGVNITFMIMQMLDLQSTKPRTFVRAIFIQMLSEDEWAFDLLYCVAFVVMDKQWLDKNASYMDFNEVLKSTRAQLERELMLDDVIRIEDMPSYSLLC

SEQ ID NO: 52226 - protein, 254 aa, Zea mays
  Coding DNA Sequence Number=SeqID_10447
  Gene Ontology: Mol. function=kinase activity
  Homolog annotation: Hit_ID=Q6QP54; Match level="QueryCoverage=66%, HitCoverage=58%, E-value=2e-11, Identity=39%"; Hit description =Putative kinase
MERPSNELAMRYSWAKLWLDTLDGELSPSSNPKRGRSWIESGSGSSIPTILVKARCSAPRCSSLPCGGLSQRLSRPPSNVERGDTLAINKPQSEGFVGHGALQPKGLVVHVWEEDRCLYYALESGWARWRLLRGRGRVCLPRSRSSPSPWVGRGGDRRLRPGLSPSPGVGRSGVRRPSGLSLSLSPGVGRGGVRRLPGLSPSPSPGVGRSGVRRLPGLSPSPSPGVGRSGVRRLPGLSPSPSPGVGRSGVSYDA

SEQ ID NO: 52227 - protein, 87 aa, Zea mays
  Coding DNA Sequence Number=SeqID_10448
  Homolog annotation: Hit_ID=Q6K4D7; Match level="QueryCoverage=59%, HitCoverage=8%, E-value=5e-20, Identity=90%"; Hit description =Putative adhesion of calyx edges protein ACE
MNSIFISTRSPPRQSLIETVGITEEGVFIEASSGFGQSSESVHCHHGIMSAENNGGCCYCCGSKSGPEADAGVAGVVARRNLSVSFI

SEQ ID NO: 52228 - protein, 244 aa, Zea mays
  Coding DNA Sequence Number=SeqID_10449
  Homolog annotation: Hit_ID=Q2QS19; Match level="QueryCoverage=35%, HitCoverage=38%, E-value=5e-12, Identity=62%"; Hit description=SAP domain containing protein, expressed
  Subcellular localization annotation: CTP_CleavageSite=91; ConfidenceScore=5.23e-01
MPTEEGSDGGGGAGAGAGEKKSSQAPAKPGACGAAKFLAGLPSRGNFSSGSAPSNLVRTLTLEAPNGYFLRAHCEAPRFARQRRVQGLRLRAQHRSPRIQVNFLPLSISLSFWVEEGQVIKTDSTNILIRHLQLNKQKTEGKDVDSRTVGENNRGKRDMTLNLVEASRPRSSFFEDISSMFDHARHLTKTIGGHFLDFDGVLIGMVVINEHRQPKRLPEVLSYLLEPNNELKEISCTCGFFFTN

SEQ ID NO: 52229 - protein, 132 aa, Zea mays
  Coding DNA Sequence Number=SeqID_10450
MALIASRIRELEANAFWLGVHHALVTTGSHLDDSIKRDRECLCHANGWGDMGREDKVSFIFLIVGRVRLRPPSASTTMFGFLGGEGQVGDAWTISSSLSMMKSRLLKRSITLRVRTAWGSPQDHVIALRLLG

SEQ ID NO: 52230 - protein, 143 aa, Zea mays
  Coding DNA Sequence Number=SeqID_10451
MASRGTCVRLTQLWRRLMIQGQRDLGAARVAIEADNVELRCLRSQLVALNDSGAELELEALSLYLCKDQATGFICARGRNHYMCFLDIRDHVHEAVEFGVHLDAAVALAIAIYAATFRWCGSQRRWLTTEVNVKRARADGQER

SEQ ID NO: 52231 - protein, 498 aa, Zea mays
  Coding DNA Sequence Number=SeqID_10452
  Gene Ontology: Mol. function=zinc ion binding; Cellular component =extrinsic to vacuolar membrane; Biological process=intracellular protein transport
  Homolog annotation: Hit_ID=Q10R92; Match level="QueryCoverage=97%, HitCoverage=89%, E-value=1e-149, Identity=60%"; Hit description =ReMembR-H2 protein JR702, putative, expressed
  Pfam annotation: Domain name=PA; Domain location=81-180; Score=68.8; E_value=1.7e-17; Accession=PF02225.12; Description=PA domain
  Pfam annotation: Domain name=PHD; Domain location=267-312; Score= -1.0; E_value=0.072; Accession=PF00628.19; Description=PHD-finger
  Pfam annotation: Domain name=zf-C3HC4; Domain location=268-309; Score= 41.9; E_value=2.2e-09; Accession=PF00097.15; Description=Zinc finger, C3HC4 type (RING finger)
  Pfam module annotation: Pfam domain module=PA::PHD::zf-C3HC4; Domain location=81-180::267-312::268-309
MACPRGRTPFPLCFFLMICLMAQLGASNVVLMANNTTLSLDDVEATFSGCYTLLHYLHVSLYMSIKNLAYLTLFILPAAPAVEGSGVSGVLYAVEPKDACSPLRAKAIQGSVSPFALIIRGGCQFDDKIRNAQNAGFKAAVVYNNEDNDILVSMAGSSLGVQIYAVFISKASGEELKKYSGQTDAELWIIPTYENSAWPIMAISFVSLLAMSAILVACFFARRHQIRRDRARLPRAQESHGMSSQLVKAIPSLIFTKVQEDNCTSATCAICLEDYSVGEKIRVLPCRHKFHAACVDLWLTSWRTFCPVCKRDASAGTSDPPVSESTPLLSSSATRLPESTVLASLRSTAAASPPRTISRHPLLRSISRNYSVSGSSILRTPDSRFDANSSICTSGSNLDLANGLLVPTDRHQEYLSTCLAFCQWISQSLRRLITHVPWIFRAAASSPEALHIVRPEPVHHGAPVTATEPVAAWWILGNKSVGCRIGSIIPSALPAALP

SEQ ID NO: 52232 - protein, 814 aa, Zea mays
  Coding DNA Sequence Number=SeqID_10453
  Homolog annotation: Hit_ID=Q5ZDR1; Match level="QueryCoverage=78%, HitCoverage=97%, E-value=0.0, Identity=54%"; Hit description=RNA -binding protein-like
  Pfam annotation: Domain name=YTH; Domain location=480-555; Score =139.2; E_value=1.1e-38; Accession=PF04146.6; Description=YT521-B -like family
MRAVSQRLVTHRTLVSGVHRTVRWCTEQSAQRGHRQALSGCSTGLVLYHKQSKGSEATPFGSKSAKNQNQSTSGEDESREGALAGGVEQLTLKSERWSRTRCLFKIVSCMEMGMTPEVMYGQNVFVPATANPYQYGYTEVGSPMEWYSHPNSSGYASQDIFYSAEGMQCVYYAAPDNGSMHPTYIPYPSDPSFVPDGSFMPQEYVADPANSTCQIGPSSYYIPAVLPYAQDSVPGSATTPLYSSNVAFLPGIPGYAATSANAAFPLIAPVTTKSDIVVHPPVQSTIVPLKQLQDHAKPPKVQLHNSVPQKQELPDRCMVPAKLPHASQVSAHLSGNNCLGCAAGSDLHKWAAAEKFQPSSKSSGHLNGTGQKVHSLVDSEKPSNQSFAMIVKSHTLRLPVGNPDGTIIIRTDQYNRDDLRVDYMYAKFFVIKSIGEADVHKSIKYGVWSSSSNGNIKLDSAFRDADRISRRHSTKCPVFLFFSVNGSGHFCGMAEMVGPVDFHKDMDFWCQDKWTGCFPHITLQNNENKPVTHSRDTQEIPYLPGISVIKIFKDIKVRDCLFDDFMRYEAEEAQMKPHRRCKLSYDAPDFVPVSQRTEQTKSSSVLVDRTSEIQNVSEKPHDAKVINPQEPRASDKQASEAEKENELQESHCSGSQNQEDAAKTATNHPPGPSLKAAGADGKQQYWKKVENPKQHADSGAAQGSLKAPEKRLNGVSGSASTVPVPEGGEQQRVTAKLGSLKISSKAVEADRKTSTAGMEKQLNGVSGSGSAVPEGGEEQKVKISSKVVEADRKTSKAGVVTIGSMPVRVDSYAV

SEQ ID NO: 52233 - protein, 69 aa, Zea mays
  Coding DNA Sequence Number=SeqID_10454
  Subcellular localization annotation: CTP_CleavageSite=32; ConfidenceScore=5.05e-01
MSHGGVREGHDDTVKGLDTRHKAGKRRSPASSDRATWSKLFSKFLITTMLAPFSKVVLLLLVFNFDVVT

SEQ ID NO: 52234 - protein, 156 aa, Zea mays
  Coding DNA Sequence Number=SeqID_10455
LDPDPIATSDSDSTCLGPEHSASAPGTRPDHVPDAPTRAGHGAPASAPVTAPQPRPRPPPPPAASARPRPSRTPCAPEQTRLGPCRAAPRSARRPPAAPIRAAPAPAARPRADPAPAVPRPSRAPCSLARPSVPCSRCDGPGAASSSAQRAYGAQP

SEQ ID NO: 52235 - protein, 107 aa, Zea mays
  Coding DNA Sequence Number=SeqID_10456
MEFGLRAQEALRGSRDASQGVGLDGGLSSLCEFQVKIWSGVGDMVVPSQVFQCATTFVKGSSHDLVIYLVLPLIKSWGSNGLRRVVQGFEYFSQLEMLEKARIFLLV

SEQ ID NO: 52236 - protein, 32 aa, Zea mays
  Coding DNA Sequence Number=SeqID_10457
MAYSSCLNQSLKPNKLLLRRIDRAIQGSGDWI

SEQ ID NO: 52237 - protein, 76 aa, Zea mays
  Coding DNA Sequence Number=SeqID_10458
  Gene Ontology: Mol. function=ceramidase activity; Cellular component =extracellular region; Biological process=lipid metabolic process
  Homolog annotation: Hit_ID=Q304B9; Match level="QueryCoverage=93%, HitCoverage=9%, E-value=2e-27, Identity=86%"; Hit description =Neutral ceramidase precursor
MGSYDITGLAADVNMMGYANAEQIASGIHFRLKACAFIVAEPNSKRVVFVNLDACMASQLVTIKVLERLKARVSFI

SEQ ID NO: 52238 - protein, 98 aa, Zea mays
  Coding DNA Sequence Number=SeqID_10459
  Gene Ontology: Mol. function=aminoacyl-tRNA ligase activity; Cellular component=cytoplasm; Biological process=tRNA aminoacylation for protein translation
  Homolog annotation: Hit_ID=Q6K1T2; Match level="QueryCoverage=62%, HitCoverage=10%, E-value=8e-24, Identity=85%"; Hit description =Putative lysyl-tRNA synthetase
MVFETFVESTLVQPTFVLDYPVEISPLAKPHQSHVGLTERFELFICGREIGNVLSELIDPIDQVIIKIDGNHNLLVRSFQIQMCIFKFKCVFIATKPS

SEQ ID NO: 52239 - protein, 366 aa, Zea mays
  Coding DNA Sequence Number=SeqID_10460
MLLGVCGSLCQGGDEDDGFGYDYGKVHFSQTGHIAEYVDVYSPLLYTPTPQVVRIATTARVKMKSWRRTSRSSKSTMSSRHGLAANPSRLPVKALYNCCLRELLILARTWFAFGLPSKTGCDIGGIKGVLTSWGLPGPLGGNLFGAPSGEQSPGCGGLLRTLLFSERDSAEAAVQDAARRALSHYCSVFGGVADGLNLKYYPRCPSGSTGGVVVSHVGEDNPRLSSTVNLAVVLNTELDHALDELSRARAEIAQLQAERAKHLHLEDGSPALVGTQHPYRSPQRGHHAYDVRKQAQRRKACSAGAGSPAVRGTPAAAATPAPDDHRADVPNADSDSSSHRSDSGRYLAASVPTSALDASDAQRQAC

SEQ ID NO: 52240 - protein, 109 aa, Zea mays
  Coding DNA Sequence Number=SeqID_10461
  Gene Ontology: Mol. function=protein serine/threonine kinase activity; Cellular component=integral to membrane; Biological process=protein amino acid phosphorylation
  Homolog annotation: Hit_ID=Q9FP13; Match level="QueryCoverage=98%, HitCoverage=11%, E-value=4e-19, Identity=59%"; Hit description =Putative somatic embryogenesis protein kinase 1
  Pfam annotation: Domain name=LRRNT_2; Domain location=1-33; Score =27.6; E_value=4.3e-05; Accession=PF08263.3; Description=Leucine rich repeat N-terminal domain
MTIKNTLKDPHGVLKNWDQDSVDPCSWTIVSCSLENFVTRLEASFHSLDRSPIPSTQLFPVSMEVPGQNLSGLLSPSIGNLTNLETIEVDRLLPFPAAAVSCRTTTSPA

SEQ ID NO: 52241 - protein, 90 aa, Zea mays
  Coding DNA Sequence Number=SeqID_10462
MGREPSNTFQDLIKEYEVVLKGPFNYTARDEAGIPREWKNLFGKEIASFSQSQLSLGAPDCPVVHRAVSGVPGWLGRTGCSRDFDGGVRL

SEQ ID NO: 52242 - protein, 600 aa, Zea mays
  Coding DNA Sequence Number=SeqID_10463
  Homolog annotation: Hit_ID=Q00XE1; Match level="QueryCoverage=38%, HitCoverage=87%, E-value=4e-10, Identity=26%"; Hit description =Homology to unknown gene
  Pfam annotation: Domain name=DUF179; Domain location=99-291; Score =188.9; E_value=1.2e-53; Accession=PF02622.6; Description =Uncharacterized ACR, COG1678
  Subcellular localization annotation: CTP_CleavageSite=47; ConfidenceScore=5.59e-01
METTSCFLASKASSASRSTAVLPPTAPGFAKPKPYLQLLGSSRRRACCGSISARGAPEDGAAPPPIGPDWRSFRAQLYFKEQLPAVQTGGDRWAHPLAEPEKGCLLIATEKLDGSHIFERTVILLLSSPSSLGPVGVILNRPSLMSIKEASGSIFADDADIARAFAGRPLFFGGPLEECFFVIGPRAAAGGGGDDAVARTGLFEEVMPGLHYGTRETVGCAAELAKRGVVGVRDFRFFDGFCGWEREQLRDEVRAGLWHVAACSAAVLELATVVKGGLWEEVQGLVGERRLCARLPTASSTTASSTDVGRLHTIAEVLAILDSQGFGRLSDAADDSGSEYEADTSDPNAGERNGGGGNAAEDALTGSELGAPAVAAAAASAAQAGGLSWRGHAASPKCERRRPQHQQHMGRQLRQRHGHGHRRGYFYCRAADSSPKYHPGQSCRKIKRKELRSQTEEEEGNTEEVEGNDNAVENTEDGQERSDCTVCTDLPADVDGEVNQDGHGSSSNGRVEGRDDLAMVYQKDGEMERVLEKQAELIGQFKAQENAQREWEEKFSLRRDSVMDNVNLLNNKLNQAENACERRETARESEAERRSREEEI

SEQ ID NO: 52243 - protein, 786 aa, Zea mays
  Coding DNA Sequence Number=SeqID_10464
  Homolog annotation: Hit_ID=Q9LHL0; Match level="QueryCoverage=96%, HitCoverage=90%, E-value=7e-15, Identity=35%"; Hit description =Arabidopsis thaliana genomic DNA, chromosome 3, P1 clone: MJH23
  Pfam annotation: Domain name=WW; Domain location=171-201; Score=31.4; E_value=3.2e-06; Accession=PF00397.16; Description=WW domain
MGRRKERRLAAMAAAGRRVKLDLFLDLPPGEASHNDGIGGENRDQQTVVPTSSSDKKENPLALLGQYSDDEEENEETTDQPTDEAKRSPGDASAKLSSPCVDTAGNNGVARTEPSVSVGDQQEAPQAGDIKNYTQSVTENTIAPEPILQDENVKSTESVPDSSGMQIVGEVGGNWRAIMHEQSNQCYYWNTVTGETSWDIPNGLASGAATASVPSDVGYSIEAQAHVLPHSTLEAYPSDMSVGNGTSTFANFGMACGSAQVTQDAYAYAAPIASHEPMDIDPLYLAKYGDDLLQRLNLLERLCGLNEGLELIRREIGIRISDCNALSSYGSSLLPLWMHAEVHLKQLDSSISRMEMSYHADTEHRNSKTEVVEHNAPDGADLTTPSNGEALKSEVSPGITIDENVEIDKPTSILSAQDSQGRDIAAVPPKVESDNDQDMDVEMEVDEDNVEEQAHCSSVPKKEHPPSEQLSSTNLPSFEDPTPEDNSVPPPPPEEEWIPPPPPENEPAPPDPPKEPAASYVQVDAIPQPYIAQENVGYTISGMEYYGIVGTEGTNANYYMQVSEPHVLQAQQHSYYAPVSGSGVSVSVDGTSIAPESYYTHPSVTMAASAVAAEHSVYYASSISAISSSAADIKTSSASLVSANSNSDLKGPDKLISNDASIVPLTQAVVATSGAGTPSVLGSSTQPSSSTKNLTKVTRNKKRAVGITSSLRSNKKVSSLVDKWKAAKEELRNEEEEEPESALEALERKRQKEIEEWRKQQIASGEAQENANFIPVRGDWYSFFPL

SEQ ID NO: 52244 - protein, 57 aa, Zea mays
  Coding DNA Sequence Number=SeqID_10465
MAMGTRDIRVCIWAKCSTHGSLIGQKTFTQCDPMGDPYLHEYGYEYGGKFIPTSGYG

SEQ ID NO: 52245 - protein, 94 aa, Zea mays
  Coding DNA Sequence Number=SeqID_10466
MIHKKEDYQIQAKGEYNGSSSLISCEKQTIQIEFLSLQVTALVPTITGMGDHVSGRVRGKVCGQTITILLSKWIQPIPDLARVLEKSLDFYRDP

SEQ ID NO: 52246 - protein, 722 aa, Zea mays
  Coding DNA Sequence Number=SeqID_10467
MVTVPCEGAPRRRYLELPRGPTRTQALSISCRWGAASPKRKKVLGERNDSGVGGMEGAASAPVQQPKLALSPPTPASRGAGPYDPKTNYTTPRPAFLRYDPERRREILLRVSRAAEVMDDDCSSTTSGTAASEEDGGSSLASDAAAGSLISSPPRSDSEAELDDSEEEEEVVPARRGRWARRLLLLLVCVSCSFCYMYCAKPSGFPTYSEDALDLDRGIGGMYDAYDHELDSLRLLGPVHMMGPEDVLEEITNQLVHEDSKSVDHLYGNRAPRNLVAVAMVGLADICLNVSSGEFTCQIGGEKGENVPDLKEDSEMDKLDTELTISFQNDKQSSEVDCLGGNAPLDSIGSTSTHTDNLEGSLESFHLEEWDDYSNQSELQLVSMERAIKSASYKLKDRTGLESEELDLWQYENTAEAAKTICSTVKFLWSAMEPHLLQVLACLSFAGLVAALYRYYQRSRECCNCIITYDSLAEQPLLVQHQVAQLSVTSVRDAQLPVHSSEQPIQLAIPNQGTAGSLEVPMELTLPKLDPLVSLEDPAQESLPMTDPLVTVKIPVIGRGIHDQKLKRGDSENIKASNGMFLNHSDVDSSKPPVVELLGEFVLASSSRERSTKKLYQNAGDATDKKLLKPLKKDEDVEKMQMHSSIIQSPSVGRAKKEKIMYYQIRQDRGIEILIRNLVGAGEIYKPGEDRCDANSTETLKPPPQQGDFSLTKIQGAQLVVR

SEQ ID NO: 52247 - protein, 214 aa, Zea mays
  Coding DNA Sequence Number=SeqID_10468
  Homolog annotation: Hit_ID=UPI00004A6D44; Match level="QueryCoverage =36%, HitCoverage=46%, E-value=1e-18, Identity=62%"; Hit description =PREDICTED: similar to germinal histone H4 gene
MGLDLCHGRHVIWAQHGSEDTASCSPESNHPSWVGDQKDETAPACESHPPLRLPRGESRASPTVEPASTRESPAAPSPANHSPLLHLREPPKRNARCHLRNARRDSPASHAVKMSGRGKGGKGLGKGGALRHRKVLRDNIQGITNPAIQRLARRGGVKRISGLIYEETRGVLKIFLEQGCWFRGSSRAHPARPPRSVAMAQCRHHLLLMVIAAP

SEQ ID NO: 52248 - protein, 69 aa, Zea mays
  Coding DNA Sequence Number=SeqID_10469
MSVDLCCTGPIAYWRSPQKIMAKLPMASCGAQVEWSTTKMKVMRFRVDGLGAVKDECWDLTEGPESLGD

SEQ ID NO: 52249 - protein, 95 aa, Zea mays
  Coding DNA Sequence Number=SeqID_10470
MVPRGRGGIRVSSGLGAAGRRARRGRGGRGEEHREGSLRERDRGGEGEHGRRAQRVELLDGEEVVVVVRARRGRGADPIINMKIFLLHDAALQQH

SEQ ID NO: 52250 - protein, 95 aa, Zea mays
  Coding DNA Sequence Number=SeqID_10471
MASTPLLLLSPQPLCSPARWPITHSKAQLAGWWPCPGYLAIGGKRSDDGDHGRRVGEALEERKHFSLAIYRSKDFECDTVGIIFMTIVYSYNGII

SEQ ID NO: 52251 - protein, 89 aa, Zea mays
  Coding DNA Sequence Number=SeqID_10472
MSLMSVNLLQEFWKQRRTLLYRQNWTVASTPGSSRGVVTLLDSFTEFTEEYELKMKEKGEQLIVPQWMKEQHVELGSKGLEGYFITTCN

SEQ ID NO: 52252 - protein, 688 aa, Zea mays
  Coding DNA Sequence Number=SeqID_10473
  Gene Ontology: Mol. function=protein-methionine-S-oxide reductase activity; Cellular component=membrane; Biological process=protein metabolic process
  Homolog annotation: Hit_ID=Q8LIY0; Match level="QueryCoverage=99%, HitCoverage=100%, E-value=0.0, Identity=68%"; Hit description =Putative CSLC9
  Pfam annotation: Domain name=Glycos_transf_2; Domain location=233 -408; Score=33.0; E_value=1e-06; Accession=PF00535.16; Description =Glycosyl transferase
MPQWWGREARGGGGGGGTSVVVKMESPDWAVREPEAARGKAGRGKNARQITWVLLLKAHRAAGKLTGAASAALSVAAAARRRVAAGRTDADADAGAGAGAAPHGESPALRTRLYGFLRASLVLSMLLLAADVAAHLQGWHLLAVDVPDLLAVEGLFAAGYASWVRVRLQYLAPALQFLANACVLLFLVQSADRLILCLGCLWIKLRGIKPVPNAAGKGPDDVEAGTGEFPMVLVQIPMCNEKEVYQQSIGAVCGLDWPRPNFLVQVLDDSDDAATSALIKEEVERWQREGVRILYRHRVIRDGYKAGNLKSAMNCSYVKDYEFVVIFDADFQPQPDFLKRTVPHFKGNEDVGLVQARWSFVNKDENLLTRLQNINLCFHFEVEQQVNGIFLNFFGFNGTAGVWRIKALEDSGGWMERTTVEDMDIAVRAHLKGWKFLFLNDVECQCELPESYEAYRKQQHRWHSGPMQLFRLCFVDIIKSKIGFWKKFNLIFLFFLLRKLILPFYSFTLFCIILPMTMFIPEAELPAWVVCYIPATMSLLNILPAPKSFPFIVPYLLFENTMSVTKFNAMVSGLFQLGSAYEWVVTKKSGRSSEGDLIALVEKQPKQQRVGSAPNLESLTKESSSLKRDSKRKKHNRIYRKELALSFLLLTAAARSLLSVQGIHFYFLLFQGVSFLVVGLDLIGEQVE

SEQ ID NO: 52253 - protein, 44 aa, Zea mays
  Coding DNA Sequence Number=SeqID_10474
MVLVQIPMCNEKEVAFGDWALSALAALVVAEIERFGFQAETDGR

SEQ ID NO: 52254 - protein, 254 aa, Zea mays
  Coding DNA Sequence Number=SeqID_10475
  Gene Ontology: Mol. function=nuclease activity; Biological process =response to DNA damage stimulus
  Pfam annotation: Domain name=UVR; Domain location=99-134; Score=15.6; E_value=0.0083; Accession=PF02151.9; Description=UvrBuvrC motif
  Pfam annotation: Domain name=YccV-like; Domain location=149-229; Score=-24.0; E_value=0.015; Accession=PF08755.1; Description =Hemimethylated DNA-binding protein YccV lik
  Pfam module annotation: Pfam domain module=UVR::YccV-like; Domain location=99-134::149-229
MKNNGRRMNAAVKTNARWLFGGDGRSNDARLERSESANEDILIFYFQMDLQTRIQYALNIEQFDVAKQLREKLTEIETEIIRQREARRGSPKTEAQDKALNLIRVRADLQKAIDSENYALAAGLRDDIAKLEVESLAVSAKALAYQNVKYAFRLGQKVLVDVYVDPELLVAYGWPIILASFDTHVNLESQKKIFLQLKNQKKWGRFDHPYIEFLFYGEDTAGDFIPIKQLREKYDQPRYEASGDESDNDGNTNS

SEQ ID NO: 52255 - protein, 367 aa, Zea mays
  Coding DNA Sequence Number=SeqID_10476
  Gene Ontology: Mol. function=chorismate mutase activity; Cellular component=chloroplast; Biological process=aromatic amino acid family biosynthetic process
  Homolog annotation: Hit_ID=Q5JN19; Match level="QueryCoverage=61%, HitCoverage=81%, E-value=1e-105, Identity=75%"; Hit description =Putative chorismate mutase
  Pfam annotation: Domain name=CM_2; Domain location=157-224; Score =25.3; E_value=0.00021; Accession=PF01817.11; Description=Chorismate mutase type II
  Subcellular localization annotation: CTP_CleavageSite=44; ConfidenceScore=5.30e-01
MAFKLITKPAAASPAAAYWGDLARGPQGTSRVAFGPAPRNKGLRAANNSATPIAKYEHSLSCLEIVWFNKQLCPLVPCKVHDFVFVRGRGRGVVHDFVFVRGRGAGAVHDFVFVRSRGRGVLEICGLVCLSPPGPDHPCFRVERVDRSDILTLDSIRQVLIRLEDSIIFGLLERAQFCYNADTYDSNAFHMDGFGGSLVEYIVRETEKLHAQVGRYKSPDEHPFFSKDLPEPRLPPMQYPRVLHPIADSININKEIWKMYFDELLPRLVKEGSDGNAGSSALCDTTCLQDRDQLMNLLTYETVERAIEHRVEAKAKIFGQEVNIGAKDNGSPPVYKIRPSLVAELYSYRIMPLTKEVEVAYLLKRLD

SEQ ID NO: 52256 - protein, 515 aa, Zea mays
  Coding DNA Sequence Number=SeqID_10477
  Gene Ontology: Mol. function=hydrolase activity, acting on carbon -nitrogen (but not peptide) bonds, in linear amides; Cellular component=cytosol; Biological process=metabolic process
  Homolog annotation: Hit_ID=Q9SZE9; Match level="QueryCoverage=67%, HitCoverage=90%, E-value=1e-153, Identity=68%"; Hit description =Formamidase-like protein
  Pfam annotation: Domain name=FmdA_AmdA; Domain location=8-350; Score =573.6; E_value=1.9e-169; Accession=PF03069.5; Description =AcetamidaseFormamidase family
MAPLTPRLVVPIDVKKQPWEQKVPLHNRWHPDIPPVADVTEGELFRVEMVDWTGGRVRDDNSADDIKSLDLTITHYLSGPLRIVDSEGVPASPGDLLAVEICNLGPLPGDEWGYTAIFERENGGGFLTDHFPTARKAIWYFEGIYAYSPQIPGLTHPGIVGTAPSAELLNIWNEREKRLAETSPQTLKLRGLLDGTKWRMKQPGLFREGRMAGDGEVSFCGAIEMSGFLELKCEIIRGGMKEYLTPVGPTPLHVNPIFEIGPVEPRFSEWLVFEGISVDESGKQHFLDASVAYKRAVLNAIEYIARFGYSKEQVYLLLSCCPCEGRISGIVDSPNAVATIAIPTAIFDQTDAGWIHEIASGAEGSPKEGGAAITNKGELESINEENLRSACAQLRHAMSESDGDGAMEKVLGMDWSRKPGDPVDPAVDAEWIAGIARLGLDTNFVVVHGAVEISVAAHDTTGGMETKILEAAVIARLGIDVYITKAGTEHSLRALKGDVSTDSEDWLGTIIRSSK

SEQ ID NO: 52257 - protein, 433 aa, Zea mays
  Coding DNA Sequence Number=SeqID_10478
  Gene Ontology: Mol. function=diacylglycerol kinase activity; Cellular component=intracellular; Biological process=protein kinase C activation
  Homolog annotation: Hit_ID=Q94DX0; Match level="QueryCoverage=94%, HitCoverage=95%, E-value=0.0, Identity=70%"; Hit description =Pentatricopeptide (PPR) repeat protein-like
  Pfam annotation: Domain name=PPR; Domain location=135-169; Score =26.2; E_value=0.00012; Accession=PF01535.11; Description=PPR repeat
  Pfam annotation: Domain name=PPR; Domain location=170-204; Score=3.8; E_value=2.7; Accession=PF01535.11; Description=PPR repeat
  Pfam annotation: Domain name=PPR; Domain location=236-270; Score =35.7; E_value=1.7e-07; Accession=PF01535.11; Description=PPR repeat
  Pfam annotation: Domain name=PPR; Domain location=271-305; Score=1.3; E_value=5.2; Accession=PF01535.11; Description=PPR repeat
  Pfam annotation: Domain name=PPR; Domain location=308-342; Score=6.3; E_value=1.3; Accession=PF01535.11; Description=PPR repeat
  Pfam annotation: Domain name=PPR; Domain location=374-408; Score =18.5; E_value=0.025; Accession=PF01535.11; Description=PPR repeat
  Pfam module annotation: Pfam domain module=PPR::PPR::PPR::PPR::PPR::PP R; Domain location=135-169::170-204::236-270::271-305::308-342::374 -408
  Subcellular localization annotation: CTP_CleavageSite=53; ConfidenceScore=5.34e-01
MADPAGLPPRLRPSTVPPPAAVTRALHAINTCTSAAALAPLRVHILREPALLRSTAVISAFFLACGRLRSLDPALVLFASLPRPHLNVAHSQVAKSGFARDLHVRNALLARYAACDPDLGHAEQLFDEMPRPDVVSWTTVITAYRNHGHSFLALATFRRMFAASVAPNRVTMVSALGACAAHGAVDTGIWIHQYVQKLGWELDVVLGTALVDMYGKCGHVAEGVRVFSKMTERNVFTWNSIIGAFALVQDGEMALRWFFRMKADGIRPDAVTLICVLYACVHAGLVDIGRKIFNLIVQGEYGFQPGIKHFGCMVDLLSRSGHLNDAFRVVEAMPSQPNAVIWGLLLRGCKDHGDSVLSEHVTMQLLELEPENASHYVTLANLYAETGRWLEAHEVLKWMKEKGLAKDAGWSLRMLEDRSSKCISDGNFMECAL

SEQ ID NO: 52258 - protein, 414 aa, Zea mays
  Coding DNA Sequence Number=SeqID_10479
  Gene Ontology: Mol. function=drug transporter activity; Cellular component=membrane; Biological process=multidrug transport
  Homolog annotation: Hit_ID=Q8W5C9; Match level="QueryCoverage=98%, HitCoverage=84%, E-value=1e-143, Identity=62%"; Hit description =Putative multidrug efflux protein
  Pfam annotation: Domain name=MatE; Domain location=1-113; Score=5.3; E_value=0.00097; Accession=PF01554.9; Description=MatE
  Pfam annotation: Domain name=MatE; Domain location=173-336; Score =127.3; E_value=4.4e-35; Accession=PF01554.9; Description=MatE
  Pfam module annotation: Pfam domain module=MatE::MatE; Domain location=1-113::173-336
MGSALETLCGQAVGAGQLQMLGVYMQRSWIICLATSLALLPLYVFTSPLLRMLRQSADISAVAGRYARWCVPQLFAYAVNFPIQKFYQAQSRVWAMTAISGAALAVHALLSWLVVARLGRGLAGAAVVGDVSWWLVNVAQFVYLVGGSFPDAWTGFSRKAFDSLGGFVRLSVASAVMLCLEMWYYTAVLILVGCLKNPEIQVDAISICMNYQLWTLMVAVGFNAAVSVRVSNELGANHPKAARFSVVVATVTSAAVGVVFTAVALAARKQMPRLFTGDDVVVRETAKLGYLLAATIFLNSVQPVLSGVAIGAGWQSLVAFVNVGSYYLVGLPLAAVFGFKLKLNATGIWVGVLIGTVLQTVILFVILSRTKWQKEAMLAEERIREWGGNVELPHTQETGPSESTAAPDARKGPK

SEQ ID NO: 52259 - protein, 107 aa, Zea mays
  Coding DNA Sequence Number=SeqID_10480
MANFPEGGRAATPASPRREQRQNPEACFAYSPPSRRLSDSFHNLLLSGSEGGLNSQSNWVSHNLAQECLVDNMLEDHSPLMENPEGTPTSVTMHVAASAPPRLNLPS

SEQ ID NO: 52260 - protein, 207 aa, Zea mays
  Coding DNA Sequence Number=SeqID_10481
  Gene Ontology: Mol. function=nucleic acid binding; Cellular component= endoplasmic reticulum; Biological process=ER to Golgi vesicle -mediated transport
  Homolog annotation: Hit_ID=Q6K335; Match level="QueryCoverage=78%, HitCoverage=93%, E-value=3e-81, Identity=88%"; Hit description =Putative trafficking protein particle complex 6B
  Pfam annotation: Domain name=TRAPP_Bet3; Domain location=7-168; Score= 192.6; E_value=9.5e-55; Accession=PF04051.6; Description=Transport protein particle (TRAPP) component, Bet3
MAIAESCVDAVVMEMVAVYCGGLYAAKPELAARRIEAIGFQVGHQLSERYTMERPRFSDHLEAIKFICKDFWSELFKKQIDNLKTNHRGTFVLQDNRFRWLTRVSLDPYTENRDSTENDSAALGDTAAQTTTMLLYFPCGLIRGALTNLGIPCSVSADMSNLPACHESAPDELFVMEDTHRNGMWDGSREGRVPGGEARGAEGGETP

SEQ ID NO: 52261 - protein, 238 aa, Zea mays
  Coding DNA Sequence Number=SeqID_10482
MAGEQCADVPLAPSSSIQEVKVEKLVTTIEATASQAEANTVNPFEDSDNIDVEEDSTTIRSTKPSHVDFSKSNIKEGHIEGVEFDVEALCEASCQVHEMHFQTKATRGLHNNFGSYNFAYRSKPEAEALQQAFAAQKRQRLNHVFDAIGFFNPNNPNMVQDSKKRKRRVTMKRSKVPKTQSKLTPQASKEILAIPEAKVVAVVEELPSMEAEETKIEESIALIAQNVIPLETLPESEE

SEQ ID NO: 52262 - protein, 124 aa, Zea mays
  Coding DNA Sequence Number=SeqID_10483
MGREVSELEALNTKKDKRIASLEAELKRAKEEYEAETMKIMQASAELPKQQLTLTPLSTRVLLRMDRRPKHCFSFAESRVQSSEAEAATVRAVKKAIDDVVLKMCEQIYGEVMQVNKGKSCEKQ

SEQ ID NO: 52263 - protein, 196 aa, Zea mays
  Coding DNA Sequence Number=SeqID_10484
  Gene Ontology: Mol. function=nucleoside-triphosphatase activity; Cellular component=chloroplast; Biological process=nucleotide -excision repair
  Homolog annotation: Hit_ID=O98447; Match level="QueryCoverage=95%, HitCoverage=21%, E-value=2e-48, Identity=58%"; Hit description=ClpC protease
  Pfam annotation: Domain name=Clp_N; Domain location=105-157; Score =77.3; E_value=4.8e-20; Accession=PF02861.11; Description=Clp amino terminal domain
  Subcellular localization annotation: CTP_CleavageSite=25; ConfidenceScore=5.62e-01
MEGALVQSAIVPAVYRSSSGRFRVRARARTNATMVRNTPTRTLTLGGFQGLRQTNFLDTRSVIKRDFGSIVASQIARPRGSASRGVVRAMFERFTEKAIKVIMLAQEEARRLGHNFVGTEQILLGLIGEGTGIAAKVMKSMGINLKDARVEVEKIIGRGSGFVAVEIPFTPRAKRVLELSLEEARQLGIIFTYLHS

SEQ ID NO: 52264 - protein, 83 aa, Zea mays
  Coding DNA Sequence Number=SeqID_10485
MTQSSWLHLNNKDWSMPHFHHTRIRLLRSPPEMPTNLSICGFGAHNGEDLGFCDLGFGRHRECADSAFAVLNIPDSGIFPKAT

SEQ ID NO: 52265 - protein, 207 aa, Zea mays
  Coding DNA Sequence Number=SeqID_10486
  Gene Ontology: Mol. function=nucleotide binding; Cellular component =endoplasmic reticulum; Biological process=response to stress
  Homolog annotation: Hit_ID=Q69TV0; Match level="QueryCoverage=76%, HitCoverage=34%, E-value=2e-37, Identity=54%"; Hit description =Putative dnaK-type molecular chaperone BiP
MARLATSRRKMISTWEASDDFTARIVDYMAELIKEKHQWDIRQDAEALRRLRVAYEHAKKALSDQEETMVQIHVAGIESSAPLTRAKLEELNQDLLDRVMGLVDGAVMGTGSGWLTQPRDESRKDMVDEIVLVGGGTRMPKLRQLVEDYFHGRRPNSRKGVEPEDAIVRGTAILSCPKAAHYLEECFDYLYGKDGRGLPSFIFRTPD

SEQ ID NO: 52266 - protein, 149 aa, Zea mays
  Coding DNA Sequence Number=SeqID_10487
MSPANLGPRDRQPSRGHVKKGEAWTGPAVVATFPIVSYREVVEHKSRATCLLCRAKVPVLGAAGRHTLFAAAAGGNAKEEGDHERFTLRLPEQVWDQVLWSRRLCHATSLVNLSDMCSESEEGSSRGGRRVAGAGSVGNGGSSHSGRRW

SEQ ID NO: 52267 - protein, 105 aa, Zea mays
  Coding DNA Sequence Number=SeqID_10488
  Pfam annotation: Domain name=CsbD; Domain location=30-73; Score=-5.2; E_value=0.07; Accession=PF05532.3; Description=CsbD-like
HGCMYMIWLQLFAARDKIEKTAEVAIEVVDTVAEAAEKVAGEVAGAFPGNDGLREAASKIKTVADEIEEDAEKAEALIEKVDEIKKEVDSIVDPIIDKVVKDKEI

SEQ ID NO: 52268 - protein, 85 aa, Zea mays
  Coding DNA Sequence Number=SeqID_10489
  Gene Ontology: Mol. function=nucleic acid binding; Cellular component= nucleus; Biological process=mRNA processing
  Homolog annotation: Hit_ID=Q10KN7; Match level="QueryCoverage=84%, HitCoverage=22%, E-value=3e-25, Identity=78%"; Hit description =Polypyrimidine tract-binding protein, putative, expressed
MDESEKEIGDYNNPYLPINYSAMDGTLQPTVGADGRKVEAQGNVLLASIENMQYDVTVDVLHTVFSSFGSVQKLLFFRRMGGHKL

SEQ ID NO: 52269 - protein, 122 aa, Zea mays
  Coding DNA Sequence Number=SeqID_10490
  Subcellular localization annotation: CTP_CleavageSite=23; ConfidenceScore=5.21e-01
MASSSVSLLVTIMLLLLLPPSPACSSLSCRLDFTSLALLSYQETVPQNPTTSCCDTLLCSIDIWPIHELEKGFCCLCVGMPSSLALQTAMASSDDVSTTPGFAVQRPNHELASCRSTPQFLN

SEQ ID NO: 52270 - protein, 231 aa, Zea mays
  Coding DNA Sequence Number=SeqID_10491
  Gene Ontology: Mol. function=nucleic acid binding
  Homolog annotation: Hit_ID=Q6YW21; Match level="QueryCoverage=55%, HitCoverage=41%, E-value=1e-30, Identity=56%"; Hit description =Putative mec-8
MNIVAIGVYPTKGRLTVEVFKDPDREFTGQGGKRRPQPLAAPPVPTVAIHGGCATPARVHDLGHQPTASPVPGASDIVAADEVCTIFMDLPADVKERELHNLLCWLLGFETSEMNFKGNQPMGFALFSTVHQAITAKAMFQDTVFDAETKVALQTDMAKKNLFVKRSSEKAKAEKIHQIKRAEGEEESKHHAKGIMDMILVTQYFGTMRLGPPPSHIFIPHGLGAVKDVLA

SEQ ID NO: 52271 - protein, 161 aa, Zea mays
  Coding DNA Sequence Number=SeqID_10492
  Gene Ontology: Mol. function=metal ion binding; Cellular component =integral to membrane; Biological process=ubiquitin cycle
  Homolog annotation: Hit_ID=Q84KA9; Match level="QueryCoverage=42%, HitCoverage=18%, E-value=1e-13, Identity=61%"; Hit description =RING/C3HC4/PHD zinc finger-like protein
  Pfam annotation: Domain name=PHD; Domain location=101-142; Score= -2.5; E_value=0.1; Accession=PF00628.19; Description=PHD-finger
  Pfam annotation: Domain name=zf-C3HC4; Domain location=102-139; Score= 14.1; E_value=0.0054; Accession=PF00097.15; Description=Zinc finger, C3HC4 type (RING finger)
  Pfam module annotation: Pfam domain module=PHD::zf-C3HC4; Domain location=101-142::102-139
  Subcellular localization annotation: CTP_CleavageSite=87; ConfidenceScore=5.50e-01
MAICDRSSGRQAILPAGADLPCALSGRSSMAQRVVFSAKVRESSSILIAASPTLGRRRQPGQGVGARREGGSVGWTPRLSPCSRSCRGEAMENKVGKGVLECVVCLTAFEDDDDLRLLPHCSHAFHLECIDPWLQSRPCARSAAPTLRSRFRYRCWCRRWR

SEQ ID NO: 52272 - protein, 278 aa, Zea mays
  Coding DNA Sequence Number=SeqID_10493
  Gene Ontology: Mol. function=nucleotide binding; Cellular component =endoplasmic reticulum; Biological process=protein folding
  Homolog annotation: Hit_ID=Q69TV0; Match level="QueryCoverage=84%, HitCoverage=54%, E-value=3e-51, Identity=47%"; Hit description =Putative dnaK-type molecular chaperone BiP
MGRRLPVSLVPLLMVVMVAAAAFDISRASAAAAFNISRAPPAFGVRRGAPKEYCEWRGPWGTAPFLLGSAAAIHLGNTNSCIAAYDFRPGSHEYYQLYMPSWVAVTDNGTVLSDEAAMNHATVSPGTAISGFTHILDQKLKDEVVKSEMKLSPPYKLSERDGSPSNLIIQAGVARVEAHLGRELSAAVIAVSRHLNYNGRQDIVNVGRYDAGFRRAAKAIDRQITAAVAYHHHTEQGDGKAILVLRVGGRTSDATIFKFIDGEARYVAAQDDIYLGGK

SEQ ID NO: 52273 - protein, 70 aa, Zea mays
  Coding DNA Sequence Number=SeqID_10494
  Subcellular localization annotation: CTP_CleavageSite=36; ConfidenceScore=5.24e-01
MATMAPDPSPPGAGGGGWDTPFSSNSQEHGSVGESSATPVKSSPQLSKEQADDSGGSSSIIMMVTSSKTK

SEQ ID NO: 52274 - protein, 132 aa, Zea mays
  Coding DNA Sequence Number=SeqID_10495
LKLFAFGNSRKPARYNSPDCPVCTGHVRCSKEARPPELASLGFARQPLRYNSPDCPVCTGLSGVHRTVRCASGATAPCGANGSLRCIKCARSARRSQNRPYRGTGLSGVHRTVRCAIEQTPPANGQVWWLGL

SEQ ID NO: 52275 - protein, 317 aa, Zea mays
  Coding DNA Sequence Number=SeqID_10496
MSLRAEGSCPWPHRPDSNHVVNPQLTLNTFTLPHLSSTDPEGALGTAQTWVVRAPSRLLPPLCYAPGAPPLTPCRPARPPPARPSRRARPGPRPPSPRPRPAGLRASATPAVRAPDPVRPGHPAPPAPRRGEPTPPPRPAPLRRARPAPTPPRPRRARPPASPPTSPAPARAPASRPAPPSSGEPAAPRPLGRLPGRPSNPRRPVPGRPPASRARPCPRPPSAPAAPVLGKPHPPTCARPRLGRPPPGELGRPPQFNRPVPRLGRPSPRSASSGRILARLRSLSPACLPARPVVPCSRRVGPCVASSLAQRAYGAQL

SEQ ID NO: 52276 - protein, 538 aa, Zea mays
  Coding DNA Sequence Number=SeqID_10497
  Homolog annotation: Hit_ID=Q75IY9; Match level="QueryCoverage=39%, HitCoverage=100%, E-value=5e-11, Identity=36%"; Hit description =Expressed protein
MAALFSSLLALVMGTVSAAKAVVTEIIPPAAALVANIMAIATTTASASVAWFIYYVCAVAAAAVDVATDTLPYAVAVARTAACSAVQSSRLALQVLLSYLWSLSSAAVAGAARLATVMLPAAVALAESLVGAAWSLLAAAAAVVVHTLPYAVRASQPWLEMTSNLLRQLYGWSLAAAAQEPPDMAQAFKDVVESATRLSQSLRRLYGWLVATAAEKLETDAAYACAAAASEKLNPSDADASAVVSRMEAEASAMIQHGWRSWFLHDRGVAVCVLLALALLAVAFICGGVCALTLSSRLAGRQDHGDRRRSGFASSSAAHESKSLAMATPIANLSAVVTGAIAAARAVATEMLPAAVTRHAVAEASRAWVAWLTSHLWAWLAAARAVAADNIPVGAAADAWGPCLQTAAKLSHDLYGWLAAAVVQKLPDVAAEKLLDDAAAWLVRGRGVAAYSTLALALLAVAFLGGAVCALTCRSMKGPALGGARVPRAVFEANPKRYYATVRTARKARRRAGGAGCKLIPAGLLVAFAAYLAAKMLY

SEQ ID NO: 52277 - protein, 111 aa, Zea mays
  Coding DNA Sequence Number=SeqID_10498
MARAAAARPCGEAQGPPARERGAAGVQGGALPRVRQRPWGKFAAGRTMACAAAARPCGEAQGPPARERGATGVQGGALPRVRQRPWGKFAAETIQGNTAPSPTAPYTETRN

SEQ ID NO: 52278 - protein, 51 aa, Zea mays
  Coding DNA Sequence Number=SeqID_10499
MDAGHQVTDHAVRKAKLDELAAALTDGEQYEEGKTVDLYVPRKWYVCLILL

SEQ ID NO: 52279 - protein, 838 aa, Zea mays
  Coding DNA Sequence Number=SeqID_10500
  Gene Ontology: Mol. function=hydrolase activity, acting on ester bonds; Cellular component=nucleus; Biological process=nucleobase, nucleoside, nucleotide and nucleic acid metabolic process
  Homolog annotation: Hit_ID=Q2HUT6; Match level="QueryCoverage=74%, HitCoverage=38%, E-value=0.0, Identity=64%"; Hit description=SH2 motif; Alcohol dehydrogenase, zinc-containing; Resolvase, RNase H- like fold; Nucleic ...
  Homolog annotation: Hit description=acid-binding, OB-fold, subgroup
  Pfam annotation: Domain name=SH2; Domain location=467-552; Score= -4.4; E_value=0.017; Accession=PF00017.14; Description=SH2 domain
MAGLQVIGLAGRLLSWSSILFLPSPSVLLIFWSGGWDVQNASEPHRLEDHPRDVNAQMENFSIVYGDESVPRLYENSRISSDQLPGQSGIVKRAVALGRYLQNPLAMIATLCGPGKEILSWKLHALEQFLTPDEKYEIVEQVMVDATNQIGFDVNLAASHEWHFSTLQFIAGLGPRKASALQKDLVREGSIFSRKELVKPLGRKVFMNASGFLRVRRSGAAAASAQLIDLLEDTRIHPESYVLAKNLAKDVYVEDAQHEINEMDDEEQEMAIEHVRERPSMLRSLKIVEYIKSITEEYRKLETLRDIKFELLCGFSDWRIPYTEPSPDEEFWLLSGETDDTISEGRIVQVTVRNIQDNKIICTFDSGLKAIVMADNYSDEGFDPESSQLREGDVLTGKIRNVNKNRFMVYLTCKASEMRRRPFSRGEQDPYYHEQDMTSQTVEDKARKQKELAKKHFKPRMIVHPHFQNLTAEEAMQFLSDKEHGEKLIRPSSRGPSFLTLTLKIFDGVYAHKEIAESGKDHKDITSLLRLGKTLTIDNETFEDLDEVIDRYVDPLVGHLKSMLSYRKFRKGLKNEVDEMLRAEKAENPMRIVYSFGISHEHPGTFILSYIRSTNPHHEYIGLYPKGFRFRKRDFDNIDRLVSYFQKNIDKPPPDAGPSMRNVAAMVPMKNSAWGSGGGGDANGGWRGDGSNDRDRPFSGRSGGRFDSRNSSGGRGRGRGRGRGNFGDDDNAGGGWSGGGGGGNSGRWTDNIGTGGSGGSSWGGGGGGDDSNRGGGGGGWGSAGGGADNAGGGNGAWGAAAGGSDDPGLGSAKKVVPAQDGGTGWGSEGGGGGGGGGW

SEQ ID NO: 52280 - protein, 242 aa, Zea mays
  Coding DNA Sequence Number=SeqID_10501
  Gene Ontology: Mol. function=heme oxygenase (decyclizing) activity; Biological process=inflorescence development
  Homolog annotation: Hit_ID=Q69XJ4; Match level="QueryCoverage=67%, HitCoverage=72%, E-value=9e-44, Identity=48%"; Hit description =Putative heme oxygenase 1
  Subcellular localization annotation: CTP_CleavageSite=62; ConfidenceScore=5.18e-01
MAPAWLSVPSAALSLLDGQRPREWEWLPLRTACPSGGRRVRVPCRRPRTTGFSVAAQRRLVVAAAAMEMTPAAGEKEADAPFTEEMRAAAMRLHSRDQARDGKKEAPLEPPVAKWQTTVEGYLRFLVDSKLVFQTLEAIVDRAVVPWYAEFRDTGLVVWRDRSRSAGIWNGSGSKVAEKLSLQKELEFYEWEGDLSQLQRNVRSRLNRVASGWSRVEKDRCLGEMEKAFTCSVDLRRHMFPC

SEQ ID NO: 52281 - protein, 59 aa, Zea mays
  Coding DNA Sequence Number=SeqID_10502
MTDDSDAGAGTVAVECGVGVGVAAQRGVPDCEPSSRLEMAMGFRSSILCEEFLYQGTGM

SEQ ID NO: 52282 - protein, 125 aa, Zea mays
  Coding DNA Sequence Number=SeqID_10503
MAALSPLTEARGRQQGLDSPDSCPSARLQRSFDGHDTTRTGCQNLSGCHDGMEPRHRPPTTTARFVAAVAPVPRPVPRQSPTAVDPRFHRTFVVLHAFWSSHSRGLRLFPESLSVRTCLRSDNPG

SEQ ID NO: 52283 - protein, 85 aa, Zea mays
  Coding DNA Sequence Number=SeqID_10504
MGSRERYWSHLLRKVRAYLLAYLQLHIKIIVTNIHPSDKDLLVEQEQSPLQDVSQHHHHHDLSGHELSNSHQHQANVGSSSSTVS

SEQ ID NO: 52284 - protein, 120 aa, Zea mays
  Coding DNA Sequence Number=SeqID_10505
  Pfam annotation: Domain name=DUF594; Domain location=8-61; Score= -1.3; E_value=0.0049; Accession=PF04578.4; Description=Protein of unknown function, DUF594
MELGMIFDLLYTKANQSLTRIKEMWVRLLMYAAGKYGGEPHAEMMLSRLVAARSLVAFADFAEGSVGMGGVVEHGRSLMHCQFVTVVLLWGMVNFTGDSIAGKKFPQLFASSPRHPPSSM

SEQ ID NO: 52285 - protein, 160 aa, Zea mays
  Coding DNA Sequence Number=SeqID_10506
MAQRVFLFVAGLDLASRERLRQGGEILGSRLLRHQWKVAEDLLCPSAPRSLSSALPSTLHPCRKSPAAARDALSPNKFSHKIWQNPSPPLSSSTIGILVANVVLVGEMTSKLLQTSRSIDDRRPPPLWDLLIHKASRPSSTTSCRYARRRRRPNVGFMVA

SEQ ID NO: 52286 - protein, 52 aa, Zea mays
  Coding DNA Sequence Number=SeqID_10507
MEAISNTRLALGILVARQRGPRRREDQLYAELMEPEKHMQIFSCRKMRCQTY

SEQ ID NO: 52287 - protein, 58 aa, Zea mays
  Coding DNA Sequence Number=SeqID_10508
MRRGREGSGSEGIGIGNCCCIRRNKALRRMCFWARDGSNAKIVDFWGYAFTFRVFRGI

SEQ ID NO: 52288 - protein, 126 aa, Zea mays
  Coding DNA Sequence Number=SeqID_10509
MARRHTMATKHTDGDEILSTGEQLGPHQVLTGRIPGFRRSSTSPPRTPDHFTRWGAARKMECTDGGTFLSLTNLGNVDEKTTPTMMWLEERRSWTRSAFISRVHELGDMAQPARNQGEVRAWRSVR

SEQ ID NO: 52289 - protein, 84 aa, Zea mays
  Coding DNA Sequence Number=SeqID_10510
  Subcellular localization annotation: CTP_CleavageSite=49; ConfidenceScore=5.75e-01
MAPSGPALVPFPPSRAARGVPVRPSALVAMARRSGHAVPTSQRPGPCPEAAPPTGRSPTSCSLRRLYPRSPNLGAGDRRSANGT

SEQ ID NO: 52290 - protein, 459 aa, Zea mays
  Coding DNA Sequence Number=SeqID_10511
  Gene Ontology: Mol. function=pepsin A activity; Cellular component =cellulose and pectin-containing cell wall; Biological process =proteolysis
  Homolog annotation: Hit_ID=Q5Z4D1; Match level="QueryCoverage=87%, HitCoverage=81%, E-value=1e-139, Identity=60%"; Hit description =Putative nucleoid DNA-binding protein cnd41
  Pfam annotation: Domain name=Asp; Domain location=119-457; Score= -70.3; E_value=1.8e-09; Accession=PF00026.14; Description=Eukaryotic aspartyl protease
MASLPLLVCFILCTYNSLAHGGNEEEHVLVAVPTSRYSEPAATCSTSRVRWLDEGSNTVSVPLVHRHGPCAPSTRSSDEPSLSERLRRSRARSKYIMSRASKSNVSIPTHLGGSVDSLEYVVTVGLGTPAVSQVLLIDTGSDLSWVQCAPCNSTTCYPQKDPLFDPSRSSTYAPIPCNTDACRDLTRDGYGSDCTSGSGGGAQCGYAITYGDGSQTTGVYSNETLTMAPGVTVKDFHFGCGHDQDGPNDKYDGLLGLGGAPESLVVQTSSVYGGAFSYCLPAANDQAGFLALGAPVNDASGFVFTPMVREQQTFYVVNMTGITVGGEPIDVPPSAFSGGMIIDSGTVVTELQHTAYAALQAAFRKAMAAYPLLPNGELDTCYNFTGHSNVTVPRVALTFSGGATVDLDVPDGILLDNCLAFQEAGPDNQPGILGNVNQRTLEVLYDVGHGRVGFGADAC

SEQ ID NO: 52291 - protein, 85 aa, Zea mays
  Coding DNA Sequence Number=SeqID_10512
MVRLRGDLRQHAEGLLSCLGVRGTSVMGTGRINEGGGEKKRTHPGHDDRKKKGKCLRPIDAIHEDLLDLWVGPTHTFVVPLDLVS

SEQ ID NO: 52292 - protein, 104 aa, Zea mays
  Coding DNA Sequence Number=SeqID_10513
MTRWPSANPGEDLTSGEDTEHARVGRPEEEGRGRTRPTVSIWAGADPGLWPPGPRPGARVQKNFRRARVRVWLDCAEKLQACIYCRAASAGLPSGLCQSALWPR

SEQ ID NO: 52293 - protein, 143 aa, Zea mays
  Coding DNA Sequence Number=SeqID_10514
MAASKGGVELPTTPPHGGKLAGAWPTRDPAPQTHEQPILHHTSDTEKHNRMPLPETVASVLLPTLRCDTMVISLPRRGLQVTLHAIRTRRDHGWVRYPQAMHHVPRLKLRRMRGIDYSGDGALPPDASSTVDAILRWVPDWMA

SEQ ID NO: 52294 - protein, 169 aa, Zea mays
  Coding DNA Sequence Number=SeqID_10515
  Homolog annotation: Hit_ID=Q6QP51; Match level="QueryCoverage=48%, HitCoverage=31%, E-value=7e-13, Identity=79%"; Hit description =Putative growth-regulating factor 1
MMSASKKRRKRAPSPRTDQGFEGYALRGLATAPEHSGSEPFTDQGLEGWPLGRRERFVMESHRREAPSPRTLSNGSGSSKSPAASGETGSSASPDLRPRPREKVSASPDPRPRPQPRPREKVSASPDLGPRPRPRGGVTSSPDLSLGLRRSLRLARTNYATGDTSLPYP

SEQ ID NO: 52295 - protein, 151 aa, Zea mays
  Coding DNA Sequence Number=SeqID_10516
MAAGAASVRGGGVTGDEAGAGFGGSEVAGAGHHRRLGVTPASNPDCGEGESGAPRLEQALVRGEGRLRTKHGLKVGLNRPDTERVRRTDEAMLRRAQIHYGEVESRQTVHGERFLTSGRCLGRLDAASGASTDGMAGALLRRARAAERERG

SEQ ID NO: 52296 - protein, 132 aa, Zea mays
  Coding DNA Sequence Number=SeqID_10517
  Subcellular localization annotation: CTP_CleavageSite=69; ConfidenceScore=5.14e-01
MVLLQNPLPHHDIVSLLNPTLLPPAYANPMSHPPTTQKPLCKEKNALPSLTSSRLATQSSDSFKHATIKATTYKALRDALLPCSHDVLKVVHQNKPLEKSKKPISIPVLRKLVKIVGLCCKATFEIGVVPPF

SEQ ID NO: 52297 - protein, 56 aa, Zea mays
  Coding DNA Sequence Number=SeqID_10518
MAMMGSTSEKMYLCQVPDFGFLNDKAKTGRVRKQQTFAVFALRWCSKKNLNSAAVG

SEQ ID NO: 52298 - protein, 109 aa, Zea mays
  Coding DNA Sequence Number=SeqID_10519
  Homolog annotation: Hit_ID=Q8S7U7; Match level="QueryCoverage=54%, HitCoverage=4%, E-value=1e-08, Identity=53%"; Hit description =Putative pentatricopeptide repeat containing protein
MEEVMCFIFSGILKAMVKKCMMELDHFYGYIKEQIESSATFTNTEEKKVNVHSELKSCSGIGSLVIAKCSQISKRNEDTFDGKYSLQDVLKPGLWLSPETSAGFAGPMG

SEQ ID NO: 52299 - protein, 801 aa, Zea mays
  Coding DNA Sequence Number=SeqID_10520
  Gene Ontology: Mol. function=methyltransferase activity; Cellular component=intracellular; Biological process=metabolic process
  Homolog annotation: Hit_ID=Q69U43; Match level="QueryCoverage=99%, HitCoverage=99%, E-value=0.0, Identity=58%"; Hit description =Putative HEN1
  Pfam annotation: Domain name=Methyltransf_11; Domain location=578 -677; Score=4.4; E_value=0.02; Accession=PF08241.2; Description =Methyltransferase domain
  Pfam annotation: Domain name=Methyltransf_12; Domain location=578 -686; Score=32.0; E_value=2e-06; Accession=PF08242.2; Description =Methyltransferase domain
  Pfam annotation: Domain name=dsrm; Domain location=8-80; Score=15.1; E_value=0.04; Accession=PF00035.15; Description=Double-stranded RNA binding motif
  Pfam module annotation: Pfam domain module=Methyltransf _11::Methyltransf_12::dsrm; Domain location=578-677::578-686::8-80
MPTAVPTPKAVVHQRFGAKARYTVEEVREDVGGCPGLAPQTRNVYRCALDLPGLSVATPGTFLRKKDAEQAAAQIALDKNFLSSTHPLIGHLCVSLRRTGDLIGRLPLSAIAACDVKVNTLCKLIDHRAEFDPLLVLSLLYNAAKQSPGVSVSDSNFWIQSEKPYSPEAVDSALERWSGTTDPVEVEAVLVPHMLEDELKTVRINLRDNEHYMSYVAAELSAIDSSHVLVSRTIGKTSSEIRLYFAAANIHAVSDMSKHALDSLGDGDINWQSDTLTCFCLRILLGKLPDGNCKMSRDSILAAELPSAYSRFSWKGLSPRDLLCSFCRLQRLPEPHFAVSRVSCDTLMSAVSSEERGAPAGSAENQYTNDVRINKEKPDLFKCEVNIRSRKQEVLLEYSAADTWSKESDAIQNSSLKVLIWFNNYFKKLTSKTGKLYLSESTAAMCSAVGPFSMDTQKKHLESTAKLTHIEGPDSGVFPSHGSLTCISYTASLVTKDKAKTYLLESHNEFEFEIGTGAVSNQLESCVTQLSVNQTARFVAELPPRDLIMAASCEFSHDLSNVSSESCFLEFSVKVLQVDFGCGSGSLLDSLLEHPTTLEKLVGVDISRKGLTRAAKSLHQKLSKKSTTQTNVPTAVLYDGSITDYDSRLYGFDIGTCLEVIEHVEEDQATLFGNVVLSSFRPTVLIVSTPNYEYNPILQGSAMPNKDDEADESAGPCKFRNHDHKFEWTRLQFQCWATGLAVKHSYSVEFSGVGGSGEEPGYASQIAVFRRLVQGQEAMCLDEDGDQPYEVLWEWPNACVN

SEQ ID NO: 52300 - protein, 1127 aa, Zea mays
  Coding DNA Sequence Number=SeqID_10521
  Gene Ontology: Mol. function=ubiquitin thiolesterase activity; Cellular component=nucleus; Biological process=ubiquitin-dependent protein catabolic process
  Homolog annotation: Hit_ID=Q7EZJ0; Match level="QueryCoverage=95%, HitCoverage=91%, E-value=0.0, Identity=77%"; Hit description =Putative ubiquitin-specific protease
  Pfam annotation: Domain name=MATH; Domain location=93-213; Score =72.0; E_value=1.9e-18; Accession=PF00917.16; Description=MATH domain
  Pfam annotation: Domain name=UCH; Domain location=228-571; Score =139.2; E_value=1.1e-38; Accession=PF00443.19; Description=Ubiquitin carboxyl-terminal hydrolase
  Pfam module annotation: Pfam domain module=MATH::UCH; Domain location= 93-213::228-571
MPCASRPSGAAGAVALGLWGWFLGWSSGVACRSGRAHRARQQHEEEEVLVPYGPHLELPNGAQPMEVVPAEPAATVENQQIEDPPISRFTWTIENLSRVSTKKLYSEIFVVGGYKWRILIFPRGNNVEFLSMYLDVADSGVLPYGWTRYAQFSLSVVNQIHNKFTIRKETQHQFSARESDWGFTSFMPLGELYNHSRGYLVNDTCIVEAEVAVCKVVDYWSYDSKKETGYVGLKNQGATCYMNSLLQTLYHIPYFRKMQLTTDISCQAVYHMPTTENDMPSGSIPLALQSLFYKLQYNDSSVSTKELTKSFGWDMHDSFMQHDVQELNRVLSEKLEDKMKGTVVEGTIQQLFEGHHMNYIECINVDFKSTRKESFYGNCNSNADLQLDVKGCQDVYASFDKYVEVEQLEGDNKYHADKHGLQDAKKGVLFIDFPPVLQLQLKRFEYDFMRDTMVKHVKVLTIHCEPQINDRYEFPLQLDLDRDDGKYLSPDADRNVRNLYTLHSSFVHFKYLLERKIPRFKFDDERVTKEDAKRALEEQYGGEEELPQTNPGLNNTPFKFTKYSNAYMLVYIRESDKDKIICNVDEKDIAEHLRIRLEKDREEKERRKKEKAEAHLYTIIKVARDDDLKTQIGKDIYFDLVDHDKVPSFRIQKQMAFAQFKEEVAKEFGIPTQFQRFWLWAKRQNHTYRPNRPLCPQDEAHTRVFSCKPKFATPLLGNFDHSSKVFAFANHKLGMLHLFPAWLYMTLKPLPLPDKTREDIFLLFKLYEPEKEQLRYVGRLFVKASGRPQDILPKLKMLAGFSQDDDIELYEEIKFEPNVMCEYIDNRLLFRSCQLEDGDIICFQKSSKADSADRYRFPDVPSFLTYIRNRQVVHFRSLEKPKEDDFFLEMSKIFTYDQVVEKVAEKLGVDDPSKIRLTSHNCYSQQPKPQPIKYRGVERLLDMLIHYNQTSDILYYEVLDIPLPELQALKTLKVTYHHATKDEVSVHSIRLPKNSTVGDVLNDIKTKVELSHPNAELRLLEVFYHKIYKVFAPNEKIENINDQYWTLRAEEVPDEEKNLGPFDRLIHVYHFTKILKTKRKFRTLENLFLWLFVRMRPYLLSKSVYRESLRVPDEDFSKVPDFQMFCS

SEQ ID NO: 52301 - protein, 108 aa, Zea mays
  Coding DNA Sequence Number=SeqID_10522
  Subcellular localization annotation: CTP_CleavageSite=40; ConfidenceScore=5.16e-01
MGGSRLGRVALPWTSPMVFDFSNGSLTSTTAPINFLPGAKGSHLANKRPKIGFNKESKGITEVCPGALRYNSPDCPVYTGQCLVPQGRATLELASFGNLLRYNSPDVS

SEQ ID NO: 52302 - protein, 66 aa, Zea mays
  Coding DNA Sequence Number=SeqID_10523
  Gene Ontology: Mol. function=DNA binding
MGERRTSGYAVRTSKIVEHRGVTSEDFLMKKEAASSMPRSSNHPAPGAAVVRAAQQHTPAQTSRAP

SEQ ID NO: 52303 - protein, 151 aa, Zea mays
  Coding DNA Sequence Number=SeqID_10524
MVETEVRRSARLQEKARGFKDWKKCSCCARVSPPSISHKIIKKLGAEFCKVDPSSLNLDSLNSSETTSNTIQRLSSSTSSRNEEPRLPEEQLEDTNVDDVGSSAPAGKLSMYKHKMSALGGAHVAQILFVTTNFGRVYDSLVIGMKLAMFG

SEQ ID NO: 52304 - protein, 97 aa, Zea mays
  Coding DNA Sequence Number=SeqID_10525
MAASMAVAFTRYLSSPFLLLHPPDLEARRRVEARAHAGGLAQAATALPPMVFFEPSEVTYQTFNDCYVSGCETVLACTFFHTGEYLFTDLIGNSGVS

SEQ ID NO: 52305 - protein, 88 aa, Zea mays
  Coding DNA Sequence Number=SeqID_10526
  Gene Ontology: Mol. function=inositol or phosphatidylinositol phosphatase activity; Biological process=abscisic acid mediated signaling
  Homolog annotation: Hit_ID=Q852L1; Match level="QueryCoverage=69%, HitCoverage=11%, E-value=9e-17, Identity=73%"; Hit description =Putative inositol polyphosphate 5-phosphatase
MEYSMLDIYDYIYKLLDPRFSLGAMLCCKHVFALDKLLLYMLPFDLGVKEGDELRTNSYVLEILRETRFPRVRGAGEVTSPKTILQHE

SEQ ID NO: 52306 - protein, 269 aa, Zea mays
  Coding DNA Sequence Number=SeqID_10527
  Gene Ontology: Cellular component=membrane
  Homolog annotation: Hit_ID=Q00ZR8; Match level="QueryCoverage=40%, HitCoverage=25%, E-value=3e-19, Identity=48%"; Hit description=[S] KOG2318 Uncharacterized conserved protein
  Pfam annotation: Domain name=UPF0016; Domain location=139-202; Score =45.6; E_value=1.7e-10; Accession=PF01169.9; Description =Uncharacterized protein family UPF0016
  Subcellular localization annotation: CTP_CleavageSite=60; ConfidenceScore=5.68e-01
MASAAGAALCPCSFSTVLSSSPSTPFRPARTTPRPSLRPLPRRARLPLRPGHSVLRCLPKCDSGKPDGGGDAGLSGRKAARPAGQGGPRRPAQFGASSCGLAFTTVAGVIMLQASQQALAATQFAGLQPADVLGDLGDAFLLIFFSELGDRTFFIAALLAARSSGAVIFLGTFGALAVMTIISVVLGRAFHYVDGIIPFSFGGTDFPVDDIAAACLLVYYGVTTLLDAASGDDEKINEEQEELNAFSAQWLEALGLAMANAWEFSLAVG

SEQ ID NO: 52307 - protein, 60 aa, Zea mays
  Coding DNA Sequence Number=SeqID_10528
MASCAVAERGAVQGAVWRDERTEWTRTAPRVRYGRGREWASVTGVESGERRNDSRERRFA

SEQ ID NO: 52308 - protein, 52 aa, Zea mays
  Coding DNA Sequence Number=SeqID_10529
MPGPQAAGLAGSDSVVLTQAVRIQRRVTGAAACSPHHTGGRPPRIAAGIASR

SEQ ID NO: 52309 - protein, 342 aa, Zea mays
  Coding DNA Sequence Number=SeqID_10530
  Gene Ontology: Mol. function=cysteine-type endopeptidase activity; Cellular component=endoplasmic reticulum; Biological process =proteolysis
  Homolog annotation: Hit_ID=Q6RCL9; Match level="QueryCoverage=91%, HitCoverage=91%, E-value=3e-68, Identity=41%"; Hit description =Putative cysteine protease 1
  Pfam annotation: Domain name=Inhibitor_I29; Domain location=40-97; Score=81.0; E_value=3.6e-21; Accession=PF08246.2; Description =Cathepsin propeptide inhibitor domain (
  Pfam annotation: Domain name=Peptidase_C1; Domain location=144-341; Score=294.0; E_value=2.9e-85; Accession=PF00112.13; Description =Papain family cysteine protease
  Pfam module annotation: Pfam domain module=Inhibitor_I29::Peptidase _C1; Domain location=40-97::144-341
MAAYQQAPALLCACLMLVLMAGAASGGRVDVEDMLMMDRFRGWQATYNRSYLTAAERLRRFEVYRQNMELIEATNRRAGLSYQLGETPFTDLTSEEFLATHTMSTRLHASEAARRHRELITTHAGPVSDGGRQWNRNYTTDLDVPESVDWRTKGAVTPVKDQGACGSCWSFVTVAAIEGLHKIRTGQLVSLSEQAVLDCSSPPNHGCNRGDPAAAIDWVSANGGLTTESDYPYVGRQGKCKLDKARNHVAKIKGRKLVDQNNEAALEVAVAQQPVAVDMNRIVNHGVTMVGYGVESGGRKYWIAKNSWGNEWGEKGYFRLERRIKDARGTCGIAVWANYPVM

SEQ ID NO: 52310 - protein, 385 aa, Zea mays
  Coding DNA Sequence Number=SeqID_10531
  Gene Ontology: Mol. function=mismatched DNA binding; Cellular component=MutSalpha complex; Biological process=response to DNA damage stimulus
  Homolog annotation: Hit_ID=Q9XGC9; Match level="QueryCoverage=99%, HitCoverage=62%, E-value=1e-147, Identity=99%"; Hit description=DNA mismatch repair protein MSH2
  Pfam annotation: Domain name=MutS_III; Domain location=1-255; Score =85.6; E_value=1.5e-22; Accession=PF05192.9; Description=MutS domain III
  Pfam annotation: Domain name=MutS_IV; Domain location=113-210; Score =88.5; E_value=2e-23; Accession=PF05190.8; Description=MutS family domain IV
  Pfam annotation: Domain name=MutS_V; Domain location=172-306; Score= -164.2; E_value=0.0042; Accession=PF00488.12; Description=MutS domain V
  Pfam annotation: Domain name=Nnf1; Domain location=52-156; Score= -16.8; E_value=0.091; Accession=PF03980.4; Description=Nnf1
  Pfam module annotation: Pfam domain module=MutS_III::MutS_IV::MutS _V::Nnf1; Domain location=1-255::113-210::172-306::52-156
MVQAFVEDPELRQGLRQQLKRISDIDRLTHSLRKKSANLQPVVKLYQSCSRIPYIKGILQQYNGQFSTLIRSKFLEPLEEWMAKNRFGRFSSLVETAIDLAQLENGEYRISPLYSSDLGVLKDELSVVENHINNLHVDTASDLDLSVDKQLKLEKGSLGHVFRMSKKEEQKVRKKLTGSYLIIETRKDGVKFTNSKLKNLSDQYQALFGEYTSCQKKVVGDVVRVSGTFSEVFENFAAVLSELDVLQSFADLATSCPVPYVRPDITASVEPGACDQSFGIHVAEFANFPEAVVALAKSKAAELEDFSTTPTFSDDLKDEVGSKRKRVFSPDDITRGAARARLFLEEFAALPMDEMDGSKILEMATKMKADLQKDAADNPWLQQFF

SEQ ID NO: 52311 - protein, 166 aa, Zea mays
  Coding DNA Sequence Number=SeqID_10532
SELVVEAATLHHGFLDALYHVVMRRNAVYVTFVVIDASAGEQDSRRRFRTHQLSSSPRTHTVHSLCPPSTSTSTSISMHGMGSQRRLLLLLALLLLTLVAGEGDGALSGAGSTATDDGANATDASPPAGAPLDVRARKWWRFPATEGLVTGSERRVPNSSDPLHNR

SEQ ID NO: 52312 - protein, 86 aa, Zea mays
  Coding DNA Sequence Number=SeqID_10533
MHGDGGGGGGGGGAERVDSVRARTGAKLSNRTRRVKAEAKVGKDFLWPKQGRALLAGTQSFAANLFTAMGIKILLNPDLKRLQQQF

SEQ ID NO: 52313 - protein, 174 aa, Zea mays
  Coding DNA Sequence Number=SeqID_10534
MTRNRCSRLLGVPHKQAATPEGAPREHRPAPRSPGLHAEAGTLARRLATARRILVLRSPLLSVETRGGVGRSPSIEVGARRSEATSDSPSMDDADASILEISSRREQTITTAERADDWGAQIQGRRGDSGDSPSMWYIAVHGSPGQTRTDPGQTRLGRADPWTTDGGRRQPDRE

SEQ ID NO: 52314 - protein, 355 aa, Zea mays
  Coding DNA Sequence Number=SeqID_10535
  Gene Ontology: Mol. function=cysteine-type endopeptidase activity; Cellular component=vacuole; Biological process=proteolysis
  Homolog annotation: Hit_ID=Q6RCL9; Match level="QueryCoverage=87%, HitCoverage=85%, E-value=1e-67, Identity=43%"; Hit description =Putative cysteine protease 1
  Pfam annotation: Domain name=Inhibitor_I29; Domain location=40-97; Score=78.2; E_value=2.5e-20; Accession=PF08246.2; Description =Cathepsin propeptide inhibitor domain (
  Pfam annotation: Domain name=Peptidase_C1; Domain location=145-349; Score=343.5; E_value=3.5e-100; Accession=PF00112.13; Description =Papain family cysteine protease
  Pfam module annotation: Pfam domain module=Inhibitor_I29::Peptidase _C1; Domain location=40-97::145-349
MAAYQQAPALLCACLMLVLMAGAASGGRVDVEDMLMMDRFRAWQATYNRSYLTAAERLRRFEVYRQNMELIEATNRRAELSYQLSETPFTDLTSEEFLATHTMSTRLHASEAARRHRELITTHAGPVSDGGRQWNRRNYTTDLDVPESVDWRTKGAVTTVKDQGACGGCWSFATVAAIEGLHKIRTGQLVSLSEQEVLDCSSPPNNGCHGGNPAAAIDWVSANGGLTTESDYPYEGRQGKCKLDKARNHVAKIRGRKLVDQNNEAALEVAVAQQPVAVGMNVHPIQQHYKSGVFHGPCDPEDLNHAVTMVGYGAESGGRKYWIVKNSWGEKWGEKGYFRGFASRGASRTSGAPAV

SEQ ID NO: 52315 - protein, 103 aa, Zea mays
  Coding DNA Sequence Number=SeqID_10536
MGTWAELEAMPGPSRHEQGTAGRAGKHGRGEDTAGREGLSGAAGARRASAEAASRTRRGARRAGLAGGGGGGGSRAGATEHGTGVGRGWASRRAEPAGVDTSG

SEQ ID NO: 52316 - protein, 87 aa, Zea mays
  Coding DNA Sequence Number=SeqID_10537
MSGEHAKREIVTGDKPASSRRTLSRESDQKHKEESSSSNKMHQKGDKKKKKMKKVVYYETDSSSPSMSSSFDSSIASMLHERKKYSA

SEQ ID NO: 52317 - protein, 207 aa, Zea mays
  Coding DNA Sequence Number=SeqID_10538
  Subcellular localization annotation: CTP_CleavageSite=49; ConfidenceScore=5.11e-01
MPGPSRREQGTAGRAGKHGRGKDTAGRGQARGSPKARRPRVAKPGVGPRGVAERGTGRGLAGAAGHGLAGGEAGRPSTGPARGGAGRARPGSGTSGAAGHGRPGPEPGWPRAAGRGAERGSRRGGGRRRGTGGAGAAEPSGRAGEVGAGAELAGAGDECAHGAWRAPTGGKEEGGEREGEGGESLTEGDARDGTEGGDSAGLGEAQR

SEQ ID NO: 52318 - protein, 94 aa, Zea mays
  Coding DNA Sequence Number=SeqID_10539
  Subcellular localization annotation: CTP_CleavageSite=50; ConfidenceScore=5.30e-01
MKLWKETSRSSKTTTSSRRGLAATPSRLPVKAAVIYVSFSHFDLFAFIILCMKVSSRSYGPTVPVQYASYVAREGAFDPCFWERRVVAARPLHT

SEQ ID NO: 52319 - protein, 79 aa, Zea mays
  Coding DNA Sequence Number=SeqID_10540
MVNCPTREEIGHGMAEEVWQHSHVGRLRLLKVLKNTFNHWLLSIAGASAPEHLRCRTLEGQRSYLCHSNTGRQCKEESS

SEQ ID NO: 52320 - protein, 278 aa, Zea mays
  Coding DNA Sequence Number=SeqID_10541
MELPQDVQDNESHLDHLQGIHMYRKEASRTDLLGLRRRLGEGEMGATAGLLVPNPFTLYRSRGCLSTGLAHASVVQMSPLACPCTGVRSLRVGLIWQNHLPPENLARLLQMLRADLAFFPFYRDYPATCRSQTAHRLCGPRIPSQNYLLRCVAARVYYITGGDAGIFVPTSSGPGGQINTEPSSWIDHRARSRALCLKPIVRVRVRSVRGENLGACGSPKWALGVHRSPALKIHLGDSLGSVECVVTSALRKFLPTPLGLSIVIGGSSQAAWRRVLDR

SEQ ID NO: 52321 - protein, 465 aa, Zea mays
  Coding DNA Sequence Number=SeqID_10542
  Gene Ontology: Mol. function=protein serine/threonine kinase activity; Cellular component=integral to membrane; Biological process=multicellular organismal development
  Homolog annotation: Hit_ID=Q53PD8; Match level="QueryCoverage=93%, HitCoverage=59%, E-value=5e-93, Identity=36%"; Hit description =Expressed protein
  Pfam annotation: Domain name=LRRNT_2; Domain location=35-75; Score =46.2; E_value=1.1e-10; Accession=PF08263.3; Description=Leucine rich repeat N-terminal domain
  Pfam annotation: Domain name=LRR_1; Domain location=105-126; Score =14.9; E_value=0.3; Accession=PF00560.23; Description=Leucine Rich Repeat
  Pfam annotation: Domain name=LRR_1; Domain location=128-150; Score =11.6; E_value=1.9; Accession=PF00560.23; Description=Leucine Rich Repeat
  Pfam annotation: Domain name=LRR_1; Domain location=152-174; Score =16.7; E_value=0.086; Accession=PF00560.23; Description=Leucine Rich Repeat
  Pfam annotation: Domain name=LRR_1; Domain location=176-198; Score =8.8; E_value=6.5; Accession=PF00560.23; Description=Leucine Rich Repeat
  Pfam annotation: Domain name=LRR_1; Domain location=200-222; Score =8.3; E_value=7.9; Accession=PF00560.23; Description=Leucine Rich Repeat
  Pfam annotation: Domain name=LRR_1; Domain location=224-246; Score =14.6; E_value=0.35; Accession=PF00560.23; Description=Leucine Rich Repeat
  Pfam annotation: Domain name=LRR_1; Domain location=248-270; Score =8.0; E_value=9.2; Accession=PF00560.23; Description=Leucine Rich Repeat
  Pfam annotation: Domain name=LRR_1; Domain location=273-295; Score =12.3; E_value=1.4; Accession=PF00560.23; Description=Leucine Rich Repeat
  Pfam annotation: Domain name=LRR_1; Domain location=297-319; Score =20.7; E_value=0.0051; Accession=PF00560.23; Description=Leucine Rich Repeat
  Pfam annotation: Domain name=LRR_1; Domain location=321-343; Score =5.1; E_value=32; Accession=PF00560.23; Description=Leucine Rich Repeat
  Pfam annotation: Domain name=LRR_1; Domain location=351-373; Score =10.5; E_value=3.1; Accession=PF00560.23; Description=Leucine Rich Repeat
  Pfam annotation: Domain name=LRR_1; Domain location=376-398; Score =10.3; E_value=3.4; Accession=PF00560.23; Description=Leucine Rich Repeat
  Pfam annotation: Domain name=LRR_1; Domain location=400-422; Score =12.9; E_value=1.1; Accession=PF00560.23; Description=Leucine Rich Repeat
  Pfam annotation: Domain name=LRR_1; Domain location=424-446; Score =13.8; E_value=0.62; Accession=PF00560.23; Description=Leucine Rich Repeat
  Pfam annotation: Domain name=LRR_1; Domain location=81-103; Score =10.0; E_value=3.8; Accession=PF00560.23; Description=Leucine Rich Repeat
  Pfam module annotation: Pfam domain module=LRRNT_2::LRR_1::LRR_1::LRR_ 1::LRR_1::LRR_1::LRR_1::LRR_1::LRR_1::LRR_1::LRR_1::LRR_1::LRR_1: LRR_ 1::LRR_1::LRR_1; Domain
  Pfam module annotation: Domain location=200-222::224-246::248 -270::273-295::297-319::321-343::351-373::376-398::400-422::424 -446::81-103
MSHWKQPSKLAMLVVLLLLLCHAVDKVHCSTHHNNSQDFHSLLEFHKGITSDPNEALSNWNPSIHFCHWHGVNCSFTRPYRVTELNLTGQNLAGQISSSLGNLTFLHTLDLSYNSFSGPLPLLNKLRNLDVLFLGSNHLGDVIPDWLTNSSNLVDLDLSENNLTGHIPSNIGFLTKLEGIALYNNNLTGVIPPTLGNISTLEVVDFSANQLSGSIPNKVWQISNITMLNLGQNNLSGGIPDTLSNFSSLTALGLNNNKLGSALPSNIGDVFRHLNELYLDNNIFVGTIPTSLGNPSSLEALDLSNNHFSGKIPSSFGRLSKLQILNLELNMLEARDSEGWQFFDALANCSSLNILSVSQNLLHGPIPNSISNLSTTLQYLMMASNNLSGTVPPTIGKFSGLIKLSLANNNLTGTIEEWVGNMTKLQILGLQSNNFAGEIPPSIGNLTQLIHFSIARNNFFGSVPI

SEQ ID NO: 52322 - protein, 93 aa, Zea mays
  Coding DNA Sequence Number=SeqID_10543
MGYTTCGYRVQPLQSVKLEGKIIKQQQREMNPPNPPPVGIDQLVVAQMLVIQLMSDMVTEMQNQKRQEHEEIRQDRLEIRREIRQAQSKRQQQ

SEQ ID NO: 52323 - protein, 103 aa, Zea mays
  Coding DNA Sequence Number=SeqID_10544
MAEKSGDVRKCARARFTASVEGAELTGQAYGAEREERGTRGNGSTTSDPGPRDRERGSTRVKETGADRSAPLGSERGREGARKGELPLTGGVHLSDDVGAWPG

SEQ ID NO: 52324 - protein, 90 aa, Zea mays
  Coding DNA Sequence Number=SeqID_10545
MVSSALRYCLPCCASLHHAFPPHPLWPLPAPSVDHSNLNEELTLLNQADVDMPIWFDYFYAGDGEIVDEFEERLFWNKSTDKGSLYEKLD

SEQ ID NO: 52325 - protein, 104 aa, Zea mays
  Coding DNA Sequence Number=SeqID_10546
  Subcellular localization annotation: CTP_CleavageSite=67; ConfidenceScore=5.01e-01
MALPWSTRTRLLAQGGRRRHGSPRSTNERLRLMHSYRSASAIGSESVGPGFIKSGTQIDNPTAVGVPVSSDSNRHHSRSPKNTKVDTAPKMYVLHNLRLKIIIS

SEQ ID NO: 52326 - protein, 368 aa, Zea mays
  Coding DNA Sequence Number=SeqID_10547
  Gene Ontology: Mol. function=geranylgeranyl reductase activity; Biological process=chlorophyll biosynthetic process
  Homolog annotation: Hit_ID=Q5NB98; Match level="QueryCoverage=71%, HitCoverage=62%, E-value=5e-89, Identity=63%"; Hit description =Putative geranylgeranyl hydrogenase
MGYMDPECMVTGRANAESDVYSFGVVLLEIACGRRPLVPRHGVGMVRPAGAKPYGGAIPLCMLDEFTIPRDLIDRRITRMRVLSPSNLAADFSRALPLGRTSPCSTARCSTPSSAAAPSRPGPSSSRASSPRSRSPWGPADPNLVHYISSSPEGVRAGWSVLEVDAIVGANGANSRVAREERIRLPDAGIAYYDDLAEMYVGGDVSPDFYGWVFPKCDHVAVGTSTVAAKPEIKHLQSGIRARVSPKIAGGRVVKVEAQPIPEHPRRVVGRVALVGDAAGYVTRCSGEGIYFAAKSVREWYGRGAILDAADARLNGELDAREVETVAARVRACESLAYASKSSKPHLRTSIMANFSLQRISSSRFRKD

SEQ ID NO: 52327 - protein, 149 aa, Zea mays
  Coding DNA Sequence Number=SeqID_10548
  Gene Ontology: Mol. function=DNA binding; Cellular component=nucleus
MAPAEERGPRFSPPPPWPLISPAHASGWRVPPPCWTTDETLALARAYTARRLAVGWEHLTSADWAAVAAAAPSKTDRQCRHKVEKLCRCLRSNRRRPCPLLDAIDLLDVPSPPFFSKSQSRSTSRSSSPPLQAAVVGCVVSPFPSRILA

SEQ ID NO: 52328 - protein, 92 aa, Zea mays
  Coding DNA Sequence Number=SeqID_10549
MGRATHPSGSCYYERVSSRSHSSGRDTQWWCRGTSSGAQESSASQTLPPPEARKKSPAAPAPVTDAPAPRVSDPTVSIALIPFMMRHDARSS

SEQ ID NO: 52329 - protein, 102 aa, Zea mays
  Coding DNA Sequence Number=SeqID_10550
MDWIGSVNLALALFPYLSAAPGCACQHPRVVATATEFLEDFLEDFLDRVALILCSLKRHSQQWAGTRTHLGDVARGSCAKVPGGRGAVDPWAGFTLCAACLG

SEQ ID NO: 52330 - protein, 242 aa, Zea mays
  Coding DNA Sequence Number=SeqID_10551
  Gene Ontology: Cellular component=intracellular
  Homolog annotation: Hit_ID=Q10ML5; Match level="QueryCoverage=72%, HitCoverage=11%, E-value=5e-08, Identity=31%"; Hit description=BRCA1 C Terminus domain containing protein, expressed
  Subcellular localization annotation: CTP_CleavageSite=66; ConfidenceScore=5.12e-01
MEAQMCNPVAIATSKSSLQSTSQLFSEALSDKLKRQSMKLRQCHQIRVLTRQFPPGNGEEKHKRLSSSANADDPETCTSNKVPNNRVRTVVAKRKLSDVQSHKSGSEPCKTAKVLVSEVKVVSPARVAQSSRNANKVTVDQDLQNTNTGRTNDTVGSFCKDVMEDCSKDMQSSKTRSSRRQKIADLVDGSTDHDKENILVDSNFTSNTKRGNNRNSAHVQKQKQLNLVDRTQDDPVGGWTRR

SEQ ID NO: 52331 - protein, 477 aa, Zea mays
  Coding DNA Sequence Number=SeqID_10552
  Gene Ontology: Mol. function=phospholipid binding; Cellular component= coated pit; Biological process=endocytosis
  Homolog annotation: Hit_ID=Q5N9P9; Match level="QueryCoverage=99%, HitCoverage=100%, E-value=1e-149, Identity=73%"; Hit description =Clathrin assembly protein AP180 short form-like
  Pfam annotation: Domain name=ANTH; Domain location=29-221; Score =171.9; E_value=1.6e-48; Accession=PF07651.6; Description=ANTH domain
MAALQSWRKAYGALKDTTTVSLANLNSDFKDLDVAIVRATNHVESPPKERHLRKIVAATSIARPQADVTYCIHALARRLAKTRNWIGHSRTTELNSQDLLEQLPALQQLLYRLIGCRAEGAAKNNYLVQYALAQVLKESFKIYCAINDGIINLIDKFFEMPKHEALKALDVYKRAVHQAGNLSDFYESCQGLELARNFQFPTLREPPQTFLSTMEEYVKEAPRMMPVVEPLVISWALELPERLLLTYKPEEEVHDTVPIVAEKLQVVEEIAPVPSSQIALPPKPEIADTGDLLGLGDSTPTVLAIEESSALALAILPTGIDNSTTTTQQDSGFDPTGWELALVTTSSNATPLSMESNLGGGFDKLTLDSLYDDGTYRQMQQQQLYGSAPPNPFMASDPFAVSNQVAPPPSVQMAAMAPQPQHLPMMIEPNPFGPPQQHHAGVAPAANPFLDAGFGAFPAVNGMHPQTNPFGGAAQLL

SEQ ID NO: 52332 - protein, 149 aa, Zea mays
  Coding DNA Sequence Number=SeqID_10553
  Homolog annotation: Hit_ID=Q69QR7; Match level="QueryCoverage=30%, HitCoverage=7%, E-value=5e-10, Identity=60%"; Hit description =Putative phosphatidylinositol transfer-like protein II|
MQMWWEMMRWRKEFGADTVLEDFEFDELDDVLQYYPQGYHGIDREGVREFLKDCKGDCPIHRYNCNGTDVLNLHTHMCFIMVKATKIFSKGGAIGKEAGSGDLSNRESALASLLSPPSVGDGLHLRDERYRACRTGRCRNKDEQGGGVK

SEQ ID NO: 52333 - protein, 51 aa, Zea mays
  Coding DNA Sequence Number=SeqID_10554
MESRWQTMHRRMMYNIAFCSFSILARSQAFFNVLLLPAYIRLASFCVLQGF

SEQ ID NO: 52334 - protein, 112 aa, Zea mays
  Coding DNA Sequence Number=SeqID_10555
MTFLSLHIKSSRMNRKFMAVVSQANKASKNLFGGHPSNIAHREALLLCRRLGENHWKEHMMKMAEMVEMAKSYNMMVEMGENSGTRMEVVEMRESSSTQVDRWWRWGRATIL

SEQ ID NO: 52335 - protein, 554 aa, Zea mays
  Coding DNA Sequence Number=SeqID_10556
  Homolog annotation: Hit_ID=Q6D4C6; Match level="QueryCoverage=28%, HitCoverage=67%, E-value=8e-47, Identity=53%"; Hit description =Putative exported protein
  Pfam annotation: Domain name=Autoind_bind; Domain location=173-319; Score=49.0; E_value=1.6e-11; Accession=PF03472.6; Description =Autoinducer binding domain
  Pfam annotation: Domain name=Autoind_synth; Domain location=358-526; Score=-86.0; E_value=0.013; Accession=PF00765.8; Description =Autoinducer synthetase
  Pfam annotation: Domain name=Extensin-like_C; Domain location=114 -199; Score=21.1; E_value=2.7e-07; Accession=PF06904.3; Description =Extensin-like protein C-terminus
  Pfam module annotation: Pfam domain module=Autoind_bind::Autoind _synth::Extensin-like_C; Domain location=173-319::358-526::114-199
MNSLTRRAGRHKIEEVTPKPHLPPQFNPFTPLAVTDPPGWMTRIKMKRLAGDPDACLAVMRRAQQAGWVTFSERPAVTGNCPLSDPLRIQRFGPVSLSSSFLASCPMAVASTMYALRSRQQTARDMQSPLVRITHVGSYACRNIYHRAQGRLSEHATADAWDVTGFQLADGQRLEAVRMINSKKPPGGRRKIEGGQEPRHPVPFTRPRIHLYSTYPTLWVKRYEKQNYYAVDPVLSLCQRPGRGMAWTEAQFADAGNLWRESREYGLQSGFSCSAMAPNRVIGILSISSQQPISVQLCHAELEVKLHLLAELSLDTLERFSDDAMMLSTLRRNFARLAQKIIATWGCQRRMMKIVQTQLKDMPSSLLAELGSYRYSVFARGEGWSIPPRLSTPGQEYDRFDRSDVTWLIAWNARAGICGCARLMPWFEPEQSEGIVLPFSHEKVWEMSRFSARLDVDAELPLNILWHAVQLAELHGMEYIISSATPMLEKMFEQHQVVYEPLTPGLILSEDNLFAIRIPVTQPALAEKYRGTRRFSPEEVLPTLGVSVNWQSHN

SEQ ID NO: 52336 - protein, 511 aa, Zea mays
  Coding DNA Sequence Number=SeqID_10557
  Gene Ontology: Mol. function=hydrolase activity
  Homolog annotation: Hit_ID=UPI00003CC7C3; Match level="QueryCoverage =55%, HitCoverage=84%, E-value=1e-77, Identity=51%"; Hit description =COG1988: Predicted membrane-bound metal-dependent hydrolases
  Pfam annotation: Domain name=DUF457; Domain location=220-308; Score =44.4; E_value=3.9e-10; Accession=PF04307.5; Description=Predicted membrane-bound metal-dependent hydrolase (DUF457)
  Pfam annotation: Domain name=TetR_C_3; Domain location=53-195; Score =301.8; E_value=1.3e-87; Accession=PF08362.2; Description=YcdC-like protein, C-terminal region
  Pfam annotation: Domain name=TetR_N; Domain location=6-52; Score =42.0; E_value=2e-09; Accession=PF00440.13; Description=Bacterial regulatory proteins, tetR fam
  Pfam module annotation: Pfam domain module=DUF457::TetR_C_3::TetR_N; Domain location=220-308::53-195::6-52
MGERCFTRGTASCLIPFGIHGTSLDKVAELADVSKTNLLYYFPSKEALYVAVLKQILDVWLAPLRALAHDQDPLMAIRRYIRLKLEVSRDHPQASRLFCLEMLQGAPLLKGELAGDLKQLVDDKAAIIERWIDEGRLAGVQPQHLIFMLWATTQHYADFATQVEAVTGQTLSDAAFFEQTVENVQRMIIEGIRWVLGASVSVAVMGRRVPIWQAALVGGVCGTLPDLDVFIDHGDAIRNMTLHRTESHALLWLTLISPLVAWLVAGLCRQRVAWRAWWPAIWLALITHPLLDLMTVYGTQLGLPLTDFPYAIGSIYIIDPLYTLPLLVGLAVALWRGGERGLRGNRLGLTLSSLYLVWSVVIQGVAGWQIRQSLTGQGIPTDKVLVTPTAFNTLVWRSVILTGDRYGEAYWSLLSPSRPLQVTWYPRHPELYKGFRGSWYAERVAWFSHGFYALREQDGQTTIADLRMGEGENYTFTFGLGTPQQPDPRPQRLPSERPSLSASFSALGERL

SEQ ID NO: 52337 - protein, 152 aa, Zea mays
  Coding DNA Sequence Number=SeqID_10558
  Gene Ontology: Mol. function=4-hydroxyphenylacetate 3-monooxygenase activity; Cellular component=intracellular; Biological process =electron transport
  Homolog annotation: Hit_ID=Q1RDL0; Match level="QueryCoverage=97%, HitCoverage=78%, E-value=2e-57, Identity=72%"; Hit description=4 -hydroxyphenylacetate 3-monooxygenase small chain
  Pfam annotation: Domain name=Flavin_Reduct; Domain location=1-148; Score=204.9; E_value=1.8e-58; Accession=PF01613.8; Description =Flavin reductase like domain
  Subcellular localization annotation: CTP_CleavageSite=39; ConfidenceScore=5.15e-01
MSRLGAAVNIITTEGPAGRAGFTASAVCSVTDAPPTLLVCLNRSASVYPVFRENMQLCVNTLAAGHEALSTLFGGKTPMAERFVAAEWSTAVTGSPVLSGAVASFDCRITQIVSVGTHDTLFCEVLAVVRNDDSHGLAWFDRGYHPLMRQEA

SEQ ID NO: 52338 - protein, 232 aa, Zea mays
  Coding DNA Sequence Number=SeqID_10559
  Gene Ontology: Cellular component=membrane
  Homolog annotation: Hit_ID=Q87ZF9; Match level="QueryCoverage=96%, HitCoverage=72%, E-value=2e-65, Identity=57%"; Hit description =Membrane protein, putative
  Pfam annotation: Domain name=DUF6; Domain location=1-109; Score=50.4; E_value=6.1e-12; Accession=PF00892.11; Description=Integral membrane protein DUF6
MQHSGPFFFVGLRFATAALLLALFFRRYLKGITWLEVKAGTLIGLSIAGGYGLQTWGMQTISSSQSAFLTALYVPVVPLLQWLFLRRPPGIMSWLGIVLAFTGLLLVAGPQDGRISLNAGEIATLFSTLAIAAEIILISRFASRVDVRRVTLIQLAVASLCAFALMIPNGETVPVISMPLLFSALGLGAASALIQVTMNWAQRSVSPTRATVIYAGEPVWAGVVGRIAVNCG

SEQ ID NO: 52339 - protein, 303 aa, Zea mays
  Coding DNA Sequence Number=SeqID_10560
  Homolog annotation: Hit_ID=O33921; Match level="QueryCoverage=44%, HitCoverage=32%, E-value=3e-44, Identity=62%"; Hit description =Glucose-1-phosphatase precursor
LAALPVGTVALAAEGDMSPDISREVAAPLVDYIRSQLVDQDKASAPAITLMVGHDSNIASLLSALQVKPYELPDTWEKTPIGGQVVFERWHDAKNDKDLLKVEYVYQSADQLRNADVLSLKNPPKRVTLQLAGCPTDANGYCSWDQFSQALNAALQGTPMQPAAAPQPAAATPSDDDSAKAAATQDAAADKAEADKATADKAQSDADKAAADKAAADKAAAEKARAEKAAADKAAAEKAKADKAAADKAAAEKAKAENAAAAKADNAAAKSAGDNATADKADSATPSASAQNDKTKSAAEATP

SEQ ID NO: 52340 - protein, 545 aa, Zea mays
  Coding DNA Sequence Number=SeqID_10561
  Gene Ontology: Mol. function=succinate-semialdehyde dehydrogenase [NAD(P)+] activity; Cellular component=mitochondrion; Biological process=metabolic process
  Homolog annotation: Hit_ID=Q8ZJZ3; Match level="QueryCoverage=75%, HitCoverage=99%, E-value=1e-149, Identity=59%"; Hit description =Putative NAD-dependent aldehyde dehydrogenase
  Pfam annotation: Domain name=Aldedh; Domain location=123-541; Score =398.3; E_value=1.1e-116; Accession=PF00171.12; Description=Aldehyde dehydrogenase family
  Pfam annotation: Domain name=Flavodoxin_1; Domain location=1-94; Score=-1.0; E_value=0.022; Accession=PF00258.15; Description =Flavodoxin
  Pfam module annotation: Pfam domain module=Aldedh::Flavodoxin_1; Domain location=123-541::1-94
MEASRFAEVGGKTDQLAAEATPDVLPQYDAIIVGTPTRFGNMSGQMRTFWDRTGGLWASGALFGKVASVFTSTGTGGGQEQTITSVWTTLAHHGMVIVPIGYGTKELFDISQGRDLPALIFSLTKENAMSSYQSINPANNQLLKSWPSHDDAAVSHALKVADQLFHSSWSKGDIQPRLQIARYYAENAERILQPHTYPSELGEAWVEYHPIGVLVAVEPWNFPYYQLMRVLAPNLALGNPVLAKHANIVPHCADVFEKLVREAGAPEGAWTNLFISTEQVADLIADDRVQGVALTGSERAGSAVAEQAGKHLKKSTLELGGNDVFVVLDDADLDEAVRQGVQARLSNCGQVCTAAKRFILHEKIADRFISQFSAALSAATLGDPLDEKTTLGPLSSADARDRLVKQVDEAVASGAKLLTGGKAVDGVGCYYQPTILTGITPDNPAYYQEFFGPVAQVYVVADDQAAVALANDSHYGLGGSVWTRDIARGRRLASAIETGMVFINSQSDTSAELPFGGVKRSGYGRELSDLGIKEFANQKLVVVAG

SEQ ID NO: 52341 - protein, 871 aa, Zea mays
  Coding DNA Sequence Number=SeqID_10562
  Gene Ontology: Mol. function=structural constituent of ribosome; Cellular component=integral to membrane; Biological process =translation
  Homolog annotation: Hit_ID=Q6D462; Match level="QueryCoverage=52%, HitCoverage=97%, E-value=1e-140, Identity=54%"; Hit description =Paraquat-inducible protein B
  Pfam annotation: Domain name=MCE; Domain location=439-531; Score =87.4; E_value=4.4e-23; Accession=PF02470.10; Description=mce related protein
  Pfam annotation: Domain name=MCE; Domain location=554-714; Score =27.0; E_value=6.9e-05; Accession=PF02470.10; Description=mce related protein
  Pfam annotation: Domain name=PqiA; Domain location=255-440; Score =208.2; E_value=1.9e-59; Accession=PF04403.3; Description=Paraquat -inducible protein A
  Pfam annotation: Domain name=PqiA; Domain location=56-246; Score =198.2; E_value=2e-56; Accession=PF04403.3; Description=Paraquat -inducible protein A
  Pfam module annotation: Pfam domain module=MCE::MCE::PqiA::PqiA; Domain location=439-531::554-714::255-440::56-246
  Subcellular localization annotation: CTP_CleavageSite=47; ConfidenceScore=5.33e-01
MHNSSVQPTGSIRPQPQPERQPAPQSPPQRRARRSPHDQTQPVLDNLAQAEQELETAFARWEELESLKNGARASCPRCHTALTANWHEPRKRPTGYALAALFMLVLANLFPFVSMKVAGLTSQITLMQIPRVMVSEDYSSLATLFLLFVQAVPAFCMITILLLVNPIPLPTPLRVGLARILFHLRNWGMSEIFMAGVLVSFVKLMAYGEIGLETSFWPWVLFCLLQLRAFQCVDRRALWDRLSPRPALPHAPEVGVSGLAQGLRSCPCCTAILPADEPACPRCGVQAQARRKHSLQWTLALLLTSVLLYIPANLMPIMVTETLGSAYPSNIMAGVIVLWADGSYPVALVIFIASIMVPTLKMLAIGWLCWDASGRGRRDSHKMHKIYEVVEFVGRWSMIDVFVIAVLSALIKRWSPVWIVPIVTLLIGGWILFYHFSHQGPEVTLITENAEGIVAGKTTIKSRSVDVGVVESAVLSDDLHHVEIKARLNAGMDKLLHSDSVFWVVKPQVGREGISGLGTLLSGAYIELQPGTKNQAPEQYKLLDAPPLAPPDAKGIRIILDSKKAGQLNPGDPVLFRGYRVGTVETSSFDTDKRMMTYQLFIAAPYDRLVTTNVRFWKDSGIAVDMSASGMRVEMGSLTTLFSGGVSFDVPDGWDLGEAATNHADYHLFDDQRSIQDSLYTNHVDYDGKKRGLRATLKTGNLLSGALYVDLDFYDNAPAYKGPQKVSGYEVIPTVSGGLSQIQQKLMAALDKINSLPLNGMVNEATGTLKESQKTMRDLQRTIDNINKVTASPAMKTLPEDLQQTLRELNRSMKGLQPGSPAYSKLVGDMQRLDQVLRELQPVLRTLNTKSNALVFEAKPGQDPQPKRAKQ

SEQ ID NO: 52342 - protein, 723 aa, Zea mays
  Coding DNA Sequence Number=SeqID_10563
  Gene Ontology: Mol. function=nucleotide binding; Cellular component =membrane; Biological process=polysaccharide biosynthetic process
  Homolog annotation: Hit_ID=Q13QA6; Match level="QueryCoverage=50%, HitCoverage=81%, E-value=8e-51, Identity=33%"; Hit description =Putative Lipopolysaccharide (O-antigen)exporter, PST family, MOP superfamily
  Pfam annotation: Domain name=C4dic_mal_tran; Domain location=326-544; Score=-85.9; E_value=0.047; Accession=PF03595.8; Description=C4 -dicarboxylate transportermalic acid transport protein
  Pfam annotation: Domain name=Glycos_transf_2; Domain location=133 -308; Score=127.8; E_value=3e-35; Accession=PF00535.16; Description =Glycosyl transferase
  Pfam annotation: Domain name=MFS_1; Domain location=340-684; Score= -51.1; E_value=0.069; Accession=PF07690.6; Description=Major Facilitator Superfamily
  Pfam annotation: Domain name=MVIN; Domain location=340-710; Score= -198.9; E_value=0.0066; Accession=PF03023.5; Description=MviN-like protein
  Pfam annotation: Domain name=MatE; Domain location=514-669; Score =7.6; E_value=0.00073; Accession=PF01554.9; Description=MatE
  Pfam annotation: Domain name=Polysacc_synt; Domain location=315-570; Score=83.3; E_value=7.6e-22; Accession=PF01943.8; Description =Polysaccharide biosynthesis protein
  Pfam module annotation: Pfam domain module=C4dic_mal_tran::Glycos _transf_2::MFS_1::MVIN::MatE::Polysacc_synt; Domain location=326 -544::133-308::340-684::340-710::514-669::315-570
MTQQPQIKYRHDYRAPDYTITDIDLTFELDASTTRVTAISQVKRLGDSQAELRLDGEALTLIALEINGQPWTAFRLNMHALPERPVIQAVGHNEPPDDPAEARSSPSAGKLSGRETVGCLPARELPMSDILLSVIIPTYNVEKYIVECVDSLLRQVKSPNEILIVNDGSTDGTLALLEQNYAHLSQVKIITTENGGAGRARDVGIEQARGQFLFFCDPDDVVVDGLVAELATVAEQHPETDLFCFNSCVFRDGQIDVTSPKVRHEIFGQQKSQEVFLHLLRNGRYTSAAWSYIVSKRIVEQHKLRFVGRVHEDHNFTLSVFVKSQQAWVSRQMGTLALAIACVLYCSTISDWGFNVFTTKDIAHHRDDKERVSQLFWSTFNAKLMLLLLTSGTLLTATWFNPAWHSLFFIVLANCTTLVGSLFSFGWLMQGFEKLGKTAVIATFGNFCAIPLTFLLVKSPQDTWLAALIPGVVSMISAAITLKFVLEMKVIGHYRFEPREIKQRITDSMDVFIAIAGANLFNSVNVVILATFTSTYMVGIYNGADRLRKAANSVPEQIGSAFFPRVSHLFGRDKRAAIAATRKSLLLSFSLSLSIVIFTWFFADLVVSILLGKDFIPSADVLRVFVLCFLFGNIAYPAGLQILIPHGLARQRMWVMMAAGVINVPLCCFLAWKFGAIGAAWSMVGAEAFVCLGIFGIMHRHGILREYLFPSQVENRPVNDSAA

SEQ ID NO: 52343 - protein, 549 aa, Zea mays
  Coding DNA Sequence Number=SeqID_10564
  Gene Ontology: Mol. function=transferase activity; Cellular component= integral to membrane; Biological process=lipopolysaccharide core region biosynthetic process
  Homolog annotation: Hit_ID=Q6CYK8; Match level="QueryCoverage=97%, HitCoverage=94%, E-value=0.0, Identity=66%"; Hit description =Putative glycosyl transferase
MASVLARLAPFNLPIIVVDDGSDAATQLQLATLHAPHLSLLRLDTNQGKGAAVIHGLRAAAARGFTHAVQLDADGQHQAEDLPLMLAEAARYPDALISGQPLYDDSIPKSRLYGRYITHFWVWIETLSLSIRDSMCGFRVYPLAATLALCDRRPVGQRMDFDTEIMVRLYWQGTRSRFIPTRVTYPVSGLSHFDALYDNLRISWMHTRLFFGMLPRIPRLLAMRRPQTHWSVETERRGQWGLRFMLAVYRYGGRLPFTLLLWPVVAVYWLSGQRARSASRQWLAQVSHAAQQRQIALPARLNSYRHFLRFGGAMLDKVASWRGDLRWGRDIDFAPGAEAVIRTPAPQGKLILASHLGDIEACRAMAQQVSGLVINALVFTDNARRFRAVLETIAPQAGVNLMPVSDIGPETAILLQQKLDAGEWVAIVGDRTAVNPQRGGERRVIWSDFLGRPAPFPQGPFVLAAALRCPVLLMFALQQQGKLRIHCERFADPLLLPRAQRQQALQAAVDRYAARLAHYALLAPLDWFNFFDFWTLPDPQAHHKESDHD

SEQ ID NO: 52344 - protein, 205 aa, Zea mays
  Coding DNA Sequence Number=SeqID_10565
  Gene Ontology: Mol. function=protein prenyltransferase activity; Biological process=protein amino acid prenylation
  Homolog annotation: Hit_ID=Q8X6N8; Match level="QueryCoverage=97%, HitCoverage=82%, E-value=4e-58, Identity=58%"; Hit description=No significant matches
MAKPQFLPMMTARRLSGGSRAAVECGLALLARQRVDAIVFTSRHGELERNLRILTTLADQQMMSPTDFAMSVHNSAVGSLTIAAKAPLVSTSIAAGIDSFQQGLIEVSALHQAGYQQVLLVDFDGCVPDYYQHWLPEQGMNVPYAVALLLGKGEALRCSGRPEPAQTHAPLWPQSLRFLQQWLAASPAFSLPGERLTWHWEREHG

SEQ ID NO: 52345 - protein, 1221 aa, Zea mays
  Coding DNA Sequence Number=SeqID_10566
  Homolog annotation: Hit_ID=Q4KDN6; Match level="QueryCoverage=38%, HitCoverage=85%, E-value=1e-156, Identity=59%"; Hit description =Transporter, putative
  Pfam annotation: Domain name=HlyD; Domain location=492-782; Score =124.8; E_value=2.5e-34; Accession=PF00529.10; Description=HlyD family secretion protein
  Pfam annotation: Domain name=MFS_1; Domain location=11-415; Score =32.0; E_value=2e-06; Accession=PF07690.6; Description=Major Facilitator Superfamily
  Pfam annotation: Domain name=OEP; Domain location=1026-1212; Score =119.9; E_value=7.2e-33; Accession=PF02321.8; Description=Outer membrane efflux protein
  Pfam annotation: Domain name=OEP; Domain location=818-1005; Score =113.0; E_value=8.7e-31; Accession=PF02321.8; Description=Outer membrane efflux protein
  Pfam module annotation: Pfam domain module=HlyD::MFS_1::OEP::OEP; Domain location=492-782::11-415::1026-1212::818-1005
MPKRLAFGLIGLLISLTGALSNALVTANLVNLQGTFGAWSNEIAWLPAVYVMGNISINLLLVKFRQQFGLRVFTEAFLVLYVLVAFFHLFANDLSSAIIVRTAHGMVAAALSSLGIYYQVQAWPAKHRLKALVIGLTVSQLAIPLARLFSSELLQLNEWRGLYLFELGLAMIALGGVLMVKLPPGDRIKTFEKMDFVTFILLAPGMALLCGVLSLGRIEWWFTTPWLGICTAIALTLIVAAMVIEHNRRNPLINTRWLSSGNMVRLGIVMIMIRIVLAEQNTGAVGFLQQLGLQNDQMRGLALAIIAGVIVGIAASALTIKPTHLNWPIVASLVVMIIASLMDSQSSPLTRGPEMYFSQFLLGFSSAFFMAPAMLMGIGSVVTQPKNLVSFVVLFGMSQNLGGLIGSAILGTFQVWREKYHSSLLGDQLSLLDPNVTERLSQYNALFNPLVGDSVLRGAQSTSQLQTVATLQANVLAYNDTYLLTAALALATLIAVQSTENAYVRGQVTFISPQPVKKGQLLMTIDDRIYRQRVHQAQAQLAMKQAALNNNLQQRRSAEATIQSNKAALENAKAQALKSGFDLKRVENLAADGSLSVRERDAARAASAQAQAQVRQAAAQIAVAQQNLQTVIVNRDALKGDVASARAALELAEIDLANTRITAPDDGQLGQLSVRTGAYVTAGTRLTSVVPNHKWIIANLKETQLAHIRPGLPVTIRVDALDGKRFNGEVEFISPAAGSEFSAISPDNATGNFVKIAQRIPVRIRLKEQDMAQLRPGMSVEVEKAPASLPIPAAWRESVGPGAAPEAEWWRAFHDEYLNRLVSQALRNNPDILTARSRVDQYRAQLRATQGDNFPTVSAGVAATRERTLSSVTGQPYETDVFQGVLQGSYEVDLWGARSSSITAAQATLAAQQAAASAAELTIASSVASGYLNLCALDEQLRVTEATLATRNNSLKLARRQFETGYTSRLEWMQAASEYQSAKAQIPQLQHQIAQQENALSILVGMNPRTLARRQQFDQILPQQMPSLLPSALLNRRPDIVQAQRQLLAADASLASSQAKLLPSLNLTASGTLQSSVLHQLADNPFRLWSVGGSILAPLLNREALTAQVDVSMATRNQALYSYEKVVRNAFSEVNDAVDAIRQREAQLQELQKQEAYVTEALRIARNRYQNGYASYLDELDAQRTLFSTQLNRVTVKNNLLLAQIDLYRALGGGWTPAAMP

SEQ ID NO: 52346 - protein, 293 aa, Zea mays
  Coding DNA Sequence Number=SeqID_10567
  Gene Ontology: Mol. function=sequence-specific DNA binding; Cellular component=intracellular; Biological process=regulation of transcription, DNA-dependent
  Homolog annotation: Hit_ID=Q4KD51; Match level="QueryCoverage=93%, HitCoverage=98%, E-value=2e-74, Identity=52%"; Hit description =Transcriptional regulator, AraC family
  Pfam annotation: Domain name=AraC_binding; Domain location=27-170; Score=105.0; E_value=2.2e-28; Accession=PF02311.9; Description=AraC -like ligand binding domain
  Pfam annotation: Domain name=HTH_AraC; Domain location=189-235; Score= 23.3; E_value=0.00089; Accession=PF00165.13; Description=Bacterial regulatory helix-turn-helix proteins, araC family
  Pfam annotation: Domain name=HTH_AraC; Domain location=241-284; Score= 33.7; E_value=6.6e-07; Accession=PF00165.13; Description=Bacterial regulatory helix-turn-helix proteins, araC family
  Pfam module annotation: Pfam domain module=AraC_binding::HTH _AraC::HTH_AraC; Domain location=27-170::189-235::241-284
MSRVRYREPDNMKQPAANWVDLRRDAISGIEALRAHFTGHAYDPHWHDSYLIGVTEQGVQQFHSRRRQHRSRPGTVFMLEPEELHDGDAINEQGFTYRMLYLSPQQIAQHLNPAGRDAPPSPALQFAATLRDDRSLAYAVWHVFEALWHNHPALIKEAVLDRLFSQLTPHQQIFLPDRHPDKDTVLALQARDWLIAHHAENPGLAQMAQQLQVDRFRLSRLFQAHWGLPPHAWLVQWRLSQARRQLAQGQPVADVAAALGFADQSHLGRWFKRACQLTPSRYQHACTNLPDPN

SEQ ID NO: 52347 - protein, 409 aa, Zea mays
  Coding DNA Sequence Number=SeqID_10568
  Gene Ontology: Mol. function=catalytic activity; Cellular component =integral to membrane; Biological process=metabolic process
  Homolog annotation: Hit_ID=Q57QL0; Match level="QueryCoverage=99%, HitCoverage=77%, E-value=1e-159, Identity=68%"; Hit description =Putative phospholipase
  Pfam annotation: Domain name=PLDc; Domain location=299-326; Score =22.4; E_value=0.0016; Accession=PF00614.12; Description =Phospholipase D. Active site motif
  Pfam annotation: Domain name=PLDc; Domain location=61-88; Score=16.8; E_value=0.079; Accession=PF00614.12; Description=Phospholipase D. Active site motif
  Pfam module annotation: Pfam domain module=PLDc::PLDc; Domain location=299-326::61-88
MLEAARRGVKVRLLLDDNNTPGLDDTLAQLNRHPNIEVRLFNPFSFRTLRALGYLTDFARLNRRMHNKSFTVDGVTTIVGGRNIGDEYFGTGNEPLFADLDVMAIGPVVSEVAGDFERYWHSKPVAPLQQVLDDDEPDEDSVSLPAEWRHSEPVQRYLQRLENASLLQEMAQGTLDLTWAKARLLSDDPRKGLGKARAKSLLPQRMLEVIGTPQEQFDIISAYFVPTRAGVAQLLALKRKGVKIAILTNSLAANDVSIVHAGYARWRKKLLRHGIALYELKPQAAMQDAPHDRGLTGNSGSSLHAKTFSVDQKTLFIGSFNFDPRSAVLNTEMGLVIESAALAGETHQRFSQSMRDRAWTLRLDKWGRVNWLEYPDEPQQIVHKHEPDCSWWQRLQVRLVWRLPIEWLL

SEQ ID NO: 52348 - protein, 385 aa, Zea mays
  Coding DNA Sequence Number=SeqID_10569
  Gene Ontology: Mol. function=catalytic activity; Biological process =carbohydrate metabolic process
  Homolog annotation: Hit_ID=Q0MAD1; Match level="QueryCoverage=94%, HitCoverage=48%, E-value=4e-88, Identity=43%"; Hit description =Glycosyltransferase-like
MALTLRGQLCFQPAGRLRFFQGSFPCSTACRTPGKRLDMVISSGHDMLLEKDYAALAEQHLLTARDGARWHLIEKVPGHYDWQSFLPMVEAARRQQVEIIWELAHFGYPDHLNIWKAEFVDHFSRFAGAMAQLMRDEGIENPFFTPVNQISFWSWAGAEVAWFNPHAAGRGKELKRQLVRASLAAIHAIREVYPGARFVLTDPLVQIAHHPTNPDSKPYADAQHQAQFEAWDMLAGRVDKELGGSEDCLDILGLNYYPDNHWFFPDQPMSLEEPERVPLHILLAQCWQRFQRPMLIAETGAEGEARAPWLQEVSENVAVALDQGIAVEGISLYPVVEYPAWADDRRSPGPLLGLADPNGNRNLHEALALILRSQQIRFTARDQTC

SEQ ID NO: 52349 - protein, 920 aa, Zea mays
  Coding DNA Sequence Number=SeqID_10570
  Gene Ontology: Cellular component=integral to membrane
  Homolog annotation: Hit_ID=Q6CYL1; Match level="QueryCoverage=77%, HitCoverage=94%, E-value=0.0, Identity=50%"; Hit description =Putative membrane protein
  Pfam annotation: Domain name=LolA; Domain location=29-198; Score= -13.8; E_value=0.0015; Accession=PF03548.6; Description=Outer membrane lipoprotein carrier protein LolA
  Subcellular localization annotation: CTP_CleavageSite=35; ConfidenceScore=5.06e-01
MLKIMLTGLLLWASAASAVTLDQLQQRFASQPVIRADFTQTRTIAGMRQPLVSHGQMLIARQQGLWWHQQTPFVMTLLLDDKRMVQSLSGQKPQVITADSNPQMFQFNHLLRALFQADQQVLNQNFTVAFSDRGNGAWALELTPKAAPLNRIFNRISLAGNAFLDSIRLDDKQGDKTLIQLSNTRTEPPQLSDEEQARFAGPQLNSSVLALLPQQNLGAAPPALQQAFMQRLDRQLVWLVSPGEEDDPGIAAWWQAQLRALPDLRQVQGDLDAGQQEAWGRFAWQHRNGLIDEATRSRLQNGGGAQAEWLLAQLFSAFSGVSSKELQGDPLMLVRGAQLALAQNAGRLTLHNGWLTVRDAQGRQWYFLHAELANNAFSMQQSHALVTRLSALEQQLKARWPQAKLLTRGTVLFSDNASQRAQHDVRTLGSVTLGGVILLVLLVFRSLRPLLLAVTSVAVGAMTGTVVTLLCFGELHLMTLVMSLSIVGISADYTLYYLTERMVHGDQQTPWESLRKVRGTLLLALGTTAIAWLLMLLAPFPGLRQLAVFAASGLTASCLTVILLYPWLVRGLPVRPVPLMVPLARWLAAWRRQRGLRVSLPLALAMFAATGIARLNVDDDIAHLQSAPASLLAQDRQLAALTGQRADQTWFVVWGDDAQQTLQRLEKLAPDLRRAEQQGWLQGYRLLPLRSLAQQQQDRQLLQQAVPTVTSRLQQAGIALAAPDLSPMPVTPAVWLASPLSEGWRLLWLTLPDGRSGVLIPTSGVRNSAALAALAAQHSGVSWIDRKAGYDRLFSFWRTLLTGLLALALLFITLTFVLRLGLRAGLRSALPSALSLAVALATLGWIGASLNLFALLALILVLGIGINYTLFFSNPQGTPLTSLLAVSLAMITTLLTLGMLRHFQRFPAVAAGDATHPIKE

SEQ ID NO: 52350 - protein, 684 aa, Zea mays
  Coding DNA Sequence Number=SeqID_10571
  Gene Ontology: Mol. function=catalytic activity; Biological process =metabolic process
  Homolog annotation: Hit_ID=Q6CYK6; Match level="QueryCoverage=57%, HitCoverage=88%, E-value=1e-105, Identity=52%"; Hit description =Putative AMP-binding enzyme
  Pfam annotation: Domain name=AMP-binding; Domain location=194-529; Score=22.0; E_value=1.6e-08; Accession=PF00501.18; Description=AMP -binding enzyme
  Pfam annotation: Domain name=FabA; Domain location=576-680; Score= -15.3; E_value=1e-05; Accession=PF07977.3; Description=FabA-like domain
  Pfam module annotation: Pfam domain module=AMP-binding::FabA; Domain location=194-529::576-680
MNKEEIYQEVSALLTSLFEIAPEDIHPEARLYEDLELDSIDAVDMVGLFWLLALLFGLRWLQLRRQHTAMGAVMGWLALLGALLCISSQLLRSQHLLLWYPVAVNLAMLLLFGASLWSAMPLVERIARLREPVLPPAAVRYTRRVTQIWCLFFIGNGSMALFTCLLGNLRLWTLWNGAISYLLIAALMGAECTMRRQVLALSRRLAAEAGTHWALCFDDSYRFCVALLASWYAGKTPVMPGHARAALLDEMQDRLDGVLCDMPLAVSLPRLAWDEAEAQGALPPLPERAELVLFTSGSTGTPRQVVKSLAVMEQESRWLCALWGEQLRACRVIASVSHQHLYGLSFRIFLPMTLARPFAAQPLFYGEQLAQLPRHWRYAFISSPAFLSRLDRSLQTPACELIVSAGGALRASDAEQVWQRFGCRVSEIYGSTETGTLAWRQWARPGEAWRCFPGVRLEEVSPDRWQVWSPLIAAADGIPLDDRLHKQPDGGFQLAGRHDRIVKIADKRISLSEIERRLRDLPEIEDAVALVVTRHERQAIGVVLSPTRPLDEAALHQRRQQWKQQLQRWLEPLAMPRYWRVVATIPVTAQKPELFWFQGHFPTLPILPGVAQLDWVMHYGLLLLAPGRQFAAIDNIKFQQPVPPGALLQLHLEWHAEKSRLSFRYSLLSEAGEQSASSGKIALC

SEQ ID NO: 52351 - protein, 238 aa, Zea mays
  Coding DNA Sequence Number=SeqID_10572
  Gene Ontology: Mol. function=protein binding
  Homolog annotation: Hit_ID=UPI00005F7B82; Match level="QueryCoverage =42%, HitCoverage=14%, E-value=3e-24, Identity=57%"; Hit description =COG1289: Predicted membrane protein
  Pfam annotation: Domain name=TfoX_N; Domain location=7-107; Score =55.3; E_value=2e-13; Accession=PF04993.4; Description=TfoX N -terminal domain
MKKVNPVVERSRAHLAPLGAIESRTQFGGYALAVESVVFALINQGELYLRASEPLQAYITDRPLQPLVFRKRGKLVSLNYYRVDETLWRDPEHLLALSAASLETAQLELQDRQGSPRLKDLPNLSVRLEMMFARKQQKGLFRFNRGELSVNGAQITQQPEERTRMGGFRFTLLQTLNGFLQTFKRALKTAVMHPSFAHQDAMRQLPTRLSLHIQQSLEAKQYFVIAPVTPQQVILQVR

SEQ ID NO: 52352 - protein, 566 aa, Zea mays
  Coding DNA Sequence Number=SeqID_10573
  Homolog annotation: Hit_ID=UPI00005F89C5; Match level="QueryCoverage =81%, HitCoverage=96%, E-value=3e-53, Identity=42%"; Hit description =COG5283: Phage-related tail protein
  Pfam annotation: Domain name=Phage_E; Domain location=6-91; Score =118.2; E_value=2.4e-32; Accession=PF06158.2; Description=Phage tail protein E
MEKKENVVEFETPLLRGETEIKSVELVKPTAGSLRGVRLADLCQSDVDALLTVLPRITLPALTKAECNALDPVDLITLGGKVLLNAVDKASRPFKAVQTAAKNLSSDIRQTQSTIKELDAQSGKIDGFRKASAQLAVTQQSLKYAKQEAAALAVQFKNTERPTTQQARALEKARQAAAELQTKTNSLRLSVQQQREALNAAGISTKSLSSEQQRLRTASAQATVSLGRQKMELQRLNAQQERLNQTSERYRKGQELSGKVRNMAALLLKVDGWIKANPELAGGIAKVVMGGLMLAGALGAIGLVAWPVIAGVNTLIAGAGFLGTAFSIAGGAITAALGAITLPVLAVAAAIVAGALLVRKYWEPISAFIAGMAEGFTAAMGPISDSFGSLKPAFEWVGGKVKELWDWFGKLLEPVKSTQAELAAAGDMGKKFGNMLAVALKIPGHALDQLMGGINWVLDKLGIIDTKSDGLKDKVPSPDPIATGGAGADTGGLEYNLAYGGAAYRPVSAPSAGGGFTDRSQNTYQYEINMHEGMTKDDAMALMAQHQAREQRNRQAQNRSKMGWED

SEQ ID NO: 52353 - protein, 93 aa, Zea mays
  Coding DNA Sequence Number=SeqID_10574
  Gene Ontology: Mol. function=recombinase activity; Biological process= regulation of transcription
  Homolog annotation: Hit_ID=UPI00005F8DE1; Match level="QueryCoverage =93%, HitCoverage=62%, E-value=3e-27, Identity=67%"; Hit description =COG1961: Site-specific recombinases, DNA invertase Pin homologs
  Pfam annotation: Domain name=HTH_7; Domain location=39-83; Score =32.9; E_value=1.1e-06; Accession=PF02796.6; Description=Helix-turn -helix domain of resolvase
MGRFFFHVMGALAEMECELIIERTRAVLAATRDKGRIGGRRRVMTPDVIGRAERMLANGATLQQIALVLEVSVKTLYRYIPADRQRQITNSVC

SEQ ID NO: 52354 - protein, 643 aa, Zea mays
  Coding DNA Sequence Number=SeqID_10575
  Gene Ontology: Mol. function=ATP-dependent DNA helicase activity; Cellular component=membrane; Biological process=DNA repair
  Homolog annotation: Hit_ID=Q8D058; Match level="QueryCoverage=99%, HitCoverage=98%, E-value=0.0, Identity=65%"; Hit description=DNA helicase IV
  Pfam annotation: Domain name=UvrD-helicase; Domain location=190-635; Score=-52.8; E_value=1.1e-10; Accession=PF00580.11; Description =UvrDREP helicase
MGKRLARHPYNRVRLMAAGVEVSGDKHEYLIPFNQLLDIACKRGVVWGELEFLLADEKVVRLHGTEWQETQRFYHYLLQAWQSWSLEMSAVCRDVLQTLRDDIEAFSAQDRWLNRHELQALKNTIIQQFDALPLPLSRLKDFADCRENQAFCQRWLEQGEAALRQRNRDWTAAMLTRYRAFFDTVESTPLNQSQCEAVVNGEDSLLVLAGAGSEEMNARIQSRLSASDIQARTFHSLALHIIREGSNKQPVISKLESDADARRALLIQEWRQQCHEKKAQANGWRQWLRDELEWEVPEGPFWEDDKLAKRLASRLERWLGLMRMHGGAQAAMIAEVPEEVRDLFSKRIKLMAPLLKAWKSALKEEGAVDFSGLIHQAIALLEKGRFISPWKHILVDEFQDISPQRAALLSALRQQNRRTALFAVGDDWQAIYRFSGAEMTLTTAFHHYFGEGDRCVLDTTYRFNDRIGDIANRFIQQNPQQLAKPLNSITKGNKKSISLLADDQLEPLLNKLSGYVKPDERILLLARYHYLRPDVLDKARTRWPKLNLEFMTIHASKGQQADFVILLGLQQGKEGFPANVRESIIEQGLLPQPEAFPDAEERRLAYVALTRARQQVFLLFDKSAPSPFVGHFRELGVPVLRKA

SEQ ID NO: 52355 - protein, 73 aa, Zea mays
  Coding DNA Sequence Number=SeqID_10576
  Gene Ontology: Mol. function=DNA binding; Biological process =regulation of transcription, DNA-dependent
  Homolog annotation: Hit_ID=Q5PET4; Match level="QueryCoverage=63%, HitCoverage=27%, E-value=3e-14, Identity=74%"; Hit description=Phage regulatory protein
  Pfam annotation: Domain name=Phage_CP76; Domain location=3-72; Score=- 39.1; E_value=0.035; Accession=PF06892.2; Description=Phage regulatory protein CII (CP76)
MFDFKTSTHNHYDDACRKFALTHSMAKLAQRAGMKAQTLRNKLNPDQARVHSNPTLASTVDAISGLGASIGIS

SEQ ID NO: 52356 - protein, 987 aa, Zea mays
  Coding DNA Sequence Number=SeqID_10577
  Homolog annotation: Hit_ID=Q6D3W5; Match level="QueryCoverage=26%, HitCoverage=76%, E-value=1e-100, Identity=63%"; Hit description =Conserved phage protein
  Pfam annotation: Domain name=MethyltransfD12; Domain location=66-291; Score=191.5; E_value=2.1e-54; Accession=PF02086.6; Description=D12 class N6 adenine-specific DNA methyltransferase
  Pfam annotation: Domain name=PAPS_reduct; Domain location=324-542; Score=58.9; E_value=1.6e-14; Accession=PF01507.9; Description =Phosphoadenosine phosphosulfate reductase family
  Pfam annotation: Domain name=zf-dskA_traR; Domain location=1-67; Score=65.5; E_value=1.7e-16; Accession=PF01258.8; Description =Prokaryotic dksAtraR C4-type zinc fi
  Pfam module annotation: Pfam domain module=MethyltransfD12::PAPS _reduct::zf-dskA_traR; Domain location=66-291::324-542::1-67
MADSMDMAQARADELLARNIASVVNRPVSVGASFCEDCDAPIPEQRRRAVRGVTRCVSCQDTAERYAKVSKGGDRLVEPFAGSCAVMMSTDYPSYLVADINPDLINLYRQIKEHTRPFIVVAASLFNQNTTGESYYSVREAFNHNPALPLLERAAHFLYLNRNGYRGLCRYNRRGEFNIPFGNYSKPYFPLAEIEAFAIKAQRATFICADFRETLRLTKSGDVVYCDPPYDGTFADYHSAGFGKDEHHDLVSMLLDVSERCPVVVSNSDTLYTRSILSDFSITSISVARSVGVAAGEGKRASEIIAVRQPKAALIFTGFDMAAGPNRSVIVEWLLAIEAGVTFEAAVADTGHEHPETVKYLEYLETKLGPLRRVRADFTQRIADKRTFVKDKWPVTLVRDLRFTEEEAAKIVRRALNALKPTGIPFLDMCIWKGTFPSTQRKFCSFELKQIPMQEQVVDPLVAEGKHVITWQGVRAQESAKRSELPEWEAGFDLGPGLSIYRPILKWTHDEVFALARRHGIKPNPLYQQGCSRVGCMPCVNVNKAELGEIFTRWPEEISRVAEWERIVALCSRRGNAAFFHSGMDPVKAETDGSKQRLSGGLRVIQEYAYPWNAPREAIASPYPTYEEMHSRSQMIAALVRAQELLEKQPTLIQFDVKRRVSELEKTQGIDRANAYLAKTFVERTLPRVETVNAQYRLGEMSHGTFNLLAGNATKQAGAASAGGTLWELMCRFNRLPDMARADVDLLAGDVANFILAELVQAHAQASDESDYKYTHRVYMTAATITRELSQTPPLWDKVTSRLFDPEEVTPAIMRMQTEKWWKGRLRRVDASWREHLQIALANVSKKHAPYASSMTVSEGLRSGDSKPPESYEKIDLDGMSRKERRRLLSRIRSEKPEKRHLRLRRSDKIESACEKLIGQVRDLSGETISRGLAVRLIGGTQTKIGGHFFRSLPDGELARPILEPKSTFVLERFNRLAEKQRSKSKH

SEQ ID NO: 52357 - protein, 240 aa, Zea mays
  Coding DNA Sequence Number=SeqID_10578
  Gene Ontology: Biological process=viral procapsid maturation
  Homolog annotation: Hit_ID=UPI00005F8CDF; Match level="QueryCoverage =99%, HitCoverage=89%, E-value=1e-84, Identity=78%"; Hit description =COG5518: Bacteriophage capsid portal protein
  Pfam annotation: Domain name=Phage_portal; Domain location=5-239; Score=141.5; E_value=2.2e-39; Accession=PF04860.3; Description=Phage portal protein
MDKRDILDYAECIGNGRWFEPPVSFSGLAKSLRSAVHHSSPIYVKRNILASTFIPHPMMSQQEFSKFALDYLVFGNAFAELRRNSLGKPLRLETTPAKFTRRGVKDGVYWFVNDWKEPHEFSAGSVFHLLEPDINQELYGLPEYLSALNSAWLNEAATLFRRKYYQNGAHAGYILYMTDAAQPPQMMGIIPDNSGGFGDAVKASQVFVRNELTPLQERMKEMNEWVGSQVIDFKAYLLEM

SEQ ID NO: 52358 - protein, 757 aa, Zea mays
  Coding DNA Sequence Number=SeqID_10579
  Homolog annotation: Hit_ID=UPI00005F89BB; Match level="QueryCoverage =25%, HitCoverage=99%, E-value=1e-53, Identity=54%"; Hit description =COG4540: Phage P2 baseplate assembly protein gpV
  Pfam annotation: Domain name=P2_Phage_GpR; Domain location=275-405; Score=236.2; E_value=7.3e-68; Accession=PF06891.2; Description=P2 phage tail completion protein R (G
  Pfam annotation: Domain name=Phage_Mu_Gp45; Domain location=578-751; Score=-56.1; E_value=0.05; Accession=PF06890.2; Description =Bacteriophage Mu Gp45 protein
  Pfam annotation: Domain name=Phage_base_V; Domain location=580-680; Score=177.6; E_value=3e-50; Accession=PF04717.3; Description=Phage -related baseplate assembly prot
  Pfam annotation: Domain name=Phage_lysozyme; Domain location=80-181; Score=62.5; E_value=1.3e-15; Accession=PF00959.10; Description=Phage lysozyme
  Pfam annotation: Domain name=Phage_tail_S; Domain location=422-567; Score=115.6; E_value=1.4e-31; Accession=PF05069.3; Description=Phage virion morphogenesis family
  Pfam module annotation: Pfam domain module=P2_Phage_GpR::Phage_Mu _Gp45::Phage_base_V::Phage_lysozyme::Phage_tail_S; Domain location =275-405::578-751::580-680::80-181::422-567
MEKISSAINYLVGLILMWLGRHTPQDIAFMTVKRCAVVAVLAIAALLPQFKTLKTSEAGLALIANAEGCRTSPYQCSAGVWTNGIGHTEGVTPQSQVSERQAAVNLVYDVMRVERGIDACMAVEMPQRVYDATVSFAFNVGVRAACSSTFARYIRLQHWFAACSELRRWRIIGTLSAGIESRDKAIARLDADAKASQKREAELRLMQGRASTAALNREMTIQRETDANPILRDWSAAALPDDVIRLHARPAFASARDYLDWVSKSSKTARNNTMLKPQQLRQALTDSVPELQRNPDALNVFIDSGRIVSTLASSLSFEYQYRLNMVITDYTGNIDLLIVPLLAWLRTNEPDIMATEEKRRTGFTFQADVISDTASDISIELQLSERVIVKRADDGLHVTHVGENPLPEDDALPLQLYVHGELLVNERLEALISSLSAPARKEMARTIAKKLRESQQQNIKRQQAPDGTPFKPRKTQPVRSKKGRIKREMFAKLRTAKYMKTQATPNEAVIEFAGNVRRMARVHHYGLRDRPSRKEELIASANPSQNSLTSVPFNKTPIILDMNEQLSEILRLMRNLIRIGTVSAVNLDGGLCRVDTGKNTTGWLHWLSARAGKTRSWNAPSVGEQVLVLCLGGELDTGFVLPGIFSDDNPAPSASADALHWSFPDGAVIEYEPESGALIATGIQTATIKAAVKILFDSPEVECTTLLKTAQLEVTKGATMKGNVMHSGGKLSSNGVVVDDHDHGGVQRGGSRTDGPQ

SEQ ID NO: 52359 - protein, 681 aa, Zea mays
  Coding DNA Sequence Number=SeqID_10580
  Gene Ontology: Mol. function=transporter activity; Cellular component= integral to membrane; Biological process=transport
  Homolog annotation: Hit_ID=UPI00005F7630; Match level="QueryCoverage =70%, HitCoverage=95%, E-value=0.0, Identity=79%"; Hit description =COG0659: Sulfate permease and related transporters (MFS superfamily)
  Pfam annotation: Domain name=C4dic_mal_tran; Domain location=151-331; Score=-87.9; E_value=0.064; Accession=PF03595.8; Description=C4 -dicarboxylate transportermalic acid transport protein
  Pfam annotation: Domain name=DctM; Domain location=275-672; Score= -246.7; E_value=0.093; Accession=PF06808.2; Description=DctM-like transporters
  Pfam annotation: Domain name=STAS; Domain location=499-599; Score =5.6; E_value=0.012; Accession=PF01740.11; Description=STAS domain
  Pfam annotation: Domain name=Sulfate_transp; Domain location=207-490; Score=257.6; E_value=2.6e-74; Accession=PF00916.10; Description =Sulfate transporter family
  Pfam annotation: Domain name=Xan_ur_permease; Domain location=118 -470; Score=-81.4; E_value=4.4e-05; Accession=PF00860.11; Description= Permease family
  Pfam module annotation: Pfam domain module=C4dic_mal_tran::DctM::STAS: :Sulfate_transp::Xan_ur_permease; Domain location=151-331::275 -672::499-599::207-490::118-470
MISLIRYRAVMKGLHMQNTLPRTDQEIADYFNPAANKPASEMEMLGVLIAEILQSGMPVSNKAIISKLIHRLELESDRDSLDIYRQLLDLVTNDVTATDVVAGDISTGRVLRSPALLTRECLAGVITALALIPEVISFSVIAGVDPKVSLVASVVLCLTLSILGGRPAMVTAAAGSVALVIGPMVHLHGVEYILPAVVLGGIIQILFGLAGLARMMRYIPRSVMLGFVNALGVLIFFAQVPHVWGQSPLVWIFFAVTLAIVLLLPRLIKSVPSPLVAIVVVTAVALLMGYRMPNVGDEGPMSPGLPGLNTLLVPLNLQTLQIIWPTALSIAFVGLMESLLTAKLVDDLTDTPSSKRRESWGLGVANILAGFYGGIAGCAMIGQTIVNVELGRARSRVSTVAAGLVLLLLVTGLSQIMAQIPMVVLAGIMMVVAVKTVNWHSLQPATLKRMPWSETLIMVLTVAVTVWTGNLALGVLAGVILAMLLFARRIAHVIHAERQLSDDGQSVRYVVRGPLFFASSNDLFEHFDYAHDPKKVTIDLTHAQIWDASSVAALDGIEYRYQRYGAEVTIEGLDSRSTDFHQRLTGNYDETYCLSVIDADHPCYADRLRTDPTAQTCTAAASASLPRRLADAAPAWDVTHSAGRQRRYSPILPLFTLITRRLIRQRKRYLLSARVAESKNH

SEQ ID NO: 52360 - protein, 85 aa, Zea mays
  Coding DNA Sequence Number=SeqID_10581
MPSGQFYVVDQPELSFTANYHLDTVNDQPFPSRLVLEIQKSVQPTDAFAAFSIGHEVTFVSSSGEAQRMVLISDTPDELVFSSRG

SEQ ID NO: 52361 - protein, 226 aa, Zea mays
  Coding DNA Sequence Number=SeqID_10582
  Homolog annotation: Hit_ID=Q84QW1; Match level="QueryCoverage=48%, HitCoverage=35%, E-value=5e-11, Identity=35%"; Hit description=BHLH transcription factor(GBOF-1)-like
MVYCRRVHLPVGITVLENNRLKIAISSLKGSEVSGVTKNPGITFSTLRTSNRLLCVRQSDMVQGEGNDDNDNAAAHPTVSLLASSIITRLHYAARVHGARNAAVQLQGHRFAGLFGLPPSVPIANYAEFVHSQGSKDLYAKVGDHMYLGAKRCKAEGGEGNLNRKPTLEQTDSDSSDENDGQNQKPPGKGKNMTPAETPQGLCHVHDRRGQATDSTNHFYVMLCTT

SEQ ID NO: 52362 - protein, 93 aa, Zea mays
  Coding DNA Sequence Number=SeqID_10583
  Subcellular localization annotation: CTP_CleavageSite=82; ConfidenceScore=5.71e-01
MNIKWTLSCIASRQLRTSTSRCFQRPSAFGSIAAGPFLTFQGPSIAFSTLRKSNRLLCVRQSDMGHRFVGLFGLPPSVPIANCAEGRHLVLAT

SEQ ID NO: 52363 - protein, 85 aa, Zea mays
  Coding DNA Sequence Number=SeqID_10584
MALRYQLHWHLDATLALTWRDLGIIDHGAEEEEPLASLVKEIMGGRRIFFITNMYLEEEAPIENTDITVFEIDISFRIPLRIDIF

SEQ ID NO: 52364 - protein, 226 aa, Zea mays
  Coding DNA Sequence Number=SeqID_10585
  Homolog annotation: Hit_ID=Q84QW1; Match level="QueryCoverage=48%, HitCoverage=35%, E-value=3e-10, Identity=34%"; Hit description=BHLH transcription factor(GBOF-1)-like
MVYCRRVHLPVGITVLENNRLKIAISSLKGSEVSGVTKNPGITFSTLRTSNRLLCVRQSDMVQGEGNDDNDSAAAHPTVSLLASSIITRLHYAARVHGARYAAVQLQGHRFAGLFGLPPSVPIANCTEFVHSQGSRDLYAKVGDQMYLGAKRCKAEGGEGNLNRKPTLEQTDSDSFDENDGQNQKPPGKGKNMTPAETPQGLCHVHDRRGQATDSTNHFYVMLCTT

SEQ ID NO: 52365 - protein, 56 aa, Zea mays
  Coding DNA Sequence Number=SeqID_10586
MAERRRKVDGGKMGVAVFGARCTLRYEMDLQFFNIPGNSKMLSLRVIEYYGMEMAL

SEQ ID NO: 52366 - protein, 358 aa, Zea mays
  Coding DNA Sequence Number=SeqID_10587
  Homolog annotation: Hit_ID=Q4QWQ6; Match level="QueryCoverage=36%, HitCoverage=44%, E-value=1e-39, Identity=77%"; Hit description=NAC23
MALHKLCDDDDSQLPYGSKATHDITPARCQDLSGCHIGMAFLEKVGRAGPRTGQALSWGRSLPSPAWTLVTPLLQAHPTWARDEHEGRGTSTSLTPVSGHLASPPFALAHALDPSGLGHAAHSLVGLGTPLSRNADKQKPPCVVPSRTPPQPQTPQTPVRTRAIRPNLQQEGRRAGEGAGGDHKPVFATVAVSSPPEQKPFVAAGGLPPAFPELAAYYDRPSDSMPRLHADYSSCSEQVLSPKQLACDREVQSQPKISKWERTFASDPVNPAGSMLDPVSGSLGVGIPGVALLRPLLTTDTLERQSCGIRTWRWTRGGASAGIASLRGTGATCALREKEAELEAARARLHVVELEEWL

SEQ ID NO: 52367 - protein, 172 aa, Zea mays
  Coding DNA Sequence Number=SeqID_10588
  Homolog annotation: Hit_ID=Q6KAF1; Match level="QueryCoverage=41%, HitCoverage=17%, E-value=1e-13, Identity=64%"; Hit description =Putative RING finger 1
  Subcellular localization annotation: CTP_CleavageSite=48; ConfidenceScore=5.18e-01
MPHMVGGEDRDLDTSPPPPSSSPQPLRRPGGQFGHGSPTRRGKADWAAAEQDSPSASPTRRGSMALSVLRPPLPRAKEGLGLGQRRCHSMGSYEYVMDDRASLRVAIKPPKKKPAASKSRRRGAMSECEFGASTREETSLRLPFPATALDHDGIWARGLAGRGGLCRRFPSA

SEQ ID NO: 52368 - protein, 133 aa, Zea mays
  Coding DNA Sequence Number=SeqID_10589
  Gene Ontology: Mol. function=Ran GTPase binding; Cellular component =intracellular; Biological process=protein transport
  Homolog annotation: Hit_ID=Q9XJ54; Match level="QueryCoverage=97%, HitCoverage=100%, E-value=1e-51, Identity=76%"; Hit description =Nuclear transport factor 2
  Pfam annotation: Domain name=NTF2; Domain location=8-130; Score =138.6; E_value=1.7e-38; Accession=PF02136.11; Description=Nuclear transport factor 2 (NTF2) domain
MAMDPDAVAKAFVEHYYRTFDTNRAALVGLYQETSMLTFEGQKFQGPSAIAGKLGSLPFQACEHQIVTVDCQPSGPQGGMLVFVSGSIRTGPEEHPIKFSQFCFDLWDMLAFHLLPAAGSFFVQNDMFRLNYG

SEQ ID NO: 52369 - protein, 132 aa, Zea mays
  Coding DNA Sequence Number=SeqID_10590
MEALGLRGTRATEKVKVTEVPKAKVKKRLCRSQGRCPRMFKSIKERFEEKGLRELLSGCIRPPSGTVRPQDFWLKTPDREQCRSNYAPDLGQQLVRGRAGSAQRLGDVARSGGALDQSGDHQKGKAINQIPD

SEQ ID NO: 52370 - protein, 53 aa, Zea mays
  Coding DNA Sequence Number=SeqID_10591
MEVVAPGGSDGTAPTGALERVGIPWLGSPPHCSTNSYKIKEWDGIKMTKIGAQ

SEQ ID NO: 52371 - protein, 358 aa, Zea mays
  Coding DNA Sequence Number=SeqID_10592
MTTGSGKSKDAIDAYYFQMRLDPSTFYIPALADGKIQCGADADLTLEALEFMVHGMTREAVITKHLILPLNIAALCDNQNLRTAITATLLALNECVLAIRQIGGNPNHGIRIPGVSEGPIACGCLPAHRLRHCHLGALKGPRIRATTEDVARVSTPIKIGTMPPTTEVPAGDLAVEATTMASVVDTTKAFKLQNDREAYKKDRWKRATLDQCEEGLNQCEEAVSQKEANLAGLQSVLETRGKELEDQCVQQEETIETLRKWHQDVKDNANMVAIFEKEIKEEKLSLTMRDNNVTLLENALNQHNDSFAQREEWLVKKEVDLMERVCQLEAAQAALDTQELEATQNALEDLYVEQRTGS

SEQ ID NO: 52372 - protein, 49 aa, Zea mays
  Coding DNA Sequence Number=SeqID_10593
MALSDGSSLLGPVAQFLSMWFWVTMQLCDLGYQCLFMEIEVVVSKKDDN

SEQ ID NO: 52373 - protein, 97 aa, Zea mays
  Coding DNA Sequence Number=SeqID_10594
MALGIGRWAPAWAAGRARCMAASMHGRWPLGPLESLDAVPGSGRVAAGPLDATPGSGRARCMAAGGGWRRRRAAADALGVEARIGDGLTRGKTSKPN

SEQ ID NO: 52374 - protein, 159 aa, Zea mays
  Coding DNA Sequence Number=SeqID_10595
MGSRVLRIQSGPNLYKPSCKSDVPLHYHRVVVNGTVLLKSIMWVIPWCSVGSQTLTASAPDQECILHNIMDPSGKRSSPMVPKASAGLPHPAPARTTLMNSKAREPRHTSTPHRIAPASGGPRVVVMHVARPTEAAPLSRRTPLSTSPTREWTQITQRR

SEQ ID NO: 52375 - protein, 74 aa, Zea mays
  Coding DNA Sequence Number=SeqID_10596
MAPRKLRDDGGSQLSYGSRRTRLSMASVDYLLAPEHRLPATFEDAADAVIRGSETRVMRDRGATTTDRRDRGRD

SEQ ID NO: 52376 - protein, 94 aa, Zea mays
  Coding DNA Sequence Number=SeqID_10597
MSGSPSTARRNERARTPKLAGNLGVRATAAGCSLGIKPKLRDPFPHPPPQWVAGAVEFDGAGEGSAVAGASLLGCRREVGGDPRIVGWRVDGPD

SEQ ID NO: 52377 - protein, 71 aa, Zea mays
  Coding DNA Sequence Number=SeqID_10598
  Gene Ontology: Mol. function=DNA binding; Biological process=DNA integration
  Homolog annotation: Hit_ID=UPI00004C1731; Match level="QueryCoverage =97%, HitCoverage=4%, E-value=2e-28, Identity=77%"; Hit description =UPI00004C1731 related cluster
MAVFVGTMLPQGASWGTPSDRDSTGPPWCLMHIRWREPAKGVSTTRDKPIYPHRHSKPTLSPGRLLSGDLI

SEQ ID NO: 52378 - protein, 127 aa, Zea mays
  Coding DNA Sequence Number=SeqID_10599
MADGEASRRRVARTTYSTSDGEAAATPRRLRQGCRGHVAQATSGHVGADAGCHGQAARTPPRKAANSRTGSTGLHRGWPGCIDWTWPLGCRERKGREEKKVDGEVQAQVDGRDGEQWRMSARRWGMG

SEQ ID NO: 52379 - protein, 183 aa, Zea mays
  Coding DNA Sequence Number=SeqID_10600
MGVILPVVDRCREPTTGFGGSSGLRRAIMEVQGPFSSSDVMSGSSGVRRNSLHSNSATGGAVVWEQAWRLLSFAMAHGGNGERERKGGGRSADLEGEDHDAQSSVRSWASADCGMRGCGGLALNSAELGDDARVPHARDRARGGQQSSRRARGLCTQVEGANLDLILLSTRWLLQLRARFIGE

SEQ ID NO: 52380 - protein, 123 aa, Zea mays
  Coding DNA Sequence Number=SeqID_10601
MPLCGALFSVGRGCKSLVIFPAEQRYDCTDLHCDVTPTSRERLDNSKSSLSDTSPAALSLVKERPALATVPDRTSQFDQARCYELRIAYLLVHEATLDLSISSSRALQPAADARLDVVAGSKP

SEQ ID NO: 52381 - protein, 46 aa, Zea mays
  Coding DNA Sequence Number=SeqID_10602
MWYIYREVHEEVTEARQKASTNMEVAVERSLWNLSSGRDRWMGWRR

SEQ ID NO: 52382 - protein, 136 aa, Zea mays
  Coding DNA Sequence Number=SeqID_10603
MGARIGDGFMPWPPSMEEDAYHGSSTVGARSTAACVGAACAMRDTGAWRGALMWRRFSGELHAADGGERGRAGDAAAGEVEDADGGGRPGGLMWRRFSGDLHVADGGERVRDRGSTDGGERALMAESGGARVTGDC

SEQ ID NO: 52383 - protein, 167 aa, Zea mays
  Coding DNA Sequence Number=SeqID_10604
MKNQDTTPSVQVPTGIANHPASAVILFGSKEDNPPSTSSPSVIRQEASQDVLIATGQDNDGDDLLGEEMVDYEASPKHLGMEVNTVRSLRPDGLESNREDYNLVPLENSLESRREDCSSQPLLRMIRPVRLYGPESNREVCSVQPLSWAVRPHDRTVRSNVEGSNPL

SEQ ID NO: 52384 - protein, 131 aa, Zea mays
  Coding DNA Sequence Number=SeqID_10605
  Subcellular localization annotation: CTP_CleavageSite=48; ConfidenceScore=5.07e-01
MKGKGDGGGSSRVGACVGPSKGCRRQRQKKLKRLALLGVNAGSEEVASAMTRGCTGGDAGGAEERHAGQPHHGRGGRRWRGRHEGVSAAEGKEPPTAWEAAARATGMRTGNDGSGPAAAFWVAAASPRGGG

SEQ ID NO: 52385 - protein, 555 aa, Zea mays
  Coding DNA Sequence Number=SeqID_10606
  Gene Ontology: Mol. function=cysteine-type peptidase activity; Biological process=proteolysis
MDRLPDINWCQLVFSYLCEAAAKWHKRNTNHVTVMIYGCSKVIVIYDLDHLHYEEALENKYDTPRIKYFDKETIDALTKADRRKPRHAGETYGHCHFHSRTNTCYVAAPKQPTNDTFHIHVPRIKDLTPSYRSSFDSLLKAHDEEVDKYRATLEWAHRKLVSKQLQLVETFVDMIDDIIRLGSQVQGSQQRDTQIEQPTQSDANIPNDLHTGAAGDVMPEAFTQSENFEVQTDDLNVTNHSSDEMHNMYEDISIKIDQTHVPPLPDSPIKPKEYPMEADGDLVSTINKMVDLLGQDKVQETINMVAHNLMQPQNQLHPQNIPPQPSFDKIHVAQVLTTEVSIEVPPKDHPVLTRHLSCQREFDKRRTILHIGPFPSSCHDIYQSFSERMRLDNYFMQGFIDCIQSEHASHTPDPITDVVILDVNIGIDPDKDCPTMPVGSNDCGFFVTRFIILYEYAEGYMPDEIDTDLSLENRATLLHYLTFHSLNKIKPLPADIRRFSYDRHNEASEYTEFSCTIYAFRQLKHYNVYHLSQLIVYKIFIHVINSYYTVYATSQ

SEQ ID NO: 52386 - protein, 176 aa, Zea mays
  Coding DNA Sequence Number=SeqID_10607
MELGAELGAKTYGPEIHGAELGAITFGVDLPTIAHEHEVLGALIRRSAVRARPCSHAGRSNAPGWAAGHMAVPRWRPGGWAASALRHDAADWKGSAGERAAALERRCGRVAAAQAAPGGPWVQRGGARLSHTGGAEAISQGELVVIKHAGMIELEEACHAVVVEDGTIEVAIGVAA

SEQ ID NO: 52387 - protein, 690 aa, Zea mays
  Coding DNA Sequence Number=SeqID_10608
  Gene Ontology: Mol. function=triacylglycerol lipase activity; Biological process=lipid metabolic process
  Homolog annotation: Hit_ID=Q1SDA9; Match level="QueryCoverage=46%, HitCoverage=52%, E-value=1e-123, Identity=65%"; Hit description =Lipase, class 3
  Pfam annotation: Domain name=Lipase_3; Domain location=368-507; Score= 121.8; E_value=1.9e-33; Accession=PF01764.16; Description=Lipase (class 3)
  Subcellular localization annotation: CTP_CleavageSite=60; ConfidenceScore=5.19e-01
MDVLRFVPGVRPPLPTFATPVSPATAPSPHAAAAAAAPGPGFHSGMLGLWPRRAGENALGAAAEAAGVEEARERRRRRAVEAEDGRGGNWVLQILRVQSSPPPSPSRDDGRCGVDDGGSVPGSGEGDGSSQRCVERGGVGPDSEEGCSVADGEELDRAAFSRLLRKVSLAEAKLFSEMSGLCNLAYMVPRIKPRYLHKYNMTFVTSSVEERAKLPNPCNQEDQNLNGRKNANISTSSRHSDEQESTYGATSEHERMQENQSGQGINPLAAYRIAASAASYMQSRAMEVLPFGSQNEARRDRTIQAIVNAQTEGLTMDEASFVATTNSMTSMVAAKEETKQAVADDLNSSRSCPCEWFICDGNRNSTRYFVIQGSETIASWQANLLFEPIKFEGLDVLVHRGIYEAAKGIYQQMLPYVKSHFIVHGESARLRFTGHSLGGSLALLVNLMFLIRGVAPAASLLPVITFGSPSVMCGGDYLLQKLGLPKSHVQSVTLHRDIVPRAFSCHYPDHIASILKLVNGNFRSHPCLTNQKLLYAPMGEVFILQPDEKLSPHHHLLPAGSGLYLIGGQTVDSGTSSTALRSALSAFFNSPHPLEILRDAGAYGPKGTVYRDHDVHSYLRSIRAVVRKEMRAEKERRRLLRWPIEVYGALATIDRRQVLRQLRRHAHLLVVFLLPAKLLFLGVLSLIRPT

SEQ ID NO: 52388 - protein, 99 aa, Zea mays
  Coding DNA Sequence Number=SeqID_10609
MDPCIGAIIIGAENLLKFRKGPLTGTAFDPLPLPTGDKERIEKRREELAAEQQWVDVQEMRRVAECREKEKKHELQKVEDQHSCYDKNSSNMDMSILAP

SEQ ID NO: 52389 - protein, 101 aa, Zea mays
  Coding DNA Sequence Number=SeqID_10610
MAGNHHQRKLQRLMGAVQEEVSTLPDPRTRPPPRPRKVVSASPDPKARPPPRPQEEVSASPDPRARPQPRPREESRPRPTPASASGGVSASPDLGLGSTTP

SEQ ID NO: 52390 - protein, 180 aa, Zea mays
  Coding DNA Sequence Number=SeqID_10611
MVPHHFVVFPQFRVKKGDFDVVAFKRKALVSSDHDLVEEFIAYSAWPLSHRWSVGQIVRRSMPLKEGMEMISHVFAIELGGRDGPTFVGEVETETCKVIRKHVRKTELSKNMDIQGCNVLINRVFELNHFPYGLYLEDTAKDTDDTLNKGKTEKGEVYEGWEKDEPLKRKAGSLESGKKS

SEQ ID NO: 52391 - protein, 224 aa, Zea mays
  Coding DNA Sequence Number=SeqID_10612
  Gene Ontology: Cellular component=nucleus; Biological process =regulation of progression through cell cycle
  Homolog annotation: Hit_ID=Q5XLI2; Match level="QueryCoverage=81%, HitCoverage=46%, E-value=1e-52, Identity=65%"; Hit description=D -type cyclin
  Pfam annotation: Domain name=Cyclin_C; Domain location=44-166; Score =5.0; E_value=0.016; Accession=PF02984.9; Description=Cyclin, C -terminal domain
MEETYVPPSLDLQVGDTRYVFEAKTVQRMELLVLSTLRWRMRAVTPFSYIDYFLHRLKDGGAPSRRVVLRSAELILRVARGTCYLGFRPSEIAAAVDAAVAGEEHAVDIDKACTHHVHEERVSRCLEAIQATVALLALGTVPAQPLKAEGPSSGHSRASSSSATVPRSPTGVLDAGCLSYRSDDVDGRSASCALRPLPSPRSALSAIARASSSASMEGPRVRSP

SEQ ID NO: 52392 - protein, 336 aa, Zea mays
  Coding DNA Sequence Number=SeqID_10613
MDFVEALATTYAELGQVVTEAKLKSASAWAAPLQKLFKGCHGEISEGCGKEEDMMAPSCLVDPMKLVHEKLAKIEASVKTNASVESLHATKTAPVVGLDISLLDYHAEEPFDFMLCDLLAIDVLEFGKIKMTKFFFDHLYGPAMAPLLGAMSRGAEVTRLGATDLDAEPHNNIDLFHCARRNINDLVQIVMSVRVWFCDTTASPTYDNGYVNITTQLSGLRTKMPPLTVAIDENLASFMFPGITMFLQATTVSPASAPFPKIYITDLDAKIYGTKVCHQRALEFGPIVFSALGGVGRSAWQPSRLIGCTRQPHDEGAGGRRPRSWLARELAHAARS

SEQ ID NO: 52393 - protein, 368 aa, Zea mays
  Coding DNA Sequence Number=SeqID_10614
MAVPPNRTPSLHGSSRPSSDAMLPPPALAKKDAQDTLFAEEESQALQSGQRESPSFSANNLQKSSLLFRQIQAHLLCMDDLDDPISDDHIERTAEQFSSPRTNDQAGKKSMSSPPWPSCIADDDDEDPRPRWDDQAGKKRMSSPPWPSCIADDDDEDPRPRSDDQAGKKRMSSPPWPSCIADDDDEDPPPPIKKARTKPKSRSKRKHAAARATRLRLRREHRLQRWHNTIATLILKRRFRAPELSHGRTALRCLCPDLKLADDDPRGFGCCALHQDALPGHRAWMYSDEGDAPPLIGGLGEVLVPRLSAGYSKEEVRQYARWRGSVSMPSRFYVQQRAAEKRARSVARRRLDDAWNTESPSTLDRVDR

SEQ ID NO: 52394 - protein, 404 aa, Zea mays
  Coding DNA Sequence Number=SeqID_10615
  Subcellular localization annotation: CTP_CleavageSite=26; ConfidenceScore=5.03e-01
MHIDPEHQKHTAIAFYFRRDTPPALRPMAVPPNRTPSLHGSSRPSSDAMLPPPALAKKDAQDTLFAEEEFKALQNGQRESPSFSANNLLQSSLLFRQIQAHLLCMDDLDDPISDDHIERPAEQFSSPRTNDQAGKKSMSSPPWPSCIADDDDEDPRPHWDDQAGKKRMSSPPWPSCIADDDDEDPKPRWDDQAGKKRMSSPPWPSCIADDDDEDPRPRSDDQASKKRMSSPPWPSCIADDDDEDTPPPIKKARTKPKSRSKRKHAAARATRLQLRREHRLQRWHNTIATLILKRRFRAPELSHGRTALRCLCPDLKLADDDPRGFGCCALHQDALPGHRAWMYSDEGDAPPLIGGLGEVLVPRLSAGYSKEEVRQYARWRGSVSMPSRFYVQQRAMEKGARSVA

SEQ ID NO: 52395 - protein, 96 aa, Zea mays
  Coding DNA Sequence Number=SeqID_10616
  Gene Ontology: Mol. function=magnesium ion binding; Cellular component=membrane; Biological process=photosynthesis, light harvesting
  Homolog annotation: Hit_ID=Q41748; Match level="QueryCoverage=80%, HitCoverage=31%, E-value=3e-27, Identity=69%"; Hit description =Chlorophyll a/b-binding apoprotein CP24 precursor
  Pfam annotation: Domain name=Chloroa_b-bind; Domain location=34-96; Score=-26.3; E_value=0.0018; Accession=PF00504.12; Description =Chlorophyll A-B binding protein
MPPRPSPRRALLAVAAAAAKKLWIPAFKSDAEFINPPWLDGSLPGDFGFDPLGLGKDPAFLKWYREAELIHGRWAMGRRAGHLHGPSRERSRRLIY

SEQ ID NO: 52396 - protein, 81 aa, Zea mays
  Coding DNA Sequence Number=SeqID_10617
MGERWRGKLRAGQGNSGEESRSRGGAIRRDKARTSSDKGRGVPWANTGARDEAELASHRAGRGKPTRINFDKAELAKVRRE

SEQ ID NO: 52397 - protein, 150 aa, Zea mays
  Coding DNA Sequence Number=SeqID_10618
  Homolog annotation: Hit_ID=Q9ZTP2; Match level="QueryCoverage=22%, HitCoverage=4%, E-value=4e-07, Identity=83%"; Hit description=Prpol
MAQPKGKRGVQGMRWMRKVLSDAAASFIGASKADLAESQSSQRLLSDSQQPWDDGKGKPPVSWAHLPALERVRAWSVTTLKVHLAGCVRAHARWPQEPDMWGPPASAGLQAVDHINKYQAETIKWRDRKIQWESFSSNGRVLFGGVFVKT

SEQ ID NO: 52398 - protein, 521 aa, Zea mays
  Coding DNA Sequence Number=SeqID_10619
  Gene Ontology: Mol. function=serine carboxypeptidase activity; Cellular component=cellulose and pectin-containing cell wall; Biological process=proteolysis
  Homolog annotation: Hit_ID=Q5Z5A3; Match level="QueryCoverage=95%, HitCoverage=92%, E-value=0.0, Identity=66%"; Hit description =Putative serine carboxylase II-3
  Pfam annotation: Domain name=Peptidase_S10; Domain location=49-512; Score=672.4; E_value=3.4e-199; Accession=PF00450.12; Description =Serine carboxypeptidase
MALAKTLLLVLVVAAAWTAAAAARHRRSHEDYYENVFDRQQADRVESLPGQPSEVGFRHFAGYVTANESHGRALFYWFFEAAHDVAKKPLVLWLNGGPGCSSVGYGALEELGPFLVQKGKPEISLNPNSWNKEANLLFVESPAGVGFSYTNTTKDLTQFGDELTATDAHAFLLNWFKRFPQFRHHDFYLAGESYAGHYVPQLGVKILEGNKKAHRKDRIKLKGIMIGNAAIDSSSDDRGLAEYAWDHAVISDEVYGAIKKECTFSDDGDESDKCGQAWNDFFNVMRDIDLYSLYTPACTDAMANASRSNSSSASRRRSWNLADTPLAVRSTTILSDPWPTSTYKELMTGILCMYMYMQKVHRGMPYNTYDPCVDNHVFDYLNRADVQKALHANVTGIPYSWEPCSDALSNWTDSPASTLPAIKQLVDAKLRVWVLSGDTDDRVPVTSTRYSLRKLGLATAKEWREWFTTDQVGGYTLVYDGLTLVTVRGAGHMVPMITPVQASQVFAHFLHGSEMPAKPVV

SEQ ID NO: 52399 - protein, 60 aa, Zea mays
  Coding DNA Sequence Number=SeqID_10620
MLIVRRSLLLHRNVKCDASGIELKLSIHPPLAGVLDPTSGIRAKDSIVYGSNHSGVGQNG

SEQ ID NO: 52400 - protein, 112 aa, Zea mays
  Coding DNA Sequence Number=SeqID_10621
MVWRTGLSSVPPDSVRCTWGDRLKLFTFGFLERRSAIIHQTVRWATGLSGVPAEQRLSSATVNSNGRLQHEQCVDSSRRVRAAPEGTPDSEQCLSDAAPDYPMPQEVRAPTV

SEQ ID NO: 52401 - protein, 89 aa, Zea mays
  Coding DNA Sequence Number=SeqID_10622
MEVVGGRDHTTTPMMTKAERREGSIEKQGAEVGGALPRRKEEGTRNRDALAPSPLKAAATAARKPCPPGVAAARAAPPGDLTPAHAGGV

SEQ ID NO: 52402 - protein, 104 aa, Zea mays
  Coding DNA Sequence Number=SeqID_10623
MADAHQSRSDAHEYASNGSKINRTLGITPTLANPDDLGTPVAHTRPSFGDFITEEQEWHRGSRKPPGIDLNRRFSIARPRSWDTASRTRAQRPDPYVGRMCPWH

SEQ ID NO: 52403 - protein, 287 aa, Zea mays
  Coding DNA Sequence Number=SeqID_10624
  Homolog annotation: Hit_ID=Q5VPH5; Match level="QueryCoverage=41%, HitCoverage=97%, E-value=6e-30, Identity=66%"; Hit description =Putative auxin-induced protein TGSAUR22
  Pfam annotation: Domain name=Auxin_inducible; Domain location=9-122; Score=107.1; E_value=5.2e-29; Accession=PF02519.5; Description=Auxin responsive protein
MAIVNKKQGGAAASGLKHILKRCSSLGRRQQQHQRSVGEDEKEEEEATGLPSDVPRGHFAVYVGERRRRFVVPIALLDRPEFRTLLRRAEEEFGFAGAGGAGGALVLPCEEVAFRSLTSALACARSRALPLAGSDPHVARRTAHTSWPRLPAAANWRTCLQRAGAAGGELNSGQAREHGMAPGGSPCAVRALVWPRRTPNRLGLNTAQSNRADRANSGGGGAGSRRVARASQLKERDPLLLLAWTTLRRIFTIAIRTSSCVSDERGPPTFLCHHRQFARDNAGATED

SEQ ID NO: 52404 - protein, 79 aa, Zea mays
  Coding DNA Sequence Number=SeqID_10625
MAQPPSYLREMLLCCYLRVALEFVHTLEAHPHRQLAAALRQKSRRAEVTPVPEKLARARPRRSLRVRERRRSTQIRGLA

SEQ ID NO: 52405 - protein, 502 aa, Zea mays
  Coding DNA Sequence Number=SeqID_10626
  Gene Ontology: Mol. function=microtubule motor activity; Cellular component=microtubule associated complex; Biological process =microtubule-based movement
  Homolog annotation: Hit_ID=Q5VQ09; Match level="QueryCoverage=60%, HitCoverage=34%, E-value=1e-159, Identity=94%"; Hit description =Putative kinesin
  Pfam annotation: Domain name=Kinesin; Domain location=76-407; Score =342.7; E_value=6.2e-100; Accession=PF00225.13; Description=Kinesin motor domain
  Subcellular localization annotation: CTP_CleavageSite=86; ConfidenceScore=5.51e-01
MASSGVRNGVGSRMSAKPDRQGAGATPKTAAGKHRLSSAAAGGGAYRRTSSGPLHAAAGGRAASDGVSSRVRVAVRLRPRNAEELVADADFGDCVELQPELKRLKLRKNNWESETYEFDELLTEFSSQKRVYEVVAKPVVESVMEGYNGTVMAYGQTGTGKTFTLGRLGEEDTAARGIMVRAMEDILADITPGTDSVSVSYLQLYMEMIQDLLDPVNDNIAIVEDPRTGDVSLPGATVVEVRDQKSFVDLLRVGEAHRVAANTKLNTESSRSHAILMVNVRRSVKGRTEMDVSISGENGHSLSMMGSLRPPVVRKSKLVVVDLAGSERIDKSGSEGHTLEEAKSINLSLSALGKCINALAESSPHVPVRDSKLTRLLKDSFGGCHRLVHAQAQPHSSSESAPAQASFLASSTVADASRGRSSKSPKQELASDELMSSARTRDGEPCRLSRCRRAASGQAAAGVLERRPRTHAVRRPRGADRLRSGRCREHNYLYTLSVMGLA

SEQ ID NO: 52406 - protein, 93 aa, Zea mays
  Coding DNA Sequence Number=SeqID_10627
MEERPPELASLGKTQRLLRYRSPDCPVNQQSNDYFAPTVTCGPRRQKLQRSESNGIGDVAGAPDMSGVPENRSNANKSNVDIERELGLHLVPI

SEQ ID NO: 52407 - protein, 54 aa, Zea mays
  Coding DNA Sequence Number=SeqID_10628
MHLRSIGSRSRGWDTKAYNKAIGPPLQAMIDKEPEYYQKLVDSWSMTSVWTRQT

SEQ ID NO: 52408 - protein, 160 aa, Zea mays
  Coding DNA Sequence Number=SeqID_10629
MGVPDLCTRWRAINALQMPLEIPEGDEFELESSSTPDMSARKAQARQRVARGRKAGRLGTAADAGSPARHRRPEGWGRWAVGIVAAGGSAQRRTADGVSAWPEGWAQRAAAEGSVSPRRLGGRLKSGHSGGRGCVRERRAVRVSARLPARMRDMEAGPAS

SEQ ID NO: 52409 - protein, 95 aa, Zea mays
  Coding DNA Sequence Number=SeqID_10630
MSGCVRPRYTNTCWCVIQFDVNILFGESSQKEGQYVFKMHKDNDNNGIGDFIDASNGKNIIHPTTIDQLLKELHKMVEEKNTTNAVDALVGCPME

SEQ ID NO: 52410 - protein, 77 aa, Zea mays
  Coding DNA Sequence Number=SeqID_10631
MEWEKTQRQIFDDLVLSGKEYRVEKSEPAALEGCDNSGELEDSVSSWKSHEPGKHGEELEELCKGTLQAAVELIVCS

SEQ ID NO: 52411 - protein, 462 aa, Zea mays
  Coding DNA Sequence Number=SeqID_10632
  Homolog annotation: Hit_ID=Q7XEI9; Match level="QueryCoverage=53%, HitCoverage=52%, E-value=3e-07, Identity=28%"; Hit description=IQ calmodulin-binding motif family protein, expressed
  Pfam annotation: Domain name=IQ; Domain location=137-157; Score=23.0; E_value=0.0011; Accession=PF00612.17; Description=IQ calmodulin -binding motif
  Pfam annotation: Domain name=IQ; Domain location=159-179; Score=20.6; E_value=0.0055; Accession=PF00612.17; Description=IQ calmodulin -binding motif
  Pfam module annotation: Pfam domain module=IQ::IQ; Domain location =137-157::159-179
  Subcellular localization annotation: CTP_CleavageSite=58; ConfidenceScore=5.33e-01
MGKAARWFRSFLGKKDQATTKGQRRQQDQALPPPASAKRWSFGKSSRDSAEAAAAATAAAAVVSPDAGNAAIARAAEAAWLRSAACAETDRDREQSKHAIAVAAATAAAADAAVAAAQAAVAVVRLTSKGRPPSPVVLAAVRIQTVFRGFLAKKALRALKALVKLQALVRGYLVRRQAAATLQSMQALVRAQAAVRERRAALHHQPVRPRYSLQERYADDTRSEHGVAAYSSRRLSASVESPSYGYDRSPKIVEVDPGRPKSRSSSRRASAPLLDARSSGSGGGEEWCANNPASSPLPCYLPSGPRRIAVPTSRQFPDYDWCVLEKARPATAQSTPRYLQAHAPATPTKSVAGYSPSLNACPNYMSSTQASEAKVRSQSAPKQRPELACCGGGPRKRVPLSEVVVVESSRASLSAVMGMQRGCGPRAQEAFSFRTAVVGRMDRSLEVAGSENDRLAFLQRRW

SEQ ID NO: 52412 - protein, 95 aa, Zea mays
  Coding DNA Sequence Number=SeqID_10633
MACVTTDNRVVIKKETDGPELGLKRVRAGVATGASIPETNRKSVHPGTQFRRGPQHEQSSSGEHMRWYLQAMHGPSIAQWLCAVLCASRSYTTYS

SEQ ID NO: 52413 - protein, 98 aa, Zea mays
  Coding DNA Sequence Number=SeqID_10634
  Subcellular localization annotation: CTP_CleavageSite=77; ConfidenceScore=5.84e-01
MPAPPPPPPSVMPAAPGAMVPSPPPPSTTAPHLPSPTLSSDLFCRVFTTLARDLRRRPHLVQRPPPPEMREEALERLCEVVWDSPGRRETPLHVRSQR

SEQ ID NO: 52414 - protein, 108 aa, Zea mays
  Coding DNA Sequence Number=SeqID_10635
  Homolog annotation: Hit_ID=Q1SAU7; Match level="QueryCoverage=54%, HitCoverage=6%, E-value=7e-15, Identity=62%"; Hit description=Paired amphipathic helix
  Pfam annotation: Domain name=HDAC_interact; Domain location=17-83; Score=-24.0; E_value=0.036; Accession=PF08295.2; Description=Histone deacetylase (HDAC) interacting
MNQLRIGILMNLQKVEQRHTDVDVEVCCRDDRLLKGIYVDGVPYAHCRWFELDMLLESVNAATKRVEELIEKMQDNSVKPESPIRMDEHLTPLNLKCIERLYRDHVLN

SEQ ID NO: 52415 - protein, 128 aa, Zea mays
  Coding DNA Sequence Number=SeqID_10636
  Gene Ontology: Mol. function=L-lactate dehydrogenase activity; Cellular component=cytoplasm; Biological process=tricarboxylic acid cycle intermediate metabolic process
  Homolog annotation: Hit_ID=Q7DNA0; Match level="QueryCoverage=90%, HitCoverage=32%, E-value=1e-49, Identity=84%"; Hit description =Lactate dehydrogenase
  Pfam annotation: Domain name=Ldh_1_C; Domain location=1-126; Score= -13.6; E_value=1.5e-05; Accession=PF02866.8; Description =lactatemalate dehydrogenase, alphabeta C-t
MVASASVASPTSHRCFDEEVLEGIRRAVVDSAYEVISLKGYTSWAIGYSVASLAASLLCDQRRIHPVSVLARGFHDIPDGNDVFLSLPARLGRVGIQGVTEMELTEEEAKRLRRSAKTIWENCQLLGL

SEQ ID NO: 52416 - protein, 51 aa, Zea mays
  Coding DNA Sequence Number=SeqID_10637
MGVARLLPATVGTFRGWPIGSRSCLRRVAMAAAPLPGKGPSVSLKLNPPST

SEQ ID NO: 52417 - protein, 38 aa, Zea mays
  Coding DNA Sequence Number=SeqID_10638
MGGARSLSATASTFPTIKIIGLVSPSVFAYLRNANTLL

SEQ ID NO: 52418 - protein, 101 aa, Zea mays
  Coding DNA Sequence Number=SeqID_10639
  Subcellular localization annotation: CTP_CleavageSite=41; ConfidenceScore=5.34e-01
MIVALYWWAGMFPAASVANALPFSSTTWLVRSPSLGGEVVLVSHGARRRLAEQQADEEDEEDEVEVVENATAEPGCRAKENTTEMEEKATEMENATGMEEN

SEQ ID NO: 52419 - protein, 229 aa, Zea mays
  Coding DNA Sequence Number=SeqID_10640
  Subcellular localization annotation: CTP_CleavageSite=11; ConfidenceScore=5.08e-01
MAAIKKTKIVLAQPAVGAQPSRPPFFSRAPGSVRGAGDEAAYRASLRYRALHQDYQDLIKEIQAKKKRLHMKRLKKQRLLAEVKFLRKRYKSMSENPSQTIVCRVRNPAMSSASWTAGSAGDTWHQSVRAAGSSSRSQLVQRTHGGSPRASPVIDLNEACEPGYEEMEIEGQHGYMSPLGVNKSKRYPMEGAAASPSQMRMHVFWDVQNPAGRSGKRKISWQDQLALRV

SEQ ID NO: 52420 - protein, 68 aa, Zea mays
  Coding DNA Sequence Number=SeqID_10641
MRRSLSQVFHVEQATEATLEVPHTREHLPSHFEETRHTKGLTKYTFIRKQHSSSVHMKTKLRSFGSAV

SEQ ID NO: 52421 - protein, 205 aa, Zea mays
  Coding DNA Sequence Number=SeqID_10642
MAEPTGELAGANPRSEARPSIVLLTDLAMASMKDHMARNPNGARSGGLQGARPWRTPTLASRARSTGRVEGGGAMDMELAEGRVPLSSAMGNGTCAMAREHLLKAGPEEVSLGEAPTCSIQGRGMERPRKTRKEGARGEIYYAMGREGNARELDQRGCWPTMETSCCRAPWRELEMAWGTVGVSCAQGKKAVLHGRDGLKKKSGG

SEQ ID NO: 52422 - protein, 136 aa, Zea mays
  Coding DNA Sequence Number=SeqID_10643
MRGEKQGREAGVRRPASAVQERSYSRVSGIPRSYNRVTHKPFPMPPSQALTDAAIDYGGMSICMAMSWNGRWCLTSVHLQAKGYCNVFDNHTLDNQAQDSVIRTQSLEGEDYRNDITVLYGVAVMVWSQTKNSISL

SEQ ID NO: 52423 - protein, 70 aa, Zea mays
  Coding DNA Sequence Number=SeqID_10644
MAVRRGIPALLFLETVAMVDTRKGGGIDLPTNPLNRRVLRQKQAKMNPLNPLNPPPIGIDPVVAAQMQML

SEQ ID NO: 52424 - protein, 167 aa, Zea mays
  Coding DNA Sequence Number=SeqID_10645
MGVFNPCCWRYKKKGALEHWASSSKQGRALLGCQGCWPSRGIGASATSAMELLLEFLGACWFEEEGGGGGVRAQGKRVGEGRSLERGEAMDGARKGGGRRPAHRPGEGGPCCMGAECHGWPRGGSGGAELSAGCSSWTAEGGRKGAMGEEPSSLHAAVGKRRKKRAG

SEQ ID NO: 52425 - protein, 76 aa, Zea mays
  Coding DNA Sequence Number=SeqID_10646
MELGWGEEEDLLTGLGRRTLLHGCRVPWLSRGGSGGTELSAGCSPWTAEGGRKGAMGEEPSSLRAAVGKRRKKRAG

SEQ ID NO: 52426 - protein, 384 aa, Zea mays
  Coding DNA Sequence Number=SeqID_10647
  Gene Ontology: Mol. function=RNA-directed DNA polymerase activity; Cellular component=mitochondrion; Biological process=RNA-dependent DNA replication
  Homolog annotation: Hit_ID=UPI00004C1731; Match level="QueryCoverage =99%, HitCoverage=28%, E-value=1e-149, Identity=64%"; Hit description= UPI00004C1731 related cluster
  Pfam annotation: Domain name=RnaseH; Domain location=1-123; Score= -33.2; E_value=0.071; Accession=PF00075.14; Description=RNase H
  Pfam annotation: Domain name=rve; Domain location=189-337; Score =61.3; E_value=3e-15; Accession=PF00665.16; Description=Integrase core domain
  Pfam module annotation: Pfam domain module=RnaseH::rve; Domain location=1-123::189-337
MFFDGSLMKTGAGAGLLFISPLGKHLRYVLRLHFPASNNVAVYEALVNGLRIAIELGVRRLDARGDSRLVIDQVMKNSHCRDPKMEAYYDEVRRLEDKFYGLELNHIARRYNETADELDKIASGRTTVPPDVFSRDLHQPSFKIDDTPEPEKVSALPEAPLAQPEAPSAQPEAPSAPEAPRALVGNAFRQGFYWPIAVADATRIKAPGGYTHLLVAVDKFSKWIEVRPLNSIRSEQAVAFFTNIIHRFGVPNSIITDNGTQFTGRKFLDFCEDHHIRVDWAAVAHPMTNGQELPSMVWSLRTTPSHATGFMLFFLVYGAEAILPTDLEYGSPRRKAHDDRSNRTNREDSLDQLEEARDMALLHSARYQQSLRRYHARGVRSRDL

SEQ ID NO: 52427 - protein, 184 aa, Zea mays
  Coding DNA Sequence Number=SeqID_10648
  Homolog annotation: Hit_ID=Q8SA97; Match level="QueryCoverage=56%, HitCoverage=11%, E-value=4e-07, Identity=37%"; Hit description =Ornithine carbamoyltransferase
  Subcellular localization annotation: CTP_CleavageSite=30; ConfidenceScore=5.03e-01
MSCLQLSTNARQLLSFPNPCFRHRKRDLTVVSLLQEAPPRPTPELGLNLDAGRRTPPRPTLGLGLSLDHGRRTPPRPTPGLGLNPNLGRRSPPRPTPELGLNLDVERQTPPRPTPGLGLNLDLGRRSPPHPTPGARTQPRPRMMVSASPDPRAQTRPRPRRSLRLARPRARTDHVTGGPSLPYP

SEQ ID NO: 52428 - protein, 87 aa, Zea mays
  Coding DNA Sequence Number=SeqID_10649
MNEGLKPKTSVCSISEEISEEKKISEEEKMYEEKKVADPFIAGFYESMTKTNTEKITKEIMADLSEDSDDSDEFDVESGDEDSEDRP

SEQ ID NO: 52429 - protein, 106 aa, Zea mays
  Coding DNA Sequence Number=SeqID_10650
MGGVATVMTKADGVVLSRRGTPMPHRMMCWPKHEKDRHISTSSGGVRHRNGRTVVGAGAPTGCDEGVMGVLGVLDVGAACERRDGERYCRGWFAPGALLGTWARGS

SEQ ID NO: 52430 - protein, 434 aa, Zea mays
  Coding DNA Sequence Number=SeqID_10651
  Gene Ontology: Mol. function=protein kinase activity; Cellular component=integral to membrane; Biological process=protein amino acid phosphorylation
  Homolog annotation: Hit_ID=Q6EUQ1; Match level="QueryCoverage=43%, HitCoverage=23%, E-value=3e-68, Identity=73%"; Hit description =Putative leucine-rich repeat transmembrane protein kinase
  Pfam annotation: Domain name=LRRNT_2; Domain location=38-78; Score =20.2; E_value=0.0068; Accession=PF08263.3; Description=Leucine rich repeat N-terminal domain
  Pfam annotation: Domain name=LRR_1; Domain location=104-123; Score =11.7; E_value=1.9; Accession=PF00560.23; Description=Leucine Rich Repeat
  Pfam annotation: Domain name=LRR_1; Domain location=126-148; Score =17.2; E_value=0.059; Accession=PF00560.23; Description=Leucine Rich Repeat
  Pfam annotation: Domain name=LRR_1; Domain location=150-172; Score =8.3; E_value=8; Accession=PF00560.23; Description=Leucine Rich Repeat
  Pfam module annotation: Pfam domain module=LRRNT_2::LRR_1::LRR_1::LRR_ 1; Domain location=38-78::104-123::126-148::150-172
MPEHWSTGRRWTAGALGGWSRDVGRNQRGQRRGVGFLAAGRVSAINGLYVALGSPKLPGWSASAGDPCGESWQGVTCTGSSITSIVFNAANLGGQLGSLGNFTSITEINLSNNNIGGTIPEDLPVTLQNLFLSDNQLTGSIPMSLSELHSLTAMSLNDNHLDGKLPDAFDSLTGLGYFFQQLQWSITTFIGKLDITDYIDVLLHRHMQDNQLSGTLNVLQDLPLKDLCRCYPRDVILRRAPSERCSCMCTIMDEDKMDQYPKSHQNKQRAGARKEETTINGATKVPKNTKTVTIVDSSGCRHELTQNVNNIGDVRTSYAKVDKTANKMMIASGINNMNTISDTKMKVTIHESVHRTMISKTSTIKDVLNVFALTEVIAIRCGGDLNPKEEAKRTQVRHVELRTESCLDEGNVINIITSDQHIINIEKNEGATSR

SEQ ID NO: 52431 - protein, 72 aa, Zea mays
  Coding DNA Sequence Number=SeqID_10652
MGARGLTISHVKSHLQLVDIDKKEMEMIKDLPEELKQDIKRYLCLELLTEALTSSLLDGVLLILGVFDVKTK

SEQ ID NO: 52432 - protein, 70 aa, Zea mays
  Coding DNA Sequence Number=SeqID_10653
MSWTRVPPVLDHIGNTARSTTFLCECVFQVSATTTAPAFELFDTLHVEAAADPQIAQLKAQLAAGTAREG

SEQ ID NO: 52433 - protein, 159 aa, Zea mays
  Coding DNA Sequence Number=SeqID_10654
MEARGGAGTGRHATARGQGGARRRWGRGWRSAAVGERVALGGGGGEGGAGTGRRAAAGAGRRAYRRPRRARGVIAVYANILCAYYVNRAHDPAHAVTIKTPPRRQGLGFSGGGGSLGRASRRQRAREPRPSRRSPTVLIGGRGGGTKRTLSVCFCTASG

SEQ ID NO: 52434 - protein, 379 aa, Zea mays
  Coding DNA Sequence Number=SeqID_10655
  Homolog annotation: Hit_ID=Q53QJ2; Match level="QueryCoverage=47%, HitCoverage=16%, E-value=4e-19, Identity=31%"; Hit description =Agenet domain, putative
  Pfam annotation: Domain name=DUF724; Domain location=178-370; Score= -34.1; E_value=2.2e-05; Accession=PF05266.4; Description=Protein of unknown function (DUF724)
MTEQNIEIDRFFIKEKLDNGTLELGHLRGIPQYAEGSRVEVMCDKQGRVWRPATIKNMVGGTNYVVSYGNGQSSIEVLHTMFIRRPEPIQMEVEAPNDSNKGFTWKPVRTCIHTLTGPKLFPAANDITIVSSQHPWAEPLQPVSEKSPGPSSLLHPVVMADTSAFMALAVPNSSDLSTAFSTTSLLLMPNDKMEVFQKLPQIPHFREAWNCPPELREGRALGLMVCFANMAKSIKDMRIQEEPRLYQEKMNILLEMEENGFETGPLKVRLHNLLCTRNHHMNLKSRKVRLEKEILEIEAINCGLEQRLKFLDMCIMGMEEKKYQEMKGSLDIQKTENCSLISKLQVYLCQVEESLKYAEADFCSIATAPWQPHVVPSIP

SEQ ID NO: 52435 - protein, 614 aa, Zea mays
  Coding DNA Sequence Number=SeqID_10656
  Gene Ontology: Mol. function=transporter activity; Cellular component= integral to membrane; Biological process=oligopeptide transport
  Homolog annotation: Hit_ID=Q5JLL0; Match level="QueryCoverage=95%, HitCoverage=98%, E-value=0.0, Identity=70%"; Hit description =Putative dicarboxylate transporter
  Pfam annotation: Domain name=MFS_1; Domain location=70-554; Score =27.3; E_value=1.8e-05; Accession=PF07690.6; Description=Major Facilitator Superfamily
  Pfam annotation: Domain name=PTR2; Domain location=132-538; Score =377.6; E_value=1.9e-110; Accession=PF00854.12; Description=POT family
  Pfam module annotation: Pfam domain module=MFS_1::PTR2; Domain location=70-554::132-538
MSKSGRQAEEDDGSKHWSRSVTCVDGKKVQERAAWGASDGGGNLVQDAVDYRGCRADKSSTGGWVAAALALGIELCERLATMGIAVNLVTYLTDTMHLPSAAAANVVTDFMGTSFLLCLLGGFLADSFLGRYLTIAIFALIQAIGTGLLAVSTEVRQLRPPPCGPGAAGPCEQATGFQMGVLYVCLYLIALGTGGLKSSVSGFGTDQFDERDARERAAMGLFFNRFFFFISVGTLLAVTVLVYVQDHVGRSWAYGICAAAMLAAIAVFLSGTRRYRYRRSSGSPIVHILQVLVAAARKRNIAKHPLAVSALYEDRPEHARIPHTAQFPCLDRAAVMAGDDDNEVGHDGRPTPNPWKLCSVSRVEEVKMVARLMPVWATTILFWTIYAQMITFSVEQATTMDRRMGGFEIPAASLTVFFVGAIMLTLAFYDRVFVPLCRSLMTGRQGLTNLEKIGIGLVLSIVGMAAAAISEKKRLAVAATSGVAGHGSLPISVFMLTPQFLLVGAGEAFIYTGQLDFFITRSPKSMKTMSTGLFLTTLSLGFFLSSALVSLVKSCTRWLGDTINHSRLDYFYWLLAVLSVVNLVAYLVCAMWATAPTSSQAEQPQPAMVADEKC

SEQ ID NO: 52436 - protein, 200 aa, Zea mays
  Coding DNA Sequence Number=SeqID_10657
  Gene Ontology: Mol. function=RNA-directed DNA polymerase activity; Cellular component=chromatin; Biological process=RNA-dependent DNA replication
  Homolog annotation: Hit_ID=UPI00004C1732; Match level="QueryCoverage =99%, HitCoverage=11%, E-value=3e-40, Identity=44%"; Hit description =UPI00004C1732 related cluster
MGRPWYENFMAIPNCTYLKLKLSGPHGVITIVSLFGHAYECAVESYELTLEIITSKELTIIREQLVENAPNSMKSARSFNQRRTSKKSSLTMKTPTKRWCASAHRFSTSAPVNFLYVNKDIFVWKPSNMLGILREVVEHSLKIRVDSKPVKELMHHFNEEKYRAISEDITKLLVARFIKEVYHPNWLANLVVVQKMNVKW

SEQ ID NO: 52437 - protein, 661 aa, Zea mays
  Coding DNA Sequence Number=SeqID_10658
  Gene Ontology: Mol. function=helicase activity; Cellular component =membrane; Biological process=viral genome replication
  Homolog annotation: Hit_ID=Q6YTQ6; Match level="QueryCoverage=99%, HitCoverage=48%, E-value=0.0, Identity=48%"; Hit description =Helicase-like protein
  Pfam annotation: Domain name=DUF889; Domain location=363-619; Score =359.1; E_value=7.2e-105; Accession=PF05970.5; Description=Eukaryotic protein of unknown function (DUF889)
MAQILSEPFLRRTMLTEWFVCNLNNSNARDLTYFEFPSKWRWDEKTRSWRPRLARESKIGRLYYVHPSAGERYYLRMLLLTVKGACSYEALRTFNNNVYPSFKEACQACGLLGDDNEWLHAFEEAATWATALQLRQLFVTILLYCQISNEHSFFEKVWKLMTDDIEYNIQRALSCPKFQMTDNELKDELLTILFNMVGIYMTLTYLKSESQSLFSQLNADQLSAFNTIVECVLSGRPGLYFVSGYGGTGKTFLWNAIVLYLRSEGKIVLIVASSVVASFLLPAGRTAHSRFKISCDLDSNSTCNIKKGTMLADLIKRTSLVIWDEAFMAHRMTFEALDRSFRDILSSESSNSQNMPFGGKVIVLGGDARQILPVIEGGTKSQVLGAVITNSYLWHSITMLYLTQNMRLSSTDLSIDAKKEVESFSKWILAIGEGKVPARAKENETEKCWIKLPPEILLMPIKDNLSCIVQTAYPNIETMYDNIEYLKERAILAPTNEVVDIVNNYMVSTLPGDTKEYLSFDSIAKGPNMHASYDMLYPIDFLNSINGNNFPSHSLILKKGTPIMLLRNINQSQGLCNGTRLIITTLGDLVIEAKIMTGKHKGKSVVIPRISLTLKNPRYMFVLERRQYPIKVCYAMTINKSQGQSLSEVVVYLKNPVFTHG

SEQ ID NO: 52438 - protein, 112 aa, Zea mays
  Coding DNA Sequence Number=SeqID_10659
  Homolog annotation: Hit_ID=Q5ZE15; Match level="QueryCoverage=37%, HitCoverage=12%, E-value=8e-10, Identity=59%"; Hit description =Mitogen-activated protein kinase kinase-like
MKCVEGLLQLHYRGVAHLDVKPDNILANSRGEIKMGDFNISRVLYVVPYHARVGRPEEEDKPGEQERRGDWNAGTHQKEKNRSRRHARVEPEPLEARRRLAHRPNPKPPPPR

SEQ ID NO: 52439 - protein, 85 aa, Zea mays
  Coding DNA Sequence Number=SeqID_10660
MAPCKVAAALLLLITTISVNTVTGSRCNAQEKNQIVSLCQMYIQRGTLVQLPSQTGPCCAAVRELERVHRGHAVKGAMAWNGWWW

SEQ ID NO: 52440 - protein, 204 aa, Zea mays
  Coding DNA Sequence Number=SeqID_10661
  Subcellular localization annotation: CTP_CleavageSite=33; ConfidenceScore=5.20e-01
MAGCYTPGVFTPGPPGSQGQGPRGPGPRAPGPLTKKEKGAAGNPGGPTLPPEGLVGGQSPRAGRGRFPPDKGGTGVPPRKGGEYSPPPREGLSRGPPPLNQSQNPPSGNPERVNRGKPGDGNPGPPRRKLGGEQGRGLTGRQGAPPGKGPNGPGRGPARAGQGRSRARAGGRGRARARGRRGGRGREREEKGRGGELTSGSKIR

SEQ ID NO: 52441 - protein, 270 aa, Zea mays
  Coding DNA Sequence Number=SeqID_10662
  Subcellular localization annotation: CTP_CleavageSite=32; ConfidenceScore=5.31e-01
MAFVSTARRPGASRHGRRPRLAHVRRCSAPAVAASRRDPDGLPRPSPRRGQPWRRGEPRPRARAPSQPSARRPRPLSMPRPPRPRPPVPLARSRPRARDGALARPWPWRGGPTRPRLARRRPARPPRPVMARRPAASAVRAEPRRGPCTHGAPGELAAPAACGHGGSVPPALACPAPAQRGPGPTQLQLARPWCPCVARARFGPGVCATRSRHVSAALRVRARVVHGAFAWLVVPATQHIASCRVRDTTVYPEPPVYPPVHSMRVTALFN

SEQ ID NO: 52442 - protein, 625 aa, Zea mays
  Coding DNA Sequence Number=SeqID_10663
  Gene Ontology: Mol. function=inorganic anion exchanger activity; Cellular component=integral to membrane; Biological process=anion transport
  Homolog annotation: Hit_ID=Q1ZYR6; Match level="QueryCoverage=89%, HitCoverage=91%, E-value=0.0, Identity=66%"; Hit description=Boron transporter
  Pfam annotation: Domain name=HCO3_cotransp; Domain location=57-497; Score=-255.6; E_value=8.9e-07; Accession=PF00955.11; Description =HCO3- transporter family
MMNPVVTAALYRLVKESAAMYCELTEVMVVLLDRFADLGTPACVRVHSIFTSTAWNLGMLSSRFTDRTAWNLDSALTTVETLASAAICGIVHSIIGGQPLLIVGVAEPTIIMYTYIYNFAKNQPNLGEKMFLPWATWVYIWTAVMLFLMAIFNVAAILNKFTRCTIYCISQQERKVIAGTAWQRSLIADYGVPLMVILWTSLSYSLPSRIPSGVPRRLFTPLPWEPKSLQHWTVAKDLFSVPTVHIFLAIVPATMVAGLYFFDHTVASQMSQQKEFNLKNPSAYHYDILVLSLTTLICGLLGIPPSNGVLPQSPMHTRSLAVLKRQLLRKKMVQTAKEGMMNNATSSEVYVKMQDVFIKMDHGGDTVSAHKEPKDLKDAIIPEGNGSGTVPEVFDPEKHVDAYLPVRVNEQRVSNLLQSLLIAGCIRVTPLIQKIPTSVLWGYFAYMSIDSLPRNQFWERIQLLFITPQRRYKVLEGAHASFMESVPFNTICTFTLFQLIYLLIVFGMTWIPVAGILLPLLFFFFLIIIRQHFIPKYFDPSHLRELDAAEYEELKGFTPDPSVCEDESVRSGDAQPGYASEILEEFTTHRGELKRRNSTFHDGRLLQLNSVKMTRELSRVPSWLT

SEQ ID NO: 52443 - protein, 217 aa, Zea mays
  Coding DNA Sequence Number=SeqID_10664
  Homolog annotation: Hit_ID=Q8LJJ6; Match level="QueryCoverage=42%, HitCoverage=19%, E-value=8e-12, Identity=48%"; Hit description =Clathrin assembly protein-like
  Subcellular localization annotation: CTP_CleavageSite=55; ConfidenceScore=5.17e-01
MGTNGHLDLDEGAHRARSPPSPRRLPRPQSLLNLPPQGAGGSAAASGGGGRRGRRAGAAAGARLRAGLPGDGSQIRPLSPLTERIQGTTRSCPRPFACFVVLSSPRGDPTYEQEVFLATRCGRRMLDLSRFRDRDRARCRDWCFAAFVLAYATYLDDRLKERMQDRGAGGASPGKWHVDGDPVGMACQVAEAWELVPRGRSASATETTTTEDVIGKA

SEQ ID NO: 52444 - protein, 217 aa, Zea mays
  Coding DNA Sequence Number=SeqID_10665
  Gene Ontology: Mol. function=ammonium transporter activity; Cellular component=membrane; Biological process=transport
  Homolog annotation: Hit_ID=Q9FTI8; Match level="QueryCoverage=12%, HitCoverage=14%, E-value=7e-07, Identity=88%"; Hit description =Ammonium transporter-like
MPDDQLMIGDDAAHGEEAYALWGDCERKQQKSGGNGKKGGGNEKKGITLQQREQRAVSRGSPQHPRSYRRWTTHSLSSTVHTYAVAGLHLHVVVDVLEGLLRTLGFLHGPPPPPSGCVCALFIVAWNVVVTTGIILVVGIFVPLPAAHARLPAQDPRATTRRTGRALWGDGEKFEVTRNEAARACAWGDCIREETAEQRSTGCGWPEWEAEASPIQL

SEQ ID NO: 52445 - protein, 115 aa, Zea mays
  Coding DNA Sequence Number=SeqID_10666
MSRDYAKKEIMTDEKAASSRRTLSRESGNKNKEESSSFIKSLQRGDKKKKMKKVVYYETDSSSPSTSSSESSVASKRHERKKYKTGPREEEMQWKSLGCVQPNSSSVFGAQADRR

SEQ ID NO: 52446 - protein, 140 aa, Zea mays
  Coding DNA Sequence Number=SeqID_10667
  Subcellular localization annotation: CTP_CleavageSite=10; ConfidenceScore=5.26e-01
MSGEPTPPYRADLRRPGPRRARARSRLGEPPQPRPLVRPPRPAAPTSTAPPRPRRARPTPSPRSAARPVPRLGRPPSRPGSAACPRARPCPRPSASSLARARLPRRACPLAPPCLARVVTAPTWPRVRPSVPMARGLELG

SEQ ID NO: 52447 - protein, 546 aa, Zea mays
  Coding DNA Sequence Number=SeqID_10668
  Gene Ontology: Cellular component=integral to membrane; Biological process=peroxisome organization and biogenesis
  Homolog annotation: Hit_ID=Q2QWV1; Match level="QueryCoverage=76%, HitCoverage=87%, E-value=0.0, Identity=87%"; Hit description=Amino acid transporter, putative, expressed
  Pfam annotation: Domain name=Aa_trans; Domain location=123-536; Score= 394.1; E_value=2.1e-115; Accession=PF01490.8; Description =Transmembrane amino acid transporter protein
MGEVATMSLEVMKLAAVPKANVDMFVAHRSKRRVVSSAGDSIEKATKLKAARNLDSSFAEVRRGRRDSIRGREGGSSLSQLAMAPAPHNGLNNNHPVAPMDVSVEAGNAGAAEWLDDDGRPRRSGTFWTASAHIITAVIGSGVLSLAWAIAQLGWVAGPAAMLLFAFVTYYTAALLAECYRTGHPETGKRNYTYMDAVRSNLGGVKVVFCGVIQYANLVGVAIGYTIASAISMKAVRRAGCFHAHGHADPCKSSSTPYMVLFGGVQILFSQIPDFDQIWWLSIVAAVMSFTYSSIGLSLGIAQTVSNGGFKGSLTGISIGAGVTSTQKIWHTLQAFGDIAFAYSFSNILIEIQDTIKAPPPSESKVMQKATRLSVATTTVFYMLCGCMGYAAFGDNAPDNLLTGFGFYEPFWLLDVANVAIVVHLVGAYQVFCQPIFAFVERRAAAAWPDSAFVSRELRVGPFSLSVFRLTWRSAFVCVTTVVAMLLPFFGDVVGAPRRRLLLAAHRLLPRRNTLSVSCLLVSVAAAAGSIADVIAALKVYKPFSG

SEQ ID NO: 52448 - protein, 123 aa, Zea mays
  Coding DNA Sequence Number=SeqID_10669
MAKKARPAPVRRKVGTSILAPAKAVKTDAGSSAGAVAHPILWVAAAWDVLQRWAEAARFALEGQTGQEMADVETAVTPPAMPAEAIPGPSTTGLGQADATSAVVSPTLSTPAISHLDSPVKVA

SEQ ID NO: 52449 - protein, 251 aa, Zea mays
  Coding DNA Sequence Number=SeqID_10670
MAILEHPLQLDTVIWFESLEFMSLGFGYDMGRLELRRCPPRRRRQRRNNAPCLVNAPRKADDVDSLTRDISCVSFMPKASTYVAPTPTPPAPLLQVGRRQLHRLLLLRVRRCELHHLTGGPSVFNPIFFQMSFDLPSYPYTTSTYTSMYVDLPEILGYIDFEAENDLGLGLGFSRLRGPRAMRYFLSTCNHFPSDGSNDYSFDDEGYDLTQECFHTGHEEHDEGNQLGMPREANALTPSPHAREPREQGAV

SEQ ID NO: 52450 - protein, 59 aa, Zea mays
  Coding DNA Sequence Number=SeqID_10671
MESTFVRNIARDTSDHVPCVITVKTDIAKSKAFSLKTTGFYMKTSNPFSMAARTSLVLY

SEQ ID NO: 52451 - protein, 54 aa, Zea mays
  Coding DNA Sequence Number=SeqID_10672
MARLGHAVANGEGTSAGALTNSHWIMLKLKSKVSSVSLKFWISAWTSLTAKLEA

SEQ ID NO: 52452 - protein, 125 aa, Zea mays
  Coding DNA Sequence Number=SeqID_10673
MGRGKRGRGWPHRADRKRKRPLSPPSEDFGDSEYSEEPSSPFSHSLLVLFLATEAQSRRRRASPEFVYAVAVRPAVRGASPEQSCPSPSNALTGAPHDIKNPCHVPLLLATMSRNPSPNTFPARD

SEQ ID NO: 52453 - protein, 150 aa, Zea mays
  Coding DNA Sequence Number=SeqID_10674
MTESHIPSGGGALFGLQPTARHPPPPAAGRVHSGARPGEGRDELGRSTVSYKQAELLQGAIRRRHARPDLSKGQGHGGGAFGRGNHRAPRGVLYPGQSGPQPESRSLRRRAACTESEPRSQESAWRGEGDEDGTDRWVPHGNDQKKRKRE

SEQ ID NO: 52454 - protein, 172 aa, Zea mays
  Coding DNA Sequence Number=SeqID_10675
MAERRDPSRDIHHELAERERKTGTRREQGAPGTASRGGCACGEKERRAQWRSEQGRKSSARRGTRRLGTRRGGSRELHGGRLGRAGRSADMEIKRREQLGSREARLSRLAGRWAHVAMGEKQSRAAMDGCSRKKEARPGDQAAASARGIGEKRLPIFPSAERWEDRRRLEKI

SEQ ID NO: 52455 - protein, 279 aa, Zea mays
  Coding DNA Sequence Number=SeqID_10676
  Subcellular localization annotation: CTP_CleavageSite=47; ConfidenceScore=5.19e-01
MATCAHLPASFSASQPLPPLYLHGRRSFQLSHGGRREAPWSLLAACPADEFPCAWSFSLPARSSTARAAPFPRACNLLYWPSLVLPARAVSLFFFPSRLVLHLASSWRMSLLGSLPSAMAASTTFSCRCFSSGARPCVGHGAWLPSPCFLCPGAQPHAASLLGPRSWLQLGSVLCRHPILHLFPQCALVFARCCARSPLPARYGRGPLPMPSSLNVVDSSIVPVDELRFFGFSPSVRLILDLVVVIQKSQESGKDEASSVVFTKCSTQRLNQNPYRVHE

SEQ ID NO: 52456 - protein, 377 aa, Zea mays
  Coding DNA Sequence Number=SeqID_10677
  Gene Ontology: Cellular component=integral to membrane
  Homolog annotation: Hit_ID=Q2QQ06; Match level="QueryCoverage=99%, HitCoverage=100%, E-value=1e-148, Identity=75%"; Hit description =Expressed protein
  Pfam annotation: Domain name=UAA; Domain location=49-372; Score= -170.5; E_value=0.068; Accession=PF08449.2; Description=UAA transporter family
  Subcellular localization annotation: CTP_CleavageSite=89; ConfidenceScore=5.15e-01
MSSSPLITAAASAAVVALAVANRVLYKLALVPLKAYPFFLAQLTTFGYVAVYFSMLYTRYRTGLVTRDMLALPKHRFVAIGLLEALGVFAGMSAGGSFVHVHSENAMLPGPAIPILSQSFLVWQLIFSALLLGRTYSARQVIGCFLVVSGVILAVASGADDGQLLSDVKLIWPALMIASSAFHAGASILKEAVFIDGAKRLKGKRPDIFVVNSFGSGFQAVFVFLLLPFLSNLRGIKFAELPAYLNGGAECFLNVAESPIGHAFSIALGKTVCVCCSLATFLTDCGGAPFLPLLFIVVNMAFNVSLLNLVKMSSAIVASLTATSAVPISIYILSLPLPYIPHGTELSTSFIIGAVILLMGLILYNLPQSSLKQLKAD

SEQ ID NO: 52457 - protein, 157 aa, Zea mays
  Coding DNA Sequence Number=SeqID_10678
MAGAKINRGGSLPLRLGSHHGGVPRHNGGEVVRGYGLCPEGRTSRSVPRDSLASWITTKWLRSILFDAHYRDACEEKYRSARVCPRGPTRKRTTHGRARKFPRSEGMTPRPEVSVQGGAWASGAAGERVPHGSDAVHTRAERKFNARGAACLRTRAL

SEQ ID NO: 52458 - protein, 113 aa, Zea mays
  Coding DNA Sequence Number=SeqID_10679
MGEVAARVCMWRRVQLLGEDEGVAAAKGDRGRGVGFKEDLRRRSRPPTVSHHGARSFFVTSLIREKSSRLRNAEGPKNTFPKLIAEKRLKYFERVVAHYAAGTNDLVIHFPSA

SEQ ID NO: 52459 - protein, 405 aa, Zea mays
  Coding DNA Sequence Number=SeqID_10680
MAKARATTPRYPKTYPRRPEVIRYSIPSKGGIEPLDPIERDQDQANHPQVLLGRVFGSLADSYQMELGPPLGLPINSSFEMSCSLPIEGSMALSPSSSLRRGDKEAYNRKIQGTPRSSSCLVRGLTGYPCNSCCGNLLETLAIQCRRSGLPLHPCFGQVTDEVNHVYRGEDSTPRTKEPPNKCQNTSLEGLGATVGGADQLSDANSISPDVELGHDYPLPHESCRRPLLQLWHMSSNLKTGSVATSGVPPPCLCPVLPSISMMEDAPNIIKYSGAVTSLKKLFPTLSTVSTTTVWENPLQGARVCDRALGLGLGSKHETSRKHSRCKITSFSIEYILFSIRQERRLRVKFQKGQGLSRKISPDTENPEGGPWVDLHFGQGLFNKIVIAKGYQEILTVRSEANALD

SEQ ID NO: 52460 - protein, 149 aa, Zea mays
  Coding DNA Sequence Number=SeqID_10681
  Gene Ontology: Mol. function=kinase activity; Cellular component =ornithine carbamoyltransferase complex; Biological process=amino acid metabolic process
  Homolog annotation: Hit_ID=Q6QP54; Match level="QueryCoverage=70%, HitCoverage=37%, E-value=9e-25, Identity=60%"; Hit description =Putative kinase
MAPPVDMVGPCLGFGDVEAPPRSRSSLSFEAEVESEPSGRARQRPSAEARAESKPWGRAKRSPSSSGAEPESEPWVGRSGVRRLPGLSPSPSPGSGGAEFVVFRGSRSGAGGAVLLSDRSVGRRSDCGHFGSIDRRARVRIKGVKPPLH

SEQ ID NO: 52461 - protein, 745 aa, Zea mays
  Coding DNA Sequence Number=SeqID_10682
  Gene Ontology: Mol. function=nucleic acid binding; Cellular component= intracellular; Biological process=DNA integration
  Homolog annotation: Hit_ID=Q8W0X4; Match level="QueryCoverage=96%, HitCoverage=50%, E-value=0.0, Identity=89%"; Hit description =Putative pol protein
  Pfam annotation: Domain name=RVT_2; Domain location=341-596; Score =525.6; E_value=5.5e-155; Accession=PF07727.4; Description=Reverse transcriptase (RNA-dependent
  Pfam annotation: Domain name=rve; Domain location=16-167; Score =111.8; E_value=2e-30; Accession=PF00665.16; Description=Integrase core domain
  Pfam module annotation: Pfam domain module=RVT_2::rve; Domain location=341-596::16-167
VYASGGSSWIIDSGCTNHMTGEKKMFTSYVKNKDSQDSIIFGDGNQGKDKSETQRTLKRFLRRAQNEFELKVKKIRSDNGSEFKNLQVEEFLEEEGIKHEFSAPYTPQQNGVVERKNRTLIDMARTMLGEFKTPERFWSEAVNTACHAINRVYLHRLLKKTSYELLTGNKPNVSYFRVFGSKCYILVKRGRNSKFAPKAVEGFLLGYDSNTKAYRVFNKSSGLVEVSSDVVFDETNGSPREQVVDCDDVDEEDVPTAAIRTMAIGEVRPQEQDERDQPSSSTTVLPPTQDDEQVHQQEAVDQGGAQDDHVMEEDAQPAPPTQVRAMIQRDHPVDQILGDISKGEELNNFKRNEVWTLVPRPKQNVVGTKWVFRNKQDEHGVVTRNKARLVAKGYAQVAGLDFEETFAPVARLESIRILLAYATHHSFRLYQMDVKSAFLNGPIKEEVYVEQPPGFEDERYPDHVCKLSKALYGLKQAPRAWYECLRDFLIANAFKVGKADPTLFTKTCDGDLFVCQIYVDDIIFGSTNQKSCEEFSRVMTQKFEMSMMGELNYFLGFQVKQLKDGTFISQTKYTHDLLKRFGMKDAKPAKTPMGTDGHTDLNKGDSDYTGCKVDRKSTSGTCQFLGRSLVSWNSKKQTSVALSTAEAEYVAAGQCCAQLLWMRQTLRDFGYNLSKVPLLCDNESAIRMAENPVEHSRTKHIDIRHHFLRDHQQKGDIEVFHSRKRIEREKVDLDHERLPLHTDER

SEQ ID NO: 52462 - protein, 91 aa, Zea mays
  Coding DNA Sequence Number=SeqID_10683
MGPGFPAPICKHRRIPGTPSIEASRRPPTNGSNRICAPDLGENSFPWFVIVSAKYSPHPVKVYGGIEVWGIASDGVRGSGGGATLRAWGGR

SEQ ID NO: 52463 - protein, 147 aa, Zea mays
  Coding DNA Sequence Number=SeqID_10684
  Gene Ontology: Mol. function=transferase activity, transferring nitrogenous groups; Cellular component=cellular_component; Biological process=amino acid and derivative metabolic process
  Homolog annotation: Hit_ID=Q6K2Y8; Match level="QueryCoverage=70%, HitCoverage=23%, E-value=8e-42, Identity=75%"; Hit description =Putative nicotianamine aminotransferase A
MDLCEGERKGRKGDRTGGGARLLTTGRFLLLYVVAEVARKLGILVIADEVYGNLVFGDTPYVPMGVFGHIAPVLSIGSLSKRWIVPGWRLGWVAVCDPNRILQETKIIASITNFLNVSTDPATFVQNWVKNVGENRRTYDKLLSNLR

SEQ ID NO: 52464 - protein, 139 aa, Zea mays
  Coding DNA Sequence Number=SeqID_10685
MACSVPAPRPPSAPPSHGHPSLFARLLAPWLSYHLPCACPWPLLGFRLAELPRYGHRAPAPDRLLTGGFPGAAASSLYLLSMPSIFPVKSPSALALGHGVWHSGFSPPLSPSSSPGHRSPAPQQPSSRACGRTARIIPA

SEQ ID NO: 52465 - protein, 59 aa, Zea mays
  Coding DNA Sequence Number=SeqID_10686
MANSGQPSRAPWAWREPKRVDRDDDDATNDGMERRYDKLVVAPKKLLVRSRAGAGARRP

SEQ ID NO: 52466 - protein, 150 aa, Zea mays
  Coding DNA Sequence Number=SeqID_10687
MLQAVLEVENARQRRRGQPRHNIMEGGCDHSVAHKNSSAQPPWPTLTSLFVRPWHDENLNEWTGMMMMPCTTFDSGIDGDTRWWRKELQASELTQVTETAVFGSSASTEDKPVATHDGEELGTVGSSDHLREESLENDAHTKTILGTVTP

SEQ ID NO: 52467 - protein, 204 aa, Zea mays
  Coding DNA Sequence Number=SeqID_10688
MDNLCAAVRRRCPRSEPHPLLAAAVRGSARSRGPQQQRVKAMLLSCAPYGTMEEADAGRGHLQTATAGLTGGVAMPLLHAMSQSWHWSDSKAKLKRWAVGCLLQLHVGPHGVDPTTSAVAPAGSSTAHGNRWPMQGEFDSAQGEISSARTRLDFRGGTRQFSSGRERLSGQVAAGCREIDSSGALCVLDVGRNDDREGGGGISS

SEQ ID NO: 52468 - protein, 37 aa, Zea mays
  Coding DNA Sequence Number=SeqID_10689
MAWLNLVSCLQVRAKSELGQHIKKYTINFLFSGQRKT

SEQ ID NO: 52469 - protein, 347 aa, Zea mays
  Coding DNA Sequence Number=SeqID_10690
  Gene Ontology: Mol. function=sequence-specific DNA binding; Cellular component=nucleus; Biological process=regulation of transcription
  Homolog annotation: Hit_ID=Q5ZEB2; Match level="QueryCoverage=72%, HitCoverage=67%, E-value=3e-40, Identity=41%"; Hit description=DNA -binding protein WRKY3-like
  Pfam annotation: Domain name=WRKY; Domain location=179-239; Score =110.8; E_value=4.1e-30; Accession=PF03106.6; Description=WRKY DNA -binding domain
MDCSNDWDLQALVRSCGGGNRSVQHSRAGADAPPREEAAMVRGGGRAAAQLELLGQPVGAVSSWRRGLDHFDDLVDRDRDPRRMPFSVSVTPSSSRETTATCGPMARAGQQLRHDDVLFSFSAAAAAGVVSRSGHQMVQPRRRQPGRKAGGRTPRPKRSKKRQVKKVVCEVPAAGGVVSTDLWAWRKYGQKPIKGSPYPRGYYKCSSLKSCTARKLVERSPAKPGVLVVTYIADHCHAVPAMLNALAGTTRNRPSSSSSASPDDGDHNQDQETSSDGAAPSADNNSKVDDDDGAAAVAVAVDENDACLLEDDGNCPFDGFFWPFDDDLDRFFDDDGGGVLGRRRLSL

SEQ ID NO: 52470 - protein, 77 aa, Zea mays
  Coding DNA Sequence Number=SeqID_10691
MAYAVPSLSPLHSPGCGFPGKLVVKGKAGHPLIYTEARGRPAGIRLQPPPGSQVGFVTTEVTSLTNGPHVSGFGSGF

SEQ ID NO: 52471 - protein, 83 aa, Zea mays
  Coding DNA Sequence Number=SeqID_10692
MALGSLQRSPFFAVRAVDGTQVYAMASSADEVNAQRVPKSVGARKRGLAGAHPCGARVEPRSQRRPHRRKWRICWGGRRRSDD

SEQ ID NO: 52472 - protein, 75 aa, Zea mays
  Coding DNA Sequence Number=SeqID_10693
MQRLGLVGFMPGLARWFMCRPTSHATAVVSAGQGLDTCQYWTPTYAGVLLVPEPCQRWGLPGDPAYLLGALDLYV

SEQ ID NO: 52473 - protein, 770 aa, Zea mays
  Coding DNA Sequence Number=SeqID_10694
  Gene Ontology: Mol. function=hydrolase activity; Biological process =regulation of cell growth
  Homolog annotation: Hit_ID=Q0KB35; Match level="QueryCoverage=47%, HitCoverage=51%, E-value=2e-36, Identity=30%"; Hit description =Hypothetical membrane spanning protein
  Pfam annotation: Domain name=Metallophos; Domain location=120-371; Score=25.4; E_value=0.00021; Accession=PF00149.18; Description =Calcineurin-like phosphoesterase
MSLLGGLRWRLSLWDAGGCCGVGRENTNPNLVWWALTHPSTDLEDEKLKRHMKPDFLDMVPWYSGTSADLFKTAFDLMVSVTLFVGRFDMRMMQAAMKGPTGNTPNDDLLYDHFNEREDLWFDFVADTGDGGNSSYTVARLLAQPSIRTVIGGSMHTLPRGNLLIIGGDLAYPNPSSFTYERRFFRPFEYALQPPPWYRDEHIALDKPELPPGVSKMTEYDGPQCFIIPGNHDWFDGLHTFMRYICHKSWLGGWFLPQKKSYFALHLPKGWWIFGLDLSLHGDVDVYQFKFFADVCQNKESLLRPYLSRTSLGTWKLKVGENDSVIVVTHEPNWLLDWYWNETTGKNVSHLIQEYLKGRCKLRMAGDLHHFMRHSATRSEKNNFVQHLLVNGCGGAFLHPTHVFRNFERFSGTTYECKAAYPSYDESTGIALGNILKFRKKNWQFDIIGGFIYFILVFSMFPQCNLVRILNEETWSGRLKSFSGTIWSALLYIFEHSYVSSVGSLTLLTASYSFVPSKLSRRRRAIIGGLHVLAHLTAALLLMLLLELGIEICIRNHLLATSGYHTLYEWYRSMESEHFPDPTGLRARLEQWTLGLYPACIKYLMAAFDVPEVMAVTRINICKNGMMSLSRSVLIMYYTSVFIYFWIFSTPVVSLIFGSYLYICINWFHIHFDEAFSSLRIANYKSFTRFHVKKDGDLEIFTLAVDKVPKDWKLDPRWESEGRGPHQLSHDRKHPSKWRSASSTDPVRSVRVVDHFTIERTRTPDMEPSS

SEQ ID NO: 52474 - protein, 656 aa, Zea mays
  Coding DNA Sequence Number=SeqID_10695
  Gene Ontology: Mol. function=microtubule motor activity; Cellular component=microtubule associated complex; Biological process =microtubule-based movement
  Homolog annotation: Hit_ID=Q1SGR1; Match level="QueryCoverage=91%, HitCoverage=74%, E-value=1e-149, Identity=48%"; Hit description =Kinesin, motor region; Prefoldin
  Pfam annotation: Domain name=DUF768; Domain location=600-648; Score= -9.1; E_value=0.097; Accession=PF05589.2; Description=Protein of unknown function (DUF768)
  Pfam annotation: Domain name=Kinesin; Domain location=438-656; Score =136.9; E_value=5.4e-38; Accession=PF00225.13; Description=Kinesin motor domain
  Pfam module annotation: Pfam domain module=DUF768::Kinesin; Domain location=600-648::438-656
MSARGVRPGVLHHKENNPADAQPGKRQRTAAGAGRQPLAAAPPPQEEPMVFSGREDVDALLNEKMKGKNKMDYKVAPPSLSPVSGSYAYLTVAYSCIPPASILVDDSIQVRQGKSEQMMEYIKKLRACTKWLLEREDANLVEIERITGQLDATHKQHSEIVAVLKNTIEETKSICEELQKQCASLQEALKTVEAEKMDALRSLGDEREARMGVESLRNGLLEDLNRAKLEEKRLNDQIKMLQDTNKRLQEYNTSLQQYNCNLQADATKNAETIVKLQKEKNTMSLQNEATKQKTDLLKEVESIRMELQRAREDRDTKSAQVDSLLVDIGTYKEMTGKSVIELDSAMAKTSALEETCSSQRKMIETLEIKLAAANEKLKRSNMTASETMTEYENMKKMLESVQSRLEEAEQTILEGENLRKKLHNTILELKGNIRVFCRVRPLLPNESGAVSYPKNGENLGRGIELLHNAQGYSFTFDKVFDHSASQEHVFIEISQLVQSALDGYKVCIFAYGQTGSGKTYTMMGNPELEDQKGMIPRSLEQIFQASQTLNSQGWRYKMQASMLEIYNETIRDLLATNRMAVQDVGASKYSIKHDTNGNTNVSDLTIIDVTSINEVSSLLRRAAQSRSVGRTQMNEESSRSHCVFTLRIFGVNEVIF

SEQ ID NO: 52475 - protein, 337 aa, Zea mays
  Coding DNA Sequence Number=SeqID_10696
  Gene Ontology: Mol. function=peroxidase activity; Cellular component =vacuole; Biological process=response to oxidative stress
  Homolog annotation: Hit_ID=Q8S130; Match level="QueryCoverage=89%, HitCoverage=89%, E-value=1e-71, Identity=50%"; Hit description =Putative peroxidase
  Pfam annotation: Domain name=peroxidase; Domain location=50-295; Score=395.3; E_value=8.9e-116; Accession=PF00141.13; Description =Peroxidase
MASCVPSSTLFRRLLLVLQLAVAALTTLGAQAQLQYGYYNETCPGVEDLVRDALLAKFADDVTLPAGLLRLHFHDCFGAGCDATIMLKSHNGTAQRDADPNSTVRGYEAIEDVKAKVEAACPLVVSCADIMAMAARDAVNYTKGPAYQVETGRRDGNVSRKEDAQRLLPPADGNATVLTRYFAAQNLTMKDMVVLSAAHTLGVAHCPSFSGRLYNYTGAGDQDPSLDAAYAKNLTEVCSSPSDVASVQPLDPVSPTTFDMGYFKSVYNHQALLASDAALLEDSLTGAYVRLMATNASYYADTFFADFAVSMINMGRIGVRTATDDGEIRATCAVYVD

SEQ ID NO: 52476 - protein, 260 aa, Zea mays
  Coding DNA Sequence Number=SeqID_10697
  Gene Ontology: Mol. function=calcium ion binding; Cellular component =oxygen evolving complex; Biological process=photosynthesis
  Homolog annotation: Hit_ID=Q8L472; Match level="QueryCoverage=76%, HitCoverage=78%, E-value=3e-61, Identity=62%"; Hit description=PsbQ domain protein family, putative-like protein
  Pfam annotation: Domain name=PsbQ; Domain location=23-260; Score =213.9; E_value=3.8e-61; Accession=PF05757.2; Description=Oxygen evolving enhancer protein 3 (PsbQ)
  Subcellular localization annotation: CTP_CleavageSite=72; ConfidenceScore=5.91e-01
MATYLNAPPAATTTTASCRHAFSGGSLRLLRPSRPTLHVTCQAAASSQQPSSPSRRSACLLGIACAVLLRPRAASAAETDDEPANNGWWLTEFPLPVPKIVNSKPSRPSCSIHHLTLLGSLTIVSAMSGMAEEINNAETGTRSFLKNGIYMADIGPSFAAHAYRLRSTAFDLLALEDLLGKDASNYVNKYLRLKSTFMYYDFDKLISAAEDKPPFVDLANRLFDSFETLQEAVTAKDDARIGDRYAETKLILQELMAKMA

SEQ ID NO: 52477 - protein, 38 aa, Zea mays
  Coding DNA Sequence Number=SeqID_10698
MSLLAAKADLCWCGMIGSEVSLPGGLHERVKLKCGVVA

SEQ ID NO: 52478 - protein, 335 aa, Zea mays
  Coding DNA Sequence Number=SeqID_10699
  Gene Ontology: Mol. function=kinase activity; Cellular component =plastoglobule; Biological process=protein amino acid phosphorylation
  Homolog annotation: Hit_ID=Q8H2L4; Match level="QueryCoverage=96%, HitCoverage=49%, E-value=1e-120, Identity=71%"; Hit description=ABC1 family protein kinase-like protein
MVMVRVVSLSCQVGIVKDIKESMLEEVDFRKEAANIQAFQGYIDAMGFDRQAKAPFVYQHCSTKRVLTMERLYGVPLTDLDSIRSLVPDPELTLVTALNVWFGSLISCESFHADVHAGNLWLLRDGRIGFIDFVGYIVNVIEHESHHTTKAVFGMALSLYSSSTKKPWVELLYSRVNQWDCWSNISQELGQLWRSFLASFATEDYDAMASALSEMGATGNDINTNEFAKDLRKIFSSIQDLDTEIIVATARTPDATAVSANVVLDERQMNALFLDLVRVSESYGLKFPREFALLMKQLLYFDRYTRLLAPSMNMLRDERINISTNRQPRRTDRFQ

SEQ ID NO: 52479 - protein, 138 aa, Zea mays
  Coding DNA Sequence Number=SeqID_10700
MVEGASPSTFVAIISHQPTSVIDLLEDDSSHDSTEQPDSNVAEVVERAYFVATLNENGGEYEEPPTKRSVNTSARRGSSLGNDVSPVARSVRAQGRARRRLLLRPRPGSGEDAIPPEAEAEAEPWGRARRRPPPEVEA

SEQ ID NO: 52480 - protein, 123 aa, Zea mays
  Coding DNA Sequence Number=SeqID_10701
  Subcellular localization annotation: CTP_CleavageSite=37; ConfidenceScore=5.37e-01
MSSAPPDSVRCTKGLQAKLRTFGNFQRRFAIIHRTVRCTTVSGAPEESDSELASFGNPLRYNSPDMSGVHQTVRGAEHARVAHRTARRAHTSELQRSEPNGLVTWLAHRTVRCAMRQQPPPNG

SEQ ID NO: 52481 - protein, 334 aa, Zea mays
  Coding DNA Sequence Number=SeqID_10702
  Gene Ontology: Mol. function=RNA binding; Cellular component=nucleus; Biological process=nicotianamine biosynthetic process
  Homolog annotation: Hit_ID=Q8H2M0; Match level="QueryCoverage=98%, HitCoverage=98%, E-value=1e-125, Identity=70%"; Hit description=KH domain-like protein
  Pfam annotation: Domain name=KH_1; Domain location=148-194; Score =10.0; E_value=0.074; Accession=PF00013.19; Description=KH domain
MSGLYSQGFSPARTLSPQIRSNPDADSQYLAELLAEHQKLGPFMQFGNEFLVDPPPMIKMAGNSILIREEIMRVSSMVHDHGFSDLDRRRFRSPSPMSSPIVRPNLHGNGFGPWNGMHQERLGFPPPGTSMDWQGAPPSPGSYIVKKIVRLEVPVDSYPNFNFVGRILGPRGNSLKRVEASTGCRVFIRGKGSIKDTEKKGRSNVRGSHMSGVWETDKLRQAFPGKCREAALNPRPGDAEEKLKGKPGYEHLNEPLHILIEAELPANIVDTRLRQAQEVMEELLKPVDESQDFYKRQQLRELAMLNSTLREDSPHPGSVSPFSNGSMKRAKPSQ

SEQ ID NO: 52482 - protein, 281 aa, Zea mays
  Coding DNA Sequence Number=SeqID_10703
  Homolog annotation: Hit_ID=Q6YTZ9; Match level="QueryCoverage=22%, HitCoverage=30%, E-value=3e-14, Identity=59%"; Hit description=MADS -box protein-like
  Pfam annotation: Domain name=SRF-TF; Domain location=7-57; Score =54.4; E_value=3.8e-13; Accession=PF00319.9; Description=SRF-type transcription factor (DNA-binding and dimerisation domain)
MVRGEMKPIENEETRQICFTKRRQSLFNKASELSILCGAMVGSVVFSTFGTPFSFGHPSIDDVANRFLSPPPPPPSDAPAASSGGGAGAGASGSSSNDGSCSWAVTDTIRRLNSDKKRETLQEATGKEMGARMMQLLNANVSELGLAELLEFLECLEAVDGVVNNETANKTTTTLDLEATTTTSGGSSQTRQGLVPQPPMETVVAPAPAAADLQYQLLGGEHSGAADPMAFAAPTTSWSSEFVVDGFEVDDPMHGGGGGGDDLHDVYYALGDFPGDDQNHG

SEQ ID NO: 52483 - protein, 222 aa, Zea mays
  Coding DNA Sequence Number=SeqID_10704
  Gene Ontology: Mol. function=sequence-specific DNA binding; Cellular component=nucleus; Biological process=regulation of transcription, DNA-dependent
  Homolog annotation: Hit_ID=Q69WG7; Match level="QueryCoverage=70%, HitCoverage=63%, E-value=2e-23, Identity=40%"; Hit description=MADS -box protein-like
  Pfam annotation: Domain name=SRF-TF; Domain location=4-54; Score =75.1; E_value=2.2e-19; Accession=PF00319.9; Description=SRF-type transcription factor (DNA-binding and dimerisation domain)
MEMKPIENEEARQVCFSKRRQGLFKKASELSILCGATVGSVVFSTSGRSYSFGHPSINDVADRFLSSVAPGGLASGGASASHGGSGTTSGAVTDTVHRLNMEYLELQQSLDSEKKKKERLQEAAAKEMGGRVMQCLNANVFELGLAELQELQKWLEAVDGAVKEKANRILAEARARQTARGPSLVPQPPMEMDIASTSRHLQSDGTIGVLCKTSWVAADEPA

SEQ ID NO: 52484 - protein, 190 aa, Zea mays
  Coding DNA Sequence Number=SeqID_10705
  Gene Ontology: Mol. function=nucleic acid binding; Cellular component= intracellular; Biological process=chromatin modification
  Homolog annotation: Hit_ID=Q5UDB7; Match level="QueryCoverage=68%, HitCoverage=25%, E-value=9e-68, Identity=86%"; Hit description =INDETERMINATE-related protein 7
  Pfam annotation: Domain name=zf-C2H2; Domain location=154-176; Score =19.2; E_value=0.015; Accession=PF00096.16; Description=Zinc finger, C2H2 type
  Pfam annotation: Domain name=zf-C2H2; Domain location=78-100; Score =25.1; E_value=0.00024; Accession=PF00096.16; Description=Zinc finger, C2H2 type
  Pfam module annotation: Pfam domain module=zf-C2H2::zf-C2H2; Domain location=154-176::78-100
MAPHTLYDDGGSQLSYGSRIGDVQMRPRGTSLQQSSASALGDGDAALPKKKRNRPGNPKPDAEVIALSPRTLLATNRFVCEVCSKGFQRDQNLQLHLRGHNMPWKLKQKDPKDARRRVYLCPEPTCVHHSPSRALGDLTGIKKHYCRKHGEKKFRCDRCSKRYAVESDWKAHGKTCGAREYRCHCNALFS

SEQ ID NO: 52485 - protein, 187 aa, Zea mays
  Coding DNA Sequence Number=SeqID_10706
  Gene Ontology: Mol. function=nucleic acid binding; Cellular component= intracellular; Biological process=chromatin modification
  Homolog annotation: Hit_ID=Q5UDB7; Match level="QueryCoverage=75%, HitCoverage=29%, E-value=2e-30, Identity=58%"; Hit description =INDETERMINATE-related protein 7
  Subcellular localization annotation: CTP_CleavageSite=72; ConfidenceScore=5.79e-01
MASIGSHFGGGFVPSLHNSSPSAGLSATALLMKAAQMGSTTSSTTHNPNGPSALLRAAGFAGTASVRETSSRAAEEEKSHEAYFHDLIMNSLPLTGGGTGGLSGLAGVDDGNVSTRDFLGVGRDDATAPQGLHGMGAPNPTQMKWAPTRAKPRKTANSAPPDPGLGLGLSPGRRRTPLRPIQGSDSG

SEQ ID NO: 52486 - protein, 710 aa, Zea mays
  Coding DNA Sequence Number=SeqID_10707
  Gene Ontology: Mol. function=metal ion binding
  Homolog annotation: Hit_ID=Q9ZT97; Match level="QueryCoverage=85%, HitCoverage=66%, E-value=3e-43, Identity=27%"; Hit description =Putative inhibitor of apoptosis
MSTIATPPPPSAAQEKAASRNKRKYRAETPSTELGPFGLEYPLTTDCVGFEFMSPEKVAMAAAVAAAEGVSLDLLQNSCENCKDLHPTAEDLLECQRYVNWGDPNEMQLEEILLKSLDTTFDNSVSLITTMGYSEAAARAAIMRTAAQYDWRESLAGFGEAAVEVLKTEGDMLPREGASVEDMRKIEEAVLGSMVTLVTEAQPFNTPGDVMYCLLMSDMNVANACAMDYNSFSLPAVSAQVIAQPVAGNYEPGSGSNLSVSITNPQTGVTFRGKLTPVPPGSYGAIKADSSTAQASPNVSNTEPSVSDKTQCVIPNIEPKKHHVPICDHSEDQPFVAAATQSVKNDKSSPSKRGGSKRDSFHRQKLTNYDKSSRALGSKGSLRSGKQSSSASAVLERKCRSFSDSTTSNLKGSSRVAKGFAASISGSEVSVDLSFTGTLSPSPSFDAKVVSNSNSAPAASTDLSLALSSSDSLTPSLSHDSNTEVVDSSSKINFSYDEEQKVWIPQDKKDEIVLILVQRQKELQAHTRDWTDWAQQKVMQVAHRLAKEKDELQSLRKEKEEADRLQEERHHLEESTRKKLLEMESAISRANAQLEKAEASARRREVENAQLTLQMEAAKRHAAESATNISELVKKDENSRKRSQRWQSDRALLQEDLAAQKSRLSRVQEHLQHAKELKDQVQVLTVLFLPHFHGNFFTVIVFDSIRLRAE

SEQ ID NO: 52487 - protein, 241 aa, Zea mays
  Coding DNA Sequence Number=SeqID_10708
  Gene Ontology: Mol. function=nucleic acid binding; Cellular component= intracellular; Biological process=chromatin modification
  Homolog annotation: Hit_ID=Q5UDB7; Match level="QueryCoverage=57%, HitCoverage=25%, E-value=4e-29, Identity=59%"; Hit description =INDETERMINATE-related protein 7
MACQVTWVPEFSLLCHLGPRKFLLVFSNLILTHPSMYASRKDNFITHRATCDAAVRGTAQKPPLVAGLYVGSGSDDRLGLSDAAAQMHGFADQGQSSSAAEASQFDHVMPSYSGSSMFRSQASDFSLSFFLGGGTPLIEQDLSDNGGDLSEGSQGPLLHGKAPLHGRDDASPRAAVSAKTAGKRQTLTSWTLGSSLATVVARLAARGPLLHGKEPFHSHDLTQLPEQQHQPGSSNARVKPP

SEQ ID NO: 52488 - protein, 86 aa, Zea mays
  Coding DNA Sequence Number=SeqID_10709
MQPSSGDAALPGDEAQVTKGPNTGRDGPRSQCGGSDNLEDGVATRPSGEESPSGPASEAGDEVVKGKCAPGPFLSILMIKCPTQKV

SEQ ID NO: 52489 - protein, 151 aa, Zea mays
  Coding DNA Sequence Number=SeqID_10710
MAWRSPPCRALAGTSSRWCLHGGRFHVFYPTAEAACDNNTRGCVICLEGFEDDVEVVVMSCSSGHEFHPGLGHCHVQKRCRLWWTFDWLALAIFEVKIGTKTADITTLNGLNVIKRALRNHQHQEVGLFGPVIDVVWTTLATNKGPPCVGS

SEQ ID NO: 52490 - protein, 643 aa, Zea mays
  Coding DNA Sequence Number=SeqID_10711
  Gene Ontology: Mol. function=unfolded protein binding; Cellular component=chloroplast; Biological process=cellular protein metabolic process
  Homolog annotation: Hit_ID=P08927; Match level="QueryCoverage=89%, HitCoverage=99%, E-value=0.0, Identity=83%"; Hit description=RuBisCO large subunit-binding protein subunit beta, chloroplast precursor
  Pfam annotation: Domain name=Cpn60_TCP1; Domain location=57-561; Score=644.6; E_value=8.2e-191; Accession=PF00118.14; Description=TCP- 1cpn60 chaperonin family
  Subcellular localization annotation: CTP_CleavageSite=23; ConfidenceScore=5.24e-01
MASTFGATSTVGLMAAPTGKNVRLQRRANFRVKAAKELYFNKDGSAIKKLQTGVNKLADLVGVTLGPKGRNVVLESKYGSPKIVNDGVTVAREVELEDPVENIGAKLVRQAAAKTNDLAGDGTTTSVVLAQGLIAEGVKVVAAGANPVQITRGIEKTAKALVEELRKLSKEVEDSELADVAAVSAGNNYEIGNMIAEAMSKVGRKGVVTLEEGKSSENFLYVVEGMQFDRGYISPYFVTDSEKMTAEYENCKLLLVDKKITNARDLINVLEEAIRGAYPILIIAEDIEQEALATLVVNKLRGSLKIAAIKAPGFGERKTQYLDDIAILTGATVIRDEVGLSLDKADKSVLGTAAKVVLTKESTTIVGDGSTQEEVTKRVAQIKNLIEAAEQEYEKEKLNERIAKLAGGVAVIQVGAQTETELKEKKLRVEDALNATKAAVEEGIVVGGGCTLLRLAAKVDAIKDTLENDEQKVGAEIVRRALSYPLKLIAKNAGVNGSVVTEKVLSNDNFKYGYNAATGQYEDLMAAGIIDPTKVVRCCLEHAASVAKTFLTSDVVVVDIKEPEAAPVANPMDNSANVECSLHTTNSNGSGNVRLCCVETDLKLIHRSGLLSGSDPYFCVLSDLMNDSICLFLEDNVFEGVCF

SEQ ID NO: 52491 - protein, 126 aa, Zea mays
  Coding DNA Sequence Number=SeqID_10712
MGADQEQAMVLAQQRRRPQTAQLGEMAQSLQGTGRSAQRRGQRAGRRLACGGCGEGRWRSSGRCWHQEQFGADLDERGEGPLLLEEKVEGVEPMERPRRTFMARARSVTISPSSVRESAKIFIQRQ

SEQ ID NO: 52492 - protein, 63 aa, Zea mays
  Coding DNA Sequence Number=SeqID_10713
MEETARGVPSLLLLVWRLEAKEGRTSENRKWEKYLISLLLIISLISSCLGLLAFSIAGIILFT

SEQ ID NO: 52493 - protein, 171 aa, Zea mays
  Coding DNA Sequence Number=SeqID_10714
  Gene Ontology: Mol. function=transferase activity, transferring hexosyl groups; Biological process=metabolic process
  Homolog annotation: Hit_ID=Q7XI34; Match level="QueryCoverage=47%, HitCoverage=19%, E-value=7e-20, Identity=62%"; Hit description =Putative UDP-glucosyltransferase
MAGQEHHCRRIVLFPLPLQGHISPMLQLAALLHARVLAVTVLHTGLNAPDALRHPELTCCSMRGASAPAVPGTGGAEPAHARPRLPGLAGRPPVVLRAVRELGKCGLRRPRRVRGDGVGAGPQRGVVPLGCPAGLGRRRGESKADANWAGGRPELEQGLLRRSGAERRAGG

SEQ ID NO: 52494 - protein, 136 aa, Zea mays
  Coding DNA Sequence Number=SeqID_10715
MKGNDDAVAHSVKANDNDMDSVGRDQISSELQIDDQQIDIGTQRQHNTTTRRRRTGNDGLGLGHGHARSREKLGGDNHGEHWGEASPTAGVHGKGGRDGGTREKEQGAERAGMLDHGEQAAGATVREMEGEEGAGD

SEQ ID NO: 52495 - protein, 435 aa, Zea mays
  Coding DNA Sequence Number=SeqID_10716
  Gene Ontology: Mol. function=ionotropic glutamate receptor activity; Cellular component=membrane; Biological process=ion transport
  Homolog annotation: Hit_ID=Q6K4P7; Match level="QueryCoverage=94%, HitCoverage=49%, E-value=1e-101, Identity=48%"; Hit description =Putative glutamate receptor subunit kainate subtype
  Pfam annotation: Domain name=Lig_chan; Domain location=73-297; Score =59.8; E_value=8.3e-15; Accession=PF00060.17; Description=Ligand -gated ion channel
MQTSPGYCIEVFDAVMSKMPYPVSYEYVPFPYSSSSYDSLVSLVPRQIADIVVGDVTITASRMGSADFSMPFTDSGWSMVVADQPEFRGTPWQQFGLIFYFAFSTLVFSHKEKLESNLSRFVVIIWVFVVLILTSSYTASLTSMLTVQKLQPAVTDVRELQRTGAYIGYQEGSFIKNSLKKLGFHEAKMRSYSTAGEYADALSKGPANGGYCDGYTMFGPVYKTDGFGFVFPIGSPLTPDARRWRRSKRSGSASPGACPSQGAAALGSSNLSFRSFGGLFLITGVVSSLMLLVYLATFIYQERGEVRPEPEEEGSGSSSSVRRLRAWLRHFDQKDLKCATFRTGDHDSVRDGGNQTQRWAESVRYGRGGNGSVQAAIEEEAVAMGMSPLRFGTSTPSETMNAGSSPASEFGTSFEQRMQEAPHSVSVEMPRSTPS

SEQ ID NO: 52496 - protein, 107 aa, Zea mays
  Coding DNA Sequence Number=SeqID_10717
MASWTHHRARGRPRHRGPGRRTVPCWGLGGLAGDGCRAAREATGARTGAARGCRGQGQGVHTKLPRPCAVWSREEEREKERDPAYLVNAALHACGLDPGRDEEFCDA

SEQ ID NO: 52497 - protein, 422 aa, Zea mays
  Coding DNA Sequence Number=SeqID_10718
  Homolog annotation: Hit_ID=Q8SA97; Match level="QueryCoverage=25%, HitCoverage=14%, E-value=1e-08, Identity=46%"; Hit description =Ornithine carbamoyltransferase
MAPPVDVVDPRPRLGDVEAPPRSRSSRSSVAEVESEPLGRARRRLSAEARAESEPWGWAKRRAEPESEPWVGRSGVRRLQGLSPSLSPGSGGAEFAVFRGLARVRALGRAERRAEPESEPWVGRSGVRRLPGLSPEFEPWVGRSGVFLWCLRPGLTACRPHSTEWHSSQSGAGGAVLLSGRSVERRSDCGLLLGEDWASGEPELCADGGYQLKIRSLEGVTACMGEYTTGPAFGQDHFTLGNKYSTNILSGTVGNKAISDGPRPAVGNKWTPPNGRPPRGPPAAHTANAHTHAHTFVRTRAAAARTRRRRHLRRPPARTAGRPDAQGAAAPTPDGEGTFAGHLHRPPARTAGRPDAQGAAAPTPALTARRRPDGRTPAPTPHSAPPPPRLEPPVPGFAHRRRPGLARAVTIRRRPGNGITVV

SEQ ID NO: 52498 - protein, 314 aa, Zea mays
  Coding DNA Sequence Number=SeqID_10719
  Gene Ontology: Mol. function=sequence-specific DNA binding; Cellular component=nucleus; Biological process=regulation of transcription
  Homolog annotation: Hit_ID=Q6IEK6; Match level="QueryCoverage=69%, HitCoverage=53%, E-value=1e-44, Identity=49%"; Hit description=WRKY transcription factor 75
  Pfam annotation: Domain name=WRKY; Domain location=176-239; Score =87.1; E_value=5.4e-23; Accession=PF03106.6; Description=WRKY DNA -binding domain
MDSNALRQIEEGFRLARELMEELPAAQNEPAYLADRCHGIAQAYVAAIRMLHPPANPPTHFGGSSQHDRVIPQLDLLRPFLSAPSAPSSSSTAFPHNLGRHQLLAADPSSFVVNASPVVAGTSSGGPVRRHASSSSRSSPPVQPRQQQHRRRREGGERMTIMVPTQATAGNADQPPDDGYTWRKYGQKDILGSRYPRSYYRCTHKNYYGCEAKKKMQRLDDDPFHDLFMAAAAEHSAPALSTAIQLGISWMPSALVGSSAGEGSSAQVNVPAASGRDTAEYPVMDLADAMFNSTSSGGSSMDAIFPAHHDRRDS

SEQ ID NO: 52499 - protein, 215 aa, Zea mays
  Coding DNA Sequence Number=SeqID_10720
  Homolog annotation: Hit_ID=Q6QP54; Match level="QueryCoverage=40%, HitCoverage=46%, E-value=9e-07, Identity=46%"; Hit description =Putative kinase
MTDSPRTHVDERRLAHGCDRGRGQQVGRKNSAKACDRGRGQQVGRKNSAKAEKTNGASDNGSSEVEVESEPLGRARQRPSAEARAESEPWGRAKRSSSSSGAEPESEPWGRADRSSSSSGAEPESEPWVGRSGVRRLQGLSPSPSPRSGGAEFAVFRGLARVRALGRAERSSPSSGAEPESEPWVGRSGVRRLQGAEPRVRALGRAERKFAVFRG

SEQ ID NO: 52500 - protein, 134 aa, Zea mays
  Coding DNA Sequence Number=SeqID_10721
  Homolog annotation: Hit_ID=Q6QP51; Match level="QueryCoverage=46%, HitCoverage=25%, E-value=2e-10, Identity=67%"; Hit description =Putative growth-regulating factor 1
MEKGHGSRGEMMVTRTGGASGRRSGRRFAFAIITTPKKGPGKGDTPKRILPREGTRLRASLLIRGSKAGPPEGFDSRLRSCGPYTHYWSEVRRSTPRKGSTVASGYSGSTPITDQGFEGWPPKGSQPPQTPSEG

SEQ ID NO: 52501 - protein, 207 aa, Zea mays
  Coding DNA Sequence Number=SeqID_10722
  Homolog annotation: Hit_ID=Q1SAU7; Match level="QueryCoverage=50%, HitCoverage=10%, E-value=6e-08, Identity=35%"; Hit description =Paired amphipathic helix
  Pfam annotation: Domain name=PAH; Domain location=133-192; Score =29.4; E_value=1.2e-05; Accession=PF02671.11; Description=Paired amphipathic helix repeat
MRTRDWHTSSESDLRLAMDRTKGNRADHLAFVGVARRRRLRAKSSVFAFAPTHTSVTQTRINLCVPLCSDTKWDILVQAAKQPNRGMGFTSKLKRSRHGVSMKLRVRDPRPTQTVQDGLSFVASLKRVFACEPDKYDEIIATMRQFKSGRSIDSLFVLSVNCSIRSAVVVERVKVLLEGHPGLLRHFNQFLPWGYIRAHGPVGRISV

SEQ ID NO: 52502 - protein, 93 aa, Zea mays
  Coding DNA Sequence Number=SeqID_10723
MAIIHRMFWADGCNGRLRQKRKEIAHCTLSDGVPDCSMRPWTEGNYGLPNRALTAPSCIGAIKGTPRHMKRYTKAPIEHSKTPRLRIHTSGSS

SEQ ID NO: 52503 - protein, 353 aa, Zea mays
  Coding DNA Sequence Number=SeqID_10724
  Gene Ontology: Mol. function=protein binding; Cellular component =nucleus; Biological process=ubiquitin cycle
  Homolog annotation: Hit_ID=Q7F0Z3; Match level="QueryCoverage=95%, HitCoverage=94%, E-value=1e-50, Identity=37%"; Hit description=Zinc finger POZ domain protein-like
  Pfam annotation: Domain name=BTB; Domain location=168-285; Score =62.2; E_value=1.7e-15; Accession=PF00651.21; Description=BTBPOZ domain
MSSLTVSSFTPEIMYSAEVKFRVDKYNERKNLGYATFIRSPTFTVGGYEWTLNYYPDGRSEQTEGHVSVALELTGTENVWAILSLTFAGEVDRSAWAGWATAAFLNRNNNFLFSWPEVRSGVLEQMGLVRDDCLEIQCQICVHRPNQLLKPGSLPEVEVPASDTLQNLGRFLVDHVTADVTFKVQQETFLAHRIMLAACSPVFDRQLLSGEMREKDMGCVLVHDMQPVVFKALLHFVYTDSLVGIGDMVVVGDQIELIRHLLVAADRYCVDRLKSICEAILCKCVDMESLLTTVALADQCHCMKLLAACVEFLKYSAQTDMVESQWYKVLRDNHPDVADEICKGVKDVRKLIN

SEQ ID NO: 52504 - protein, 103 aa, Zea mays
  Coding DNA Sequence Number=SeqID_10725
  Pfam annotation: Domain name=RWP-RK; Domain location=23-67; Score =12.6; E_value=0.00043; Accession=PF02042.6; Description=RWP-RK domain
MAGGKRSKLLQGAPPPPPPPQWSDVRGLLHMRLTDAAAELNVSITYLRRLCRQNGFAQWPGKKAMSAETRNEEEDDEPVANQELTTLNLIDKLCWLISHLRCN

SEQ ID NO: 52505 - protein, 56 aa, Zea mays
  Coding DNA Sequence Number=SeqID_10726
  Subcellular localization annotation: CTP_CleavageSite=29; ConfidenceScore=5.29e-01
MKCNYQQGGEFSSRGTFSPTHTSANFSMRCAVRRRWSIAKVKVMRVYANGPDVAKD

SEQ ID NO: 52506 - protein, 134 aa, Zea mays
  Coding DNA Sequence Number=SeqID_10727
MEDSKGEVVRAIIEVEKDKMLWIGFLLPELTPTSINFTDHITSDKERSKNWKIKQGMTRRVPLTLSRGRMCWILDSAAGFADDGAGRRVGLLGAVAVVERAPPEKTPGMRTQAQRENEMGLRNCRSATFCFSVI

SEQ ID NO: 52507 - protein, 84 aa, Zea mays
  Coding DNA Sequence Number=SeqID_10728
  Gene Ontology: Mol. function=homocysteine S-methyltransferase activity; Biological process=methionine biosynthetic process
  Homolog annotation: Hit_ID=Q9FUM9; Match level="QueryCoverage=62%, HitCoverage=15%, E-value=9e-20, Identity=84%"; Hit description =Homocysteine S-methyltransferase 2
MHSFYSHVVRLQGLRERFSHCNSNMDASQESTGVSDGDFVSYVNEWCIDGATLIGSCYRTTPNTIRAIHRTLNQGSNEQQLPLA

SEQ ID NO: 52508 - protein, 295 aa, Zea mays
  Coding DNA Sequence Number=SeqID_10729
  Gene Ontology: Mol. function=protein binding; Cellular component =integral to membrane; Biological process=transport
  Homolog annotation: Hit_ID=Q6YZD2; Match level="QueryCoverage=70%, HitCoverage=86%, E-value=4e-94, Identity=82%"; Hit description =Coated vesicle membrane protein-like
  Pfam annotation: Domain name=EMP24_GP25L; Domain location=114-177; Score=49.4; E_value=1.2e-11; Accession=PF01105.14; Description =emp24gp25Lp24 family
MSPATMLLLPSTDLVLNLTLRLIVIWTRGAAEAVASVLRRADREATEATCGCSRCSTASRRKARGRLVKSVVVSGSGSTAHHGMAELENEECFSHNVEYEGDTVHVSFVVIKADTPWHYSEEGVDLVVKDPNGAQVRDSRDKTSDKFEFIVQKRGVHRFCFTNKSPYHETIDFDVHVGHFSYFEQHAKDEHFAPLFEQIAKLDEALYNIQFEQHWLEAQTDRQAICVEFKVKAVLNFCCGELNKPHAFVGPVNENMSRRAVHKALFESAALIVASVIQVYLLRRLFELKLGTSRV

SEQ ID NO: 52509 - protein, 79 aa, Zea mays
  Coding DNA Sequence Number=SeqID_10730
  Subcellular localization annotation: CTP_CleavageSite=44; ConfidenceScore=5.16e-01
MARPWLLCLPRALPVLCSRAAPVGRASSSPSLRAELPRRDFLLRASLAVHFHVGNLPFSLCQRPTRESTTGYGSGMFGS

SEQ ID NO: 52510 - protein, 107 aa, Zea mays
  Coding DNA Sequence Number=SeqID_10731
MRNFGPAAGNRMPTKEKRSAMDDLQAAAGRHETARQSRSRHGCHGRAQGAAWRREQGRSRGRAEELTTAQRSWSGRRELRPGAGEKTELGRHEPMREQECWEPSVRE

SEQ ID NO: 52511 - protein, 203 aa, Zea mays
  Coding DNA Sequence Number=SeqID_10732
  Homolog annotation: Hit_ID=Q6QP51; Match level="QueryCoverage=25%, HitCoverage=24%, E-value=7e-11, Identity=67%"; Hit description =Putative growth-regulating factor 1
  Subcellular localization annotation: CTP_CleavageSite=28; ConfidenceScore=5.23e-01
MQAACNRAKWTHPFDSNAPNMEAQAHTSCNRRAGCCVRATAPPFAPLPRLLDCGTSTTTRGNPACDPTVPARRVGHGSVSCGRRTGGTVGRRSGQRFAFAIMTASRKGPGKGDTPKGILLREGNGPRAPLLIRGSKVGPSEGFNSRLRVLGLRAHYWSEVRRPAPWKGSMAASGHSGSAPTTDQGFVGWPSKGSQPPQTQSEG

SEQ ID NO: 52512 - protein, 148 aa, Zea mays
  Coding DNA Sequence Number=SeqID_10733
MAGPGRGHRQQGKRRSGEQLAGEVEMARGTERRGPGRFLAVAGKRKRGRHGHGGKELLLPALRRGCCCSPIGSERQGESLPGHLWASVEGGGMDAMAAGLLPAGRRGEPGRKKLTPAVLSCRRRRKEEGWFGRLGVGVQKLPSEHLYL

SEQ ID NO: 52513 - protein, 84 aa, Zea mays
  Coding DNA Sequence Number=SeqID_10734
MACSLHRALLPLLHLCVIVVAVTRNFSPETLFVATPRAAVHNPSHLIITVYFVYMFVEEPVTEDPGEQQVEVAEQELIEGKLCP

SEQ ID NO: 52514 - protein, 139 aa, Zea mays
  Coding DNA Sequence Number=SeqID_10735
  Pfam annotation: Domain name=zf-CCHC; Domain location=80-97; Score =15.8; E_value=0.0024; Accession=PF00098.13; Description=Zinc knuckle
MGQKEPTSSRPYVFACDEKKGKKKAPTPSSSSEEEEEEECDDGGYDQPSTSSSKDEETVRRVGKVEDLLFNIDRKKKRKRGCFACREKGHFRDNYPNMAEPTKRRSKGKALTSFKTWDDSSSEDEPPRTRNHRSSSHSS

SEQ ID NO: 52515 - protein, 60 aa, Zea mays
  Coding DNA Sequence Number=SeqID_10736
MRGGSRERCEQPGEGNLMKASQIGDDADNREVTHAADNNRRGVTPGRRGGLEVCVLLTFL

SEQ ID NO: 52516 - protein, 311 aa, Zea mays
  Coding DNA Sequence Number=SeqID_10737
  Gene Ontology: Mol. function=hydrolase activity; Biological process =aromatic compound metabolic process
  Homolog annotation: Hit_ID=Q75KE2; Match level="QueryCoverage=99%, HitCoverage=100%, E-value=1e-141, Identity=82%"; Hit description =Putative hydrolases
  Pfam annotation: Domain name=Abhydrolase_1; Domain location=45-303; Score=33.8; E_value=6e-07; Accession=PF00561.10; Description =alphabeta hydrolase fold
MGIVEEAHNLRVVGEGKRGVIVLAHGFGTDQSVWKHLVPHLVADYRVVLFDTMGAGPTNPDYFDFSRYSTLEGYALDLLAILQELGVQSCIYVGHSVSAIIGALASISRPDLFTKLVLLSASPSYEHFLQIETKMVKSYGLDLRFKFDLYSLAGKESASVYTSWYLNDVDYYGGFEQDELDELFEAMQSNYKAWCLGFAPLCVGGDMESVAVQEFSRTLFNIRPDIALNVAQTIFQSDVRSLLPHVSVPCHIVQSTKDLAVPVVVSEYLHRHLGGDSIVEVMPSEGHLPQLSSPDIVTPVLLRHIQHDIAV

SEQ ID NO: 52517 - protein, 49 aa, Zea mays
  Coding DNA Sequence Number=SeqID_10738
MEQQDGTITKARLRGSYKEGKQTQPLSLALWIELTEMFAIGIRCSSSRS

SEQ ID NO: 52518 - protein, 137 aa, Zea mays
  Coding DNA Sequence Number=SeqID_10739
MDPTVRVRITKGEELSLIVTVHVELNGHGEPQPNRYVRFDLNRTSRIDGEEVIAHDPDNGGELRAVRYGVEEGRRMDVERQFRSSSIVCFPDFPNSLDCASIPGDTRGSRDFAHRAPAAAPSGNTAAPMTGTHHAGP

SEQ ID NO: 52519 - protein, 66 aa, Zea mays
  Coding DNA Sequence Number=SeqID_10740
  Subcellular localization annotation: CTP_CleavageSite=50; ConfidenceScore=5.17e-01
MRINSSKELRKHKDSNGRIKGMGGLLTTSANSGAPRGRRGGREVSGRWRRASATQEVLRVFNSNSN

SEQ ID NO: 52520 - protein, 93 aa, Zea mays
  Coding DNA Sequence Number=SeqID_10741
  Subcellular localization annotation: CTP_CleavageSite=44; ConfidenceScore=5.24e-01
MAEGTSRGMPGTPWAGRAADAASQRVGSGRGGLPRPGRHAGVFRAGAACPAPVPAPGAAPRDEASPTPGVGSSERKREVNPRKERVTPEFGGY

SEQ ID NO: 52521 - protein, 404 aa, Zea mays
  Coding DNA Sequence Number=SeqID_10742
  Gene Ontology: Mol. function=transporter activity; Cellular component= membrane; Biological process=oligopeptide transport
  Homolog annotation: Hit_ID=Q94GB5; Match level="QueryCoverage=92%, HitCoverage=71%, E-value=1e-108, Identity=53%"; Hit description =Putative peptide transporter
  Pfam annotation: Domain name=C4dic_mal_tran; Domain location=97-344; Score=-89.9; E_value=0.087; Accession=PF03595.8; Description=C4 -dicarboxylate transportermalic acid transport protein
  Pfam annotation: Domain name=PTR2; Domain location=1-336; Score =133.5; E_value=5.7e-37; Accession=PF00854.12; Description=POT family
  Pfam module annotation: Pfam domain module=C4dic_mal_tran::PTR2; Domain location=97-344::1-336
MPTAISSPSASPARLILFYVALYLLALAQGFYGPCGEAFGADQFTPSDDANPSAPAFRSSYFNWFHFSISWGYAIASAGLSYVQDNAGWTLGFGACWTAMLLCLAVFLLGTRTYRAKQPADGGTFAVTVRAWAARVFRRKDATPTERLVLTPQPEGGGLIVIAKLLPIWLTSLVFAAIFSQVSTLFTKQASILDRHLGTATGIVVPPAALQCLSNVTFIVMLPLYDRVIVPLARRLTGHASGITMLQRIGASMATSCVAMAVAALVEVRRLRVARDAGLVDRPDEAVPMSLWWMIPQYVLIGLAGVLGQVGLEEFFYDQVPDTLRSVGLALCLSIFGVGSYASSILVSVIDWATRRRGDSWFSDNLNRAHLDYFYGLLAGLAALEVAAFLHFANRYVYTKKEEL

SEQ ID NO: 52522 - protein, 72 aa, Zea mays
  Coding DNA Sequence Number=SeqID_10743
LVAESAVRAEWYSPSNSVMVVPCYPMPPSTMCGEPPPATDAAVASTSSPARVRLEPSMSGHGHRAAATRLAC

SEQ ID NO: 52523 - protein, 126 aa, Zea mays
  Coding DNA Sequence Number=SeqID_10744
MAGPTVLHQPGWVGRADALTVLLRACRTQEEAGVAGPRRGLPWPPVGCRAGWLRATEPGEHAGRGPDMKQARRGRRAGFPGRANAMGEIRWGSGTGRPSEAYMATVDDGTCSAPWNSGRRFLVQCP

SEQ ID NO: 52524 - protein, 139 aa, Zea mays
  Coding DNA Sequence Number=SeqID_10745
  Gene Ontology: Mol. function=nucleic acid binding; Biological process= DNA integration
  Homolog annotation: Hit_ID=O24587; Match level="QueryCoverage=67%, HitCoverage=8%, E-value=3e-43, Identity=88%"; Hit description=Pol
MGFPGSFLGFLVFQGCECNVYQTYEMLMLMMLCSSFSNSNTKGVTRTLWDFGYNRSKVPLLCDNESAICMADNPIEHSRTKHIDIRHHFLRDHQQKGDIEVYHISTENQLVDIFTKPLDEKTFCRLRSELNVLYSRNFD

SEQ ID NO: 52525 - protein, 201 aa, Zea mays
  Coding DNA Sequence Number=SeqID_10746
MAMMGSTSEKMYLCQDRLDVGLLTEDPLTGHMPRHGGLPLELVTFGNFSGRRAIIHRTVRCTPDSVRCSKEARPPELASLGISLQPLRYNSLDCPVCTGLSGVPAEQRLFRRQRLPAAHLMRALRAQMAGAPILAHRTRKSACPVCTGHPGGPRSQKLQRSESNGSDDVAGAPDMSGSKIIGQWRQDHHYAKRLALRFYKG

SEQ ID NO: 52526 - protein, 154 aa, Zea mays
  Coding DNA Sequence Number=SeqID_10747
MIMLLHEIGSKSPCKLLCQLSEPSSPWYSTLNRIRSTAQLDADEPRAIRAVVAAIHARILLRVTQISSSWITPASKLFRPSCPLATRSVEIILTGVGCPMTERHVATLVTYWSDDRREGRHEPKTPTPCSLNFTVDSGNPKFSEFREGKLYSRF

SEQ ID NO: 52527 - protein, 65 aa, Zea mays
  Coding DNA Sequence Number=SeqID_10748
MAKDDPVAMRRGGEKTAVTRWSAPRMRPGRFIYLGASLKGEERSAKDPEKLAWRFRSICPRCGVG

SEQ ID NO: 52528 - protein, 75 aa, Zea mays
  Coding DNA Sequence Number=SeqID_10749
MGLVFEAQAMGAKCWDLTRGPKHLRVQESKGDMGQKAFDPFPFVFIGGGRAPVFRRGRPSLRGAFANEGTLILSM

SEQ ID NO: 52529 - protein, 152 aa, Zea mays
  Coding DNA Sequence Number=SeqID_10750
  Homolog annotation: Hit_ID=Q2QM21; Match level="QueryCoverage=75%, HitCoverage=12%, E-value=2e-12, Identity=44%"; Hit description =Expressed protein
MVARMMRWPRPPPARNIRVRLVVRRAEGLPPPPAPLSPDGSPGPEAEAKAFVEVSWKGPKMSPLSSLRRAQRPPRNQTRKEALPAVAAAALEDGAAAAPALAVSAVAWDEEFERDAALTATSHREPAAFHPWDVTFSVVSVSISSFSRLRLA

SEQ ID NO: 52530 - protein, 49 aa, Zea mays
  Coding DNA Sequence Number=SeqID_10751
MEESRNPSRGSRKGAQGERTARLGAAGDFWIGVRRNRNKSEQYFGLCSN

SEQ ID NO: 52531 - protein, 292 aa, Zea mays
  Coding DNA Sequence Number=SeqID_10752
  Homolog annotation: Hit_ID=Q2QM21; Match level="QueryCoverage=77%, HitCoverage=30%, E-value=1e-57, Identity=58%"; Hit description =Expressed protein
ESNKISKSKLVLGTASLNLADYASAAEEEIEIILPLSVPSSATDLVPSLHLTLSLAEVRTSQQSPGASQRSVIAPLSPSSGDSLASGKDEVSVIKVGLRNLKMLRDLVSTRRFKKTNQDFDGSEKYYVHSDGAEFSCDTDSLDDDLDDREHDDEFGGSAVRKSFSYGSLQTMNVGALLYAPRIDGDDEGWVHYSHRNSDVGYHVEQVPPPTAEEHASIPLRRKRSILPARFGIAALRADLRNLCLDLGGEGVDDYGCKKPHPLGAPSSGRRDTIVVSPDLGIKSVSVSLLDL

SEQ ID NO: 52532 - protein, 90 aa, Zea mays
  Coding DNA Sequence Number=SeqID_10753
MAEQTGSAVSREASCRSWEEGRLVETSTGKWMAGRGTRLRIEEQGAPWELRGCTMDQAVSLAARSRRFKSNFKPCKVSVPKITESDLMVI

SEQ ID NO: 52533 - protein, 214 aa, Zea mays
  Coding DNA Sequence Number=SeqID_10754
  Gene Ontology: Cellular component=mitochondrion
  Homolog annotation: Hit_ID=Q2QM21; Match level="QueryCoverage=99%, HitCoverage=26%, E-value=6e-84, Identity=72%"; Hit description =Expressed protein
MSFDNIWDEISRAAECSSGKPALYIVSWNDHFFVLKVDANAIYIIDTLGERLSEGCNQAYILKFDDTTTIHKTPAEKKEPSPDHRGRRKDSSETCSTEQGSGSDTEECEPVLKGKDACKEYIKSFLAAIPIRELQADIKKGLMASTPLHHRLQIEFHYTEPRPAEIAAPSPLPPFEAPFEFCWPEPPSPPAATESTVTHPPAMEAGITQAVAVV

SEQ ID NO: 52534 - protein, 177 aa, Zea mays
  Coding DNA Sequence Number=SeqID_10755
MGEAGAGASSDARGSWSKEPVRRKLDAKRHGEQEAEAGASSCEGRRGRKIRVGAWSSAAYGHGKGDPSEQAQGRRADKKQASRGVASLRWEELTAAMAEKELDGNERTSHGEQRLRATGFYPRAKAARRGRSKGRGAGRRNGCSPRPWAGELQAGTRVRRAIERIKEAADKNARMSQ

SEQ ID NO: 52535 - protein, 155 aa, Zea mays
  Coding DNA Sequence Number=SeqID_10756
MGKSKKGGISSHHSGDKRKREPTPPSEDFGDSEYSEEEFSSESEGSLAPTSPPASSDDSDDSQGIDAEVWTYIRAIERAGLEGSDESEYSSDEEDSSDSSKEGSGGDGDDDDDDGGDGGGGRGSGKGGDGSGKGGGGDGGSGSKGSSKGSNKASG

SEQ ID NO: 52536 - protein, 76 aa, Zea mays
  Coding DNA Sequence Number=SeqID_10757
MSDRRFYSETVDTLASFKSELMDGTIIDRVMRKTSQVDPKHGLIHKMVLMNETEDGQTEQVSEQKMIVKWTSSNKH

SEQ ID NO: 52537 - protein, 104 aa, Zea mays
  Coding DNA Sequence Number=SeqID_10758
MAEKELDGNERTSHGEQRLRATGFYPRAKAARRGRSKGRGAGRRNGCSPRPWAGDLQAGTRNPEFLAIAKESTVIVTVDSIQKSDKFNCDLNIWFHRQRIEAQL

SEQ ID NO: 52538 - protein, 76 aa, Zea mays
  Coding DNA Sequence Number=SeqID_10759
MSDRRFYSETVDTLASFKSELMDGTIIDRVMRKTSQVDPKHGLIHKMVLMNETEDGQTEQVSEQKMIIKWTSSNKH

SEQ ID NO: 52539 - protein, 81 aa, Zea mays
  Coding DNA Sequence Number=SeqID_10760
MEKLADQGSWYGGEASPNFGAGKRLEEGDEESRWGRRMLTLLGSERIREPTWRGVGEGESCHFKITADMGFESVSDIEILG

SEQ ID NO: 52540 - protein, 87 aa, Zea mays
  Coding DNA Sequence Number=SeqID_10761
MAATFTPVVAKETNALTCGTHSLVGTTHAWNRLQTGGRHLVSDGDEKLIHGPQASADCVRAVEKLGRGGWAVSGRREWADQGFLDSN

SEQ ID NO: 52541 - protein, 77 aa, Zea mays
  Coding DNA Sequence Number=SeqID_10762
MALTMRLPASKSEFPKLKMARVQLLAPSRVTGGRPRHHAQWDSDGGGDMGTGERSRGVWKSCDVRRRRKLDSSVSVG

SEQ ID NO: 52542 - protein, 260 aa, Zea mays
  Coding DNA Sequence Number=SeqID_10763
  Gene Ontology: Mol. function=hydrolase activity, acting on acid anhydrides, catalyzing transmembrane movement of substances; Cellular component=integral to membrane; Biological process =metabolic process
  Homolog annotation: Hit_ID=Q43001; Match level="QueryCoverage=21%, HitCoverage=9%, E-value=7e-13, Identity=48%"; Hit description=H -ATPase
MCKLTINISPNVSEREFTQDQACAGIQEVHFLPFNPTDKRTALTYTDSDGKMCYVSKSVLEQQVPDGKKECPGRPWFGWAAQEVQGIRPLWLPAFSRKMMCDFLNVYMQNTSQLRRKHTSKAREDIYFENYTSYEIIYAIITINQRDMTMKISKGDACEKWEFLKKWLTKKFVSAMKSQHVISDIRDAIFLQLTVRDVKNISEDTEMIRVVKTEDPNDASGVVSAVITNAGVASYITGEALLVNMHLEDIATETKDSEIQ

SEQ ID NO: 52543 - protein, 72 aa, Zea mays
  Coding DNA Sequence Number=SeqID_10764
MTEKQRLKRFTINLRRCLNRHTTAIKRKAMGASPTTKKSTAATFPPISIMPEVTSVYPQPELTRLEAHTIGQ

SEQ ID NO: 52544 - protein, 102 aa, Zea mays
  Coding DNA Sequence Number=SeqID_10765
  Homolog annotation: Hit_ID=Q7F8Q8; Match level="QueryCoverage=56%, HitCoverage=7%, E-value=1e-18, Identity=76%"; Hit description =Putative leucine-rich repeat transmembrane protein kinase 2
MQQSPDLRPPMTIITDKLVKLVESTGLQKISTTRHLEIDAQDPSFITTRPYFEPSSTVDGTPSISSSQPSSHLFLHFLSCQLVMVKAAVMQRSDYHGRLEYR

SEQ ID NO: 52545 - protein, 98 aa, Zea mays
  Coding DNA Sequence Number=SeqID_10766
MASLVHPEHFQSEGALYLMHNLLGWGTPTFAGMIRASASPLGDLGAVEFVLIISYLFCGLALSSRPFFLLLMEELGIQLSATSRPHSILQGGPSSPNS

SEQ ID NO: 52546 - protein, 107 aa, Zea mays
  Coding DNA Sequence Number=SeqID_10767
MGKDKKGQGSPRRSSDKQKREPSPTSEDFGDSAGLCFPPASSDYSDDSKGIATEVWTYIRSVERVGLEGSDESEVSSDEENVAEPPELFQLKCPSRTLKGSNTLKPE

SEQ ID NO: 52547 - protein, 101 aa, Zea mays
  Coding DNA Sequence Number=SeqID_10768
MPRSKSFNRLQSRPSVRLNNSEFGEMYAWGVTENSSGSSEEGSGDDGDDEGDGSGDDSGGGGSDDGNDGGKGGGGGRGGGRSDDGGKGGSSSKASGKAPLA

SEQ ID NO: 52548 - protein, 194 aa, Zea mays
  Coding DNA Sequence Number=SeqID_10769
MGLRSEHKSNVTRRGERLLAMDDGGSLRLLFCGGESAGWKKNRQGAAGRWERLEVEDNGESLLAGGNAMGDDWKKNSGRHCWTWQPREMRKQKGASGSMGKKGATTGHHGKLCASRSKGAMPWPPTSSLLELGPEEMPCPWRRGARLLGCSPAMEKSLHAGEKGSLLPDAAEKRESSLRHGERRAGGLLLGRTI

SEQ ID NO: 52549 - protein, 206 aa, Zea mays
  Coding DNA Sequence Number=SeqID_10770
  Homolog annotation: Hit_ID=Q6QP51; Match level="QueryCoverage=49%, HitCoverage=43%, E-value=3e-09, Identity=65%"; Hit description =Putative growth-regulating factor 1
MALPVDMVCPRPRLGDVEAPPRSRSSLSSVAVVESEPLGRARRRPSAEARAESEPWGRAKRSSSSSGAEPNPSSSPGSGGAEFTVFRGLARVRALNRAERIGAAQAALSFCQVGQWSGEVTAVTSALSTEGRASGASGKPEVCSSLEVGDPPGPLQLCADGGYQLRIRSLEGSLEDMVAGVTWPSILPLCWTVEWDPASAEEEHEE

SEQ ID NO: 52550 - protein, 194 aa, Zea mays
  Coding DNA Sequence Number=SeqID_10771
  Homolog annotation: Hit_ID=Q6QP51; Match level="QueryCoverage=32%, HitCoverage=30%, E-value=3e-11, Identity=65%"; Hit description =Putative growth-regulating factor 1
  Subcellular localization annotation: CTP_CleavageSite=93; ConfidenceScore=5.44e-01
MQAACNRAKWAHFSDFQHAQHGGPGPRVMQPARWMLRASNCTAARATATPPRLRNQYRDSRQPYARPSSASLARWKGGASGRGSERRFAFAIMTASKKGPGKGDTPKRILLREGTRLRASLLIRGSKAGPSEGFNSRLRARGLQTHYWSEVRRPAPQKGSTTASGYSGSVPTTDQGFEGWPSKGSQPPQTQSEG

SEQ ID NO: 52551 - protein, 123 aa, Zea mays
  Coding DNA Sequence Number=SeqID_10772
MDAVACRMLSRSTPARRRSGDPGTVGREMVEERVWGVAAAAGRSGCEEPEGRASGGDGELPTSCSISSSGKREEGGRRGPAPGGVPGVLAALDSGRSLESGHHRRGCRLRTARRLAGLRTCRV

SEQ ID NO: 52552 - protein, 266 aa, Zea mays
  Coding DNA Sequence Number=SeqID_10773
  Pfam annotation: Domain name=VQ; Domain location=53-83; Score=38.4; E_ value=2.4e-08; Accession=PF05678.4; Description=VQ motif
MDPPSSSGRPTTPRRQLQGPRPPKLNVRAESHAIKKHSGSGVPAPGRAPVIIYDASPKVIHVKPSDFMALVQHLTGPGGSGTPPPPPQQHEGHMVDDDGGGGVPLGQAFLPPELLLSPSAAMSPAARLATIERSVRPMPAAAPAYGADDGTLAAALGPARHPGILSPVPSSLPPAAACGLFSPLPFDDPGSISWLNELSPILRAAASAANAGASSSGTGPGNGPPPPPPPAYYCDPFVPSPRNLLATPTVPSPATCAEFFGSLPDL

SEQ ID NO: 52553 - protein, 667 aa, Zea mays
  Coding DNA Sequence Number=SeqID_10774
  Gene Ontology: Mol. function=protein phosphatase type 2A regulator activity; Cellular component=protein phosphatase type 2A complex; Biological process=signal transduction
  Homolog annotation: Hit_ID=Q6ER76; Match level="QueryCoverage=91%, HitCoverage=93%, E-value=1e-126, Identity=44%"; Hit description =Rab11 binding protein-like
  Pfam annotation: Domain name=WD40; Domain location=251-289; Score =36.9; E_value=6.8e-08; Accession=PF00400.22; Description=WD domain, G-beta repeat
  Pfam annotation: Domain name=WD40; Domain location=339-406; Score =38.3; E_value=2.7e-08; Accession=PF00400.22; Description=WD domain, G-beta repeat
  Pfam annotation: Domain name=WD40; Domain location=469-539; Score =10.3; E_value=2.3; Accession=PF00400.22; Description=WD domain, G -beta repeat
  Pfam annotation: Domain name=WD40; Domain location=584-659; Score =2.7; E_value=18; Accession=PF00400.22; Description=WD domain, G-beta repeat
  Pfam module annotation: Pfam domain module=WD40::WD40::WD40::WD40; Domain location=251-289::339-406::469-539::584-659
MARGGERRSASSSSAAAAAGVAWGVAVEGSRREPSFSEDCSTSDEVSGPMKLEYEIWANEPISVQERRQRFLKGMRLDDFVSTRIGSFQCHGEITAVESSTDMEERTVSGLSSGDSSVCDNESDFDGACCIRDTDTGKRYIVHNGAHSSITGMPKEVGSDKVMTLLEFESLLGLSRSVQKLLRRGCGNSPAKETKSAKEKDGKSSSRKFVTKRSFGGICKYDVHVKNCTNSIPTRTRVQHRKKKFLEFSAVYMDQEIRAHKGSIRVMKFSPSGWYLASGGEDCAVRIWQIIEVEASPKLYRGEDPHEKVEKVQVFKTNIGKKHNPALAVIPKKVFRISETPLHEFRGHASDILDMAWSKSDIRQCAYGNRAATVVSQFSNTKTMFNPIDEKYFMSGSLDGKVRIWDVLDKRVTGWTYTRTIITALSYQSDGKGFVVGTIAGACRFYDQSGENIQLEKELFVQGKKKSAASRINNLKLCTSDSNRVVVTSGDSKIRVVNGDTIQKFEGPWKSKALSSPSLTSDGRYLISVGKDSNVYIWNLANSRDARSVHSCELFFSKAVTTAVPWPGVYQDGHTKPSYLTEKYCSMPILRHHGECQSAEPWSFVDGSKGLATWPEEKLPSTAKPGSSPQLGDCLSMISAAWSTVIVTASRDGVIRSFHNYGLPVRL

SEQ ID NO: 52554 - protein, 290 aa, Zea mays
  Coding DNA Sequence Number=SeqID_10775
  Homolog annotation: Hit_ID=Q6QP51; Match level="QueryCoverage=49%, HitCoverage=70%, E-value=1e-13, Identity=47%"; Hit description =Putative growth-regulating factor 1
MAASKKGPGKGDTPKKTLLREGTRLRASLLIRGSKAGPSEGFNSRLRARGLHTHYWSEVRRPAPRKGSTAASGHSGSAPTTDQGGNDLVTESHQRAKGGIEPSDPVDRGPGPADHPQAVRPDLRHHRKLRSARPRARTRAQPRKTANSAPPDPGLGLGLSPGRRRTPLRPTQGSDLGSAPEDDELRSARPRARTWAQPWKTANSAPPDPGARTWAQPQKTTNSAPLDPGLGLGLSPRRRRTPLRPDQGSDSALASADDLRLARPRGLGLDHGHGSQTRPPTSEEPPHRPT

SEQ ID NO: 52555 - protein, 205 aa, Zea mays
  Coding DNA Sequence Number=SeqID_10776
  Gene Ontology: Mol. function=nucleic acid binding; Cellular component= chromatin; Biological process=DNA integration
  Homolog annotation: Hit_ID=Q2QYR6; Match level="QueryCoverage=83%, HitCoverage=13%, E-value=4e-48, Identity=55%"; Hit description =Retrotransposon protein, putative, Ty1-copia subclass
MGVVERRNQTVVEMARCMMKSKGVPSRFWGEAMTTAVYLLNRSPTKSVQGRTPYEARFGKKPSVQHLKTFGCIAHVKKNGPGVNKLSDRSTKMVLLGYESGTKGYRLFDPTTEKLCISRDVVFEESERWDWESAEKNQQTETTIPFTTQFQFSVPDQTIQAPAGSGDTSESSGGCCCITTLTTNTYDTFSVPESIPSYICCLRFK

SEQ ID NO: 52556 - protein, 308 aa, Zea mays
  Coding DNA Sequence Number=SeqID_10777
MQGLDMGISHIRLMSLRIRSECRAWATGYDDGSTGGELDVDEGSGRAAHVGRAGSPWPAIGGVHEAGSRGLAAPNGCAATLASLGRRAGLAASCREQGLGKGRGEGGAVGQLGRAMAMAGATMGQEEGIERGRAGAHHSDEPRQRRQGTAGVDDQALANSMTTAAATLRAVGTAPVARKSPPSPPSEDFGDSEYPEEASSKYDRSLTPAYARSIERAGLGGSGDSEEAPSKEVEDSSNSKEGSDSEGGGNDDEGNNGGDDDSSRVGDGSGDDGGDGSDDGDGGEGSSRGSNGGNKGGDGNAGGIVLSA

SEQ ID NO: 52557 - protein, 190 aa, Zea mays
  Coding DNA Sequence Number=SeqID_10778
MSEARLWWVSDCPAAKGSAKNATHGLGSAPSSGGWGGFADLAISSEIEQAVAGVLKRYAEFAKATADASCTVAEVADAVRTGADPGPWPPGPRPGAQAQKFFRRARVQLPPLESGWTVLKSCKPASAVVMIHRLCRSALWPRPVYRPVCCPVRHCLYAASAGLPSPPPSSRALLRLVRHYLYALCCRTVR

SEQ ID NO: 52558 - protein, 315 aa, Zea mays
  Coding DNA Sequence Number=SeqID_10779
  Homolog annotation: Hit_ID=Q10R20; Match level="QueryCoverage=99%, HitCoverage=79%, E-value=3e-95, Identity=62%"; Hit description =Expressed protein
MLPFVERDANASSLRDGSGNLNWQGGGAVTASTPPKLKAAPKKRFQEDSENQDPSLATPPPRQGPSRPPFGAPRWNKHAKETIKSSAEKRPDNAEKEALLNKHAPPRQLKSTLSARNLFSGKDILGQISEFYDELKRMVGGSRPVTDTQEVYSLNPMNPSDLMEKVVPDAPDSFISNPVPAEIVKEVATQERVKKSPSPMKGKKVGLKVEAGKPRSPSVLKEVKATPPTPQRFPSPSPNRIKNVKLGGAAIAGSPLKNPLKEKGTPSNSKDPESKKYAVRQPFGVKDMNNTRACDAEGSSSSMFWFLKPCTFLVE

SEQ ID NO: 52559 - protein, 314 aa, Zea mays
  Coding DNA Sequence Number=SeqID_10780
  Homolog annotation: Hit_ID=Q6QP51; Match level="QueryCoverage=45%, HitCoverage=49%, E-value=9e-17, Identity=40%"; Hit description =Putative growth-regulating factor 1
MQAACNRTQGAHPFDFNASNMEVQAHTSCGRKRQSSRQQAHIPSWDSERTLSHDDRRHLWQAKQATLHLRHNDRVKKGIGKGDTPKGILLCEGSGPRAPLLIRGSKAGPSEGFNSRLRALGLRAHYWSEVRRPAPRKGSTAASGHSGSAPTTDQGFIGWPPKGSTATSDAERGMTQGTFDTYQGSGYAPEVPYDISETNGNDFVTESHQREASSPRTPSKGDRAACVAPTAVPLDRVRLTAAKSDLGRHRKLRLARPQGSDSGSAPGDDELRLVRPQGSDSASAPKDDELRLARPQGSDSGSAPEDDELCLARP

SEQ ID NO: 52560 - protein, 236 aa, Zea mays
  Coding DNA Sequence Number=SeqID_10781
  Homolog annotation: Hit_ID=Q6QP51; Match level="QueryCoverage=42%, HitCoverage=42%, E-value=7e-14, Identity=58%"; Hit description =Putative growth-regulating factor 1
  Subcellular localization annotation: CTP_CleavageSite=28; ConfidenceScore=5.15e-01
MQAACNRTKGAHPFDSDASSMGAQAHTSCTTATPRTTRHVALTLWQGKRHLWQEKQATLHLRHNDRVKKGTGKGDTPKGILLHEGSGPRAPLLIRGSKAGPSEGFDSCLRALGIRALILIRGSKAGPSEGFDSRLRALGLCAHRWSVVRRLAPRMGSTAASSHSGSAPTTDQGFVGWPPEGFDSRLRAHRARDDPGYVRYMVEARDTLPRLGGCSRKSGSGQTVDNVNIPARELGT

SEQ ID NO: 52561 - protein, 170 aa, Zea mays
  Coding DNA Sequence Number=SeqID_10782
MENNPNLRDFFSQSSSARIPHGREAPEEDMGVFYQTQLSRPPSISAPATRLHIEDLDLNSLGNFPNLFAYQEVLQSDGATPYLGLPPSGRGIRTGRTPCQFPRSSAGAMRSRGGHKFFVVEVDLEDVVEVEEGPQLLVVDALVSTQPLTMPLFKIWNMKKKMNWTLDLQW

SEQ ID NO: 52562 - protein, 299 aa, Zea mays
  Coding DNA Sequence Number=SeqID_10783
  Gene Ontology: Mol. function=cysteine-type endopeptidase activity; Cellular component=endoplasmic reticulum; Biological process =proteolysis
  Homolog annotation: Hit_ID=Q2TN87; Match level="QueryCoverage=85%, HitCoverage=87%, E-value=3e-89, Identity=59%"; Hit description =Putative cysteine protease
  Pfam annotation: Domain name=Peptidase_C1; Domain location=113-298; Score=312.2; E_value=9.3e-91; Accession=PF00112.13; Description =Papain family cysteine protease
MATLKASILAMLGFAFFCGAALAARDLSDDSAMVARHEQWMAQYRAASTKTPPRRLGGSRCSRLTLSSSSRSTLFADLTNHEFRSIKTNKGFKSSNMRIPTGFRYENVSADALPTTIDWRTKGAVTPIKDQGQCGCCWAFSAVAATEGIVKISTGKLVSLAEQELVDCDVHDEDQGYGKCKSGSNSAATIKGYEDVPANDEAALMKAVANQPVSVAVDGGDMTFQFYSGGVMTGSCGTDLDHGIAAIGYGKTSDGTKYWLMKNSWGTTWGENGYLRMEKDISDKRGMCGLAMEPSYPTK

SEQ ID NO: 52563 - protein, 61 aa, Zea mays
  Coding DNA Sequence Number=SeqID_10784
  Gene Ontology: Mol. function=nucleic acid binding; Cellular component= nucleus; Biological process=mRNA processing
  Homolog annotation: Hit_ID=Q10KN7; Match level="QueryCoverage=87%, HitCoverage=16%, E-value=5e-18, Identity=85%"; Hit description =Polypyrimidine tract-binding protein, putative, expressed
MGILPAVGADRRKGEAQGNVLLASIENMQYAVTVDVLHTVFSSFGSVQKIAIFRRMGGHKL

SEQ ID NO: 52564 - protein, 85 aa, Zea mays
  Coding DNA Sequence Number=SeqID_10785
MAMASLRRARRRGGSGSGIGSRRHARDGGPHEVFTTYISVHGSASIYLSVYGISIHILRKRFIDFMLYLVYLIQCIGFLPFMPYV

SEQ ID NO: 52565 - protein, 93 aa, Zea mays
  Coding DNA Sequence Number=SeqID_10786
MANTTKGFLPMVGMERRLGMVIGGTQATASDSPRICNAPSPDAHVYVKYTYRYRSQFDEPNHDWLEAIQATSDELLGAYMKAKDEAMNTACGD

SEQ ID NO: 52566 - protein, 258 aa, Zea mays
  Coding DNA Sequence Number=SeqID_10787
  Homolog annotation: Hit_ID=Q8SA97; Match level="QueryCoverage=36%, HitCoverage=18%, E-value=1e-13, Identity=55%"; Hit description =Ornithine carbamoyltransferase
MAVRTGDAHRERRRWPCLALVMYWWRQEARRGSRAEMRGTLKAPKSQLVTPISTKLQRKLRLARPKARTRAQPRKTANSAPPDPRARTRAQPRKTANSAPPDPRARTRAQPRKTANSAPPDPRAPEDSELRYARPQGSDSGSAPEDGELRSARTQGSDLGSAPEDGELRLARPQGSDSGSAPKDDELRLARPPGLGLGLSPGRRRTPPRLTPRARTQAQPRRTTNSASPDSRARTQAQPRRTTNSASPRPQGSNSTLA

SEQ ID NO: 52567 - protein, 79 aa, Zea mays
  Coding DNA Sequence Number=SeqID_10788
RRRTFLVPALGAGGPCCAATRWWKQSETEAVIAPGVPAVRPCAGGRAGSPAWATEAPGSFVFRMEVLLLYEGIQDEDVI

SEQ ID NO: 52568 - protein, 141 aa, Zea mays
  Coding DNA Sequence Number=SeqID_10789
MGKSNKRKREPTPPSEDFGDSEYSVEEFSSESEGSPAPVSPPASSDDSDDSQGLATEVWTYIRVVERSGLEGSDESEYSSDEEDSSEEGGGGDGGDDDDDDGGDGDDGDDDGDGGSKGGNGGSSRGSNGGGSSKGSNKASG

SEQ ID NO: 52569 - protein, 112 aa, Zea mays
  Coding DNA Sequence Number=SeqID_10790
MAHVFESQDGFGRYLGRISASLEPGFDLNIHDGGCPTSLDTVELTHPLRSFSPYLALCQPLRYGRPLAGGLRRQRWGNRNRATRDTPCPDEAHGLADDADSLARHHQRNAHP

SEQ ID NO: 52570 - protein, 60 aa, Zea mays
  Coding DNA Sequence Number=SeqID_10791
MAKLTEWLARLGSNWGGLATVAEALVAMAGGKELRTGVWPVKRFGALKSGLSLCSNPRQI

SEQ ID NO: 52571 - protein, 150 aa, Zea mays
  Coding DNA Sequence Number=SeqID_10792
MAKDWATISRYPKTYPRPTGAIQDGTPSKGGIEPSDPIKRKGSEEAYNQKSQGDPRSTSRLVQRLRGYPCTLATTNVLETPSIQHRRSGAPFAPKLRMKSTAPTEVKIKTPKESTCPSGLWGYTRRVQSRAPIRNKNFHFLWKIAYPLKE

SEQ ID NO: 52572 - protein, 265 aa, Zea mays
  Coding DNA Sequence Number=SeqID_10793
  Subcellular localization annotation: CTP_CleavageSite=18; ConfidenceScore=5.11e-01
MGPRGLRSQGSRLAVIARSSLKRKANEPTFTATKAVKSSGAVEGHQPRQARKDATVTEVATVPPATLVEAIPGLIAKSASKSIFICRERVVWVMLQRQQGLMYHLNKQLAQKSDEDVHLTSLCAELKDEVMAARGKVAPLEEEVRLLKESLQMMTGERDESLRQASEASSRADSLAKDLEGERPWSRRSPSLRIYLTRWQTSVEASESRASPRRVCEGYILSDEDDLAEAEVQRLTDVVKGLGSMLEHHFKEEVVPQMSPPGVGS

SEQ ID NO: 52573 - protein, 183 aa, Zea mays
  Coding DNA Sequence Number=SeqID_10794
  Subcellular localization annotation: CTP_CleavageSite=42; ConfidenceScore=5.03e-01
MSIVVKESLKSSCTHIGPHVDHSTGGDTATATTPATFSFLPLASPPPEQNAGRPRGCKDGGGEATATGPRLLRPLLGLATGGDYGGSDALGTRSAIEMCRSGGLEVIAGHPSAHGRAIGFSGGSTISVALLRATLAWEFYRVVELPLFGGCGVAWRRPWLVAWLGVVGVRNRLALGQQIDLEV

SEQ ID NO: 52574 - protein, 157 aa, Zea mays
  Coding DNA Sequence Number=SeqID_10795
MALVSLSLTCWPFYHILPGWSAPPEARTEGVFGCSGYGGNDYGGSDTLGTRSATEMCRSGGLEVIAGHPSAHGRAVGCSGGSMSSVALLRATLAWEFYRVVELPLFGGCGVAWRRPWSVAWLGAVGVRNTLALGQQIDLEIWWSDFPSLRPMPVVEH

SEQ ID NO: 52575 - protein, 180 aa, Zea mays
  Coding DNA Sequence Number=SeqID_10796
  Homolog annotation: Hit_ID=UPI00000529F6; Match level="QueryCoverage =24%, HitCoverage=3%, E-value=8e-12, Identity=76%"; Hit description =transcription factor
MWYGVPGKDAVNLEAAMRKHLPDLFEEQPDLLHNLAALSPAQLGTRVLTSRRTPGRAPASRPPLPLLQPSCAARPVPPGPPLRAAAPGRRRSRQLLSRPSSLQAAALQAVLQPRLRASVCRRSRPSSLLRRPSGAASPASAVPLRQDYRVQRLTIPLSAGVCSTVVDLLLFEPCVIVGKP

SEQ ID NO: 52576 - protein, 640 aa, Zea mays
  Coding DNA Sequence Number=SeqID_10797
  Gene Ontology: Mol. function=DNA binding; Cellular component=nucleus
  Homolog annotation: Hit_ID=UPI00000529F6; Match level="QueryCoverage =60%, HitCoverage=37%, E-value=9e-53, Identity=34%"; Hit description =transcription factor
  Pfam annotation: Domain name=JmjN; Domain location=291-328; Score =37.1; E_value=5.9e-08; Accession=PF02375.7; Description=jmjN domain
MRCALCAVPRQMRATVRGRLSTPLTWRHVALPLGLFASRADWAGYCEERKGLVWAGYSRPSGPSIYVTDTSRFPSSRGRFCSVPPLLYSSTLPSRGGVDGMELGEPGARGCRGPVRLLGSLGLLIKASSSDAAMMGTECIMATLGGDPEPSIPPGFGPFVALALQGIQNNAKSADAHSSSAQAAHCMEKDVEVLEHGSAHGWSDTPASTSGTHSCRRSLRNRPPIDYSQFDLISDEESDVESAEKGVGLVRRRRQLPKGVLRGCAQCADCQKVVARWNPSGARRPVLEEAPVFYPSEEEFKDTLKYIESIRSTAEPYGICQGDKLQNRKSSKKGRRGGMMKKRRKLLELEDNNNINLNQTGVQQNQERFGFEPGPEFTLQTFKKYADDFREQYFKKEVPADSPPSVEDIEGEYWRIVEKPTEEIEVVYGADLETGTFGSGFPKSSPEVKYDVEHKYLESGWNLNNLPRLQGSVLSFEGGDISGKDAVNLEAAMRKHLPDLFEEQPDLLHNLAALSPAQLGTRVLTSRRTPGRAPASRPPLPLLQPSCAARPVPPGPPLRAAAPGRRRSRQLLSRPSSLQAAALQAVLQPRLRASVCRRSRPSSLLRRPSGAASPASAVPLRQDYRVQRLTIPLSAGVCST

SEQ ID NO: 52577 - protein, 90 aa, Zea mays
  Coding DNA Sequence Number=SeqID_10798
MAGPACSAPEQHRQGGGGPLDSGGKRELAIKTHCTTLTTKYLPNTNCDDDFATVDDDYGYPEGDGCIGGVMTMAAYTKEMNTLMTSTVHA

SEQ ID NO: 52578 - protein, 286 aa, Zea mays
  Coding DNA Sequence Number=SeqID_10799
  Gene Ontology: Mol. function=DNA binding; Cellular component=nucleus; Biological process=regulation of transcription
  Homolog annotation: Hit_ID=Q6K5X2; Match level="QueryCoverage=99%, HitCoverage=100%, E-value=2e-73, Identity=50%"; Hit description =Putative NAC domain protein NAC1
  Pfam annotation: Domain name=NAM; Domain location=10-128; Score =212.5; E_value=9.8e-61; Accession=PF02365.6; Description=No apical meristem (NAM) protein
MGLRDIELTLPPGFRFYPSDEELVCHYLHGKVANEQLAGAGAAMVETWAKLSTNDWYFFSFRDRKYATGQRANRATRSGYWKATGKDRAIHDPRSAIVVGMRKTLVFYRGRAPNGVKTSWVMHEFRMVEDPHAPPKEDWVLCRVFYKTKADDATADSEQDAVRMPRGGGGSADPSCYSPPPFPAALGGSHHHHHHLPPPPPSSDRRHGAGSPDDDFPGGMALLQHSSGMFDFHGGQPRPHDGVVLAGPAAAAAAPASRDGGDQCGSGALIDLGLDEHYTYNSLLQM

SEQ ID NO: 52579 - protein, 1323 aa, Zea mays
  Coding DNA Sequence Number=SeqID_10800
  Gene Ontology: Mol. function=DNA binding; Cellular component=nucleus; Biological process=regulation of transcription
  Homolog annotation: Hit_ID=UPI00000529F6; Match level="QueryCoverage =98%, HitCoverage=96%, E-value=1e-116, Identity=53%"; Hit description= transcription factor
  Pfam annotation: Domain name=FYRC; Domain location=1165-1260; Score =82.3; E_value=1.5e-21; Accession=PF05965.4; Description=FY rich C -terminus
  Pfam annotation: Domain name=FYRN; Domain location=1110-1162; Score =60.9; E_value=4.2e-15; Accession=PF05964.4; Description=FY-rich N -terminus
  Pfam annotation: Domain name=JmjC; Domain location=360-447; Score =68.4; E_value=2.2e-17; Accession=PF02373.13; Description=JmjC domain
  Pfam annotation: Domain name=JmjC; Domain location=495-597; Score =45.3; E_value=2.1e-10; Accession=PF02373.13; Description=JmjC domain
  Pfam annotation: Domain name=JmjN; Domain location=158-202; Score =96.4; E_value=8.6e-26; Accession=PF02375.7; Description=jmjN domain
  Pfam annotation: Domain name=zf-C5HC2; Domain location=703-756; Score= 73.4; E_value=7.2e-19; Accession=PF02928.6; Description=C5HC2 zinc finger
  Pfam module annotation: Pfam domain module=FYRC::FYRN::JmjC::JmjC::Jmj N::zf-C5HC2; Domain location=1165-1260::1110-1162::360-447::495 -597::158-202::703-756
MMGTECIMATLGGDPEPSIPPGFGPFVALALQGIQNNAKSADAHSSSAQAAHCMEKDVEVLEHGSAHGWSDTPASTSGTHSCRRSLRNRPPIDYSQFDLISDEESDVESAEKGVGLVRHRRQLPKGVLRGCAQCADCQKVVARWNPSGARRPVLEEAPVFYPSEEEFKDTLKYIESIRSTAEPYGICRIVPPPSWKPPCLLKEKNIWECSKFCTRVQKVDKLQNRKSSKKGRRGGQNQERFGFEPGPEFTLQTFKKYADDFREQYFKKEVPADSPPSVEDIEGEYWRIVEKPTEEIEVVYGADLETGTFGSGFPKSSPEVKSDVEHKYLESGWNLNNLPRLQGSVLSFEGGDISGVLVPWMYVGMCFSSFCWHVEDHHLYSLNYMHWGAPKMWYGVPGKDAVNLEAAMRKHLPDLFEEQPDLLHNLIHQRISPAPMINKFLRFLLKPRAICQRGQPASRPPPLQAAALQAVLPPGRCSPGRPPAPPQSLCVPPLQAVLPPAPPVRRCQPRLCCPTAAGLQSTETDCPTVRWRMLHCSIQKPLKAGPEVTQFSTSLLKSEGVPVYRCVQHEGEFVLTFPRAYHAGFNCGFNCAEAVNVAPIDWLPIGQDAVELYRKQARKITVSHDKLLLGAAREAIRAHWDILFLKRNTADNLRWKSMCGLDSTICKSLKARIDLELAQRQNICSPSQSRKMDAEFDSTDRECALCYYDLHLSASGCPCCPGKYTCLVHAKQLCSCDWDKRFFLFRYDINELNMLADALGGKLSAIHRWGVSHLGLSLRSCVKREKDQDSKTPRRVADGPRRSYMSQASTVSLAPSLVCNEQNNNGNKMLDKASLETDTCPFTEQIKSGTISLQEAHMKTEVSCTLNSSVIPEGHKSSLSLPVPSGHSLSSNFATRSLSTAGESVKNTYDLVVFKGSRESSRAGDCISSPGVHHNIPPIMIDQGSNMNPSMESSNNSHRLMASNTNATQFYSYKDQMHVTPETRASVMTEKDSSQASAASSQPFAGTVLRAQSVSQEASPSVFTSKPLIDSSLVKNTYVGLSSGGAHIGHPNFGNQQPSDECLKRKSESLSGSEARGHSAALVQPALGNHNGSGGAHKGLRMANVVHRFKSLVESLEIGVVLSGRLWSSSQAIFPKGFRSRVKYFSIVDPTQMAYYISEILDAGPQGPLFMVTLENCPGELFINVSPAKCWSMVRERLNMEIRRQLSTGRANLPALQPPGSVDGFEMFGLLSPAIVQAIEARDRDRICTEYWRSRPHVVTEDRATAPPQAQGPLHALRGLFQRANRNELLALRSLLVSNISPDDFSRRQATQILDEEIAKQWR

SEQ ID NO: 52580 - protein, 218 aa, Zea mays
  Coding DNA Sequence Number=SeqID_10801
  Homolog annotation: Hit_ID=Q5VPH5; Match level="QueryCoverage=72%, HitCoverage=67%, E-value=6e-23, Identity=71%"; Hit description =Putative auxin-induced protein TGSAUR22
  Pfam annotation: Domain name=Auxin_inducible; Domain location=136 -215; Score=85.9; E_value=1.2e-22; Accession=PF02519.5; Description =Auxin responsive protein
  Pfam annotation: Domain name=Auxin_inducible; Domain location=35-135; Score=64.0; E_value=4.7e-16; Accession=PF02519.5; Description=Auxin responsive protein
  Pfam module annotation: Pfam domain module=Auxin_inducible::Auxin _inducible; Domain location=136-215::35-135
MPSHASAGGESRAVEERGHRAEAAASRTRRLHQIQKTEVKKRSEPKQASFKNKGRGRRRRPRGCRPTCRAATSAVYVGERRRRFVVPIALLDRTEFRSLLRRAEEEFGFTGAAGGGGLVLPCEDVAFRSLTFVLACTRRRPTGLPSDVPRGHFAVYVGERRRRFVVPIALLDRPEFRSLLRRAEEEFGFAGAAAGGALVLPCEEVAFRSLTSVLACTR

SEQ ID NO: 52581 - protein, 235 aa, Zea mays
  Coding DNA Sequence Number=SeqID_10802
  Gene Ontology: Mol. function=DNA binding; Cellular component =mitochondrion; Biological process=DNA integration
  Homolog annotation: Hit_ID=O24587; Match level="QueryCoverage=63%, HitCoverage=13%, E-value=2e-81, Identity=97%"; Hit description=Pol
LDSLAVKRILRYLVATPKVGLWYPKGSTFDLVGYSDSDYAGCKVDRKSTSGTCQFLGRSLVSWNSKKQTSVALSTAEAEYVAAGQCCAQLLWMRQTLRDFGYNLSKVPLLCDNESAIRMAENPVEHSRTKHIDIRHHFLRDHQQKGDIEVFHSRRRIEREKVDLDHERLPLHSDERKEEEKRDLAVYSQGAVSVWGTGLSGGAPDSVRWCTGQCPVHQAALAEEATLGFFSGDFG

SEQ ID NO: 52582 - protein, 623 aa, Zea mays
  Coding DNA Sequence Number=SeqID_10803
  Gene Ontology: Mol. function=RNA-directed DNA polymerase activity; Cellular component=mitochondrion; Biological process=RNA-dependent DNA replication
  Homolog annotation: Hit_ID=Q8S463; Match level="QueryCoverage=89%, HitCoverage=28%, E-value=0.0, Identity=88%"; Hit description =Putative prpol
  Pfam annotation: Domain name=RnaseH; Domain location=1-124; Score= -13.5; E_value=0.001; Accession=PF00075.14; Description=RNase H
  Pfam annotation: Domain name=rve; Domain location=335-494; Score =121.8; E_value=1.9e-33; Accession=PF00665.16; Description=Integrase core domain
  Pfam module annotation: Pfam domain module=RnaseH::rve; Domain location=1-124::335-494
MFFDGSLMKTGAGAGLLFISPLGKHLRYVLRLHFPASNNVAEYEALVNGLRIAIELGVRRLDARGDSQLIIDQVMKNSHCRDPKMEAYCDEVRRLEDKFYGLELNHIARCYNETADELAKIALGRTTVPPDVFSRDLHQPSVKIDDTPEPEATSAQSEVPSAQPEVPSARPEATSAQPEATSVQPEVPSAPEGEALRIEEERIGATPDRNWQTPYLQYLDQGELPLDRAEARRVARSAKSFVLLGDEKELYHRSPSGILQRCISIAEGQELLREIHSGACGHHAAPRALVGNAFRQGFYWPTAVADATRIVRICEGCQFYAKQTHLPAQALQTIPITWPFAVWGLDLVGPLQKAPGGYTHQLVAIDKFSKWIEVRPLNSIRSEQAVAFFTNIIHRFGVPNSIITDNGTQFTGKKFLDFCEDHHIRVDWAAVAHPMSNGQVERANGMILQGLKPRIYNDLNNFGKRWMKELPSVVWSLRTTPSRATGFTPFFLVYGAEAVLPTDLEYGSPRTRAYTDQSNQASREDSLDQLEEARDKALLHSARYQQSLRRYHARGVRSRDLQMGDLVLRLRQDARGRHKLTPPWEGPFVIAKVLKPGTYKLANSQGEVYGNAWNIQELRRFYP

SEQ ID NO: 52583 - protein, 93 aa, Zea mays
  Coding DNA Sequence Number=SeqID_10804
  Subcellular localization annotation: CTP_CleavageSite=66; ConfidenceScore=5.08e-01
MKLLFQCPCCSCFCFMKTASSKTQHGGGSGNKEGAAAHHQRTVKFTAFQRVLSQNLGKMFFSLEKRVDNGGDTGSSGHAPPTPSQDASTQQQQ

SEQ ID NO: 52584 - protein, 94 aa, Zea mays
  Coding DNA Sequence Number=SeqID_10805
MGFGSPAQEIVLINLSEDNGLPRRDSRARSSTSTPVDELRPRDSRARRQMGPEDGSALPDRDSDWPSPRRSLQIDRPRARTGTSQGGHHYPTPS

SEQ ID NO: 52585 - protein, 199 aa, Zea mays
  Coding DNA Sequence Number=SeqID_10806
  Gene Ontology: Mol. function=protein dimerization activity
  Homolog annotation: Hit_ID=Q1S398; Match level="QueryCoverage=92%, HitCoverage=43%, E-value=4e-49, Identity=54%"; Hit description=HAT dimerisation
  Pfam annotation: Domain name=hATC; Domain location=75-169; Score =21.6; E_value=0.00018; Accession=PF05699.5; Description=hAT family dimerisation domain
MSLVVDVKTRLTNLRSEDSITTEFDHRFNEVSTELLTCFACLDPRESFSKFDVNKLAHLTKIYLDDFSLDDREAIKYQLATFIIHVRRLEEFRVCHDFASLAIKMVELKRHIVFPLVYRLIELAMLLLVATASVERAFSAIKIIKTELRNKISDGWLNDLMVVYIEREIFKGIDLESIKKAFQKKNDRNMQLSKSPRRN

SEQ ID NO: 52586 - protein, 252 aa, Zea mays
  Coding DNA Sequence Number=SeqID_10807
  Gene Ontology: Mol. function=DNA binding; Cellular component=nucleus; Biological process=translation
  Homolog annotation: Hit_ID=Q10PA6; Match level="QueryCoverage=93%, HitCoverage=33%, E-value=6e-84, Identity=68%"; Hit description=Myb family transcription factor, putative, expressed
MGYGWFSLVELGAGDDQGMNCVAISEVEWADTLTDISVEHLLTEASKDLDCVGTSVKDPLFLENPCSYDSFDAVVALHACRYHASEQPAHAPHSIIWGAEDTCDEFSFNLSASRKQEGSNTSSSSPDTDNEVHPSNSEGFRGFLQDLTGRETDADNPCNDDAKDEEEFYAKSPPRNDKTNELKDQPLADIYWPDSLGPLDLDIPAVRYQTDDILIGDSQSSWNWNRLMANSLDAFRNLSFFSDKNDSIPSIM

SEQ ID NO: 52587 - protein, 57 aa, Zea mays
  Coding DNA Sequence Number=SeqID_10808
MEVPVHFKVLMCILLFLRCVLEGVAEPGNPTLREMDFLWKVRMRMTMRTPHICFDNE

SEQ ID NO: 52588 - protein, 137 aa, Zea mays
  Coding DNA Sequence Number=SeqID_10809
  Subcellular localization annotation: CTP_CleavageSite=47; ConfidenceScore=5.21e-01
MVTQDGDHKFDGGEKQAGLRPLPRPQLQGSSSSLLGRRARTGVRTCRCALGRPVLAGGQVAAVVGAEVVVAGEGFSADETVGATLGRTSGSSTLAACPRPSSGDVGEGLVVAASALRSSLLLFSHPERRSLSFPQAL

SEQ ID NO: 52589 - protein, 1020 aa, Zea mays
  Coding DNA Sequence Number=SeqID_10810
  Homolog annotation: Hit_ID=Q6KA75; Match level="QueryCoverage=99%, HitCoverage=99%, E-value=0.0, Identity=70%"; Hit description =Peroxisomal membrane protein-like
  Subcellular localization annotation: CTP_CleavageSite=36; ConfidenceScore=5.68e-01
MSSRLKDRGGGRATAAATRPLTPKPFSISSSARQTTAAAGKENTASKPSKPTSAVRWSTSSLPRASRIQSSVDSSKLASTLRAPVLPGRTSISKDPVVEAGLRRSVSGGIRASSVEKGRRSISVVGSRASEARRGSAGAGSDDTGRRARFDAKAKGSDEISRKRGDLDAKGKQTDEIGRKRESFDAKAKQIGGKRDSFCVNVLKQCDENKGKTNAFVTNMKKQCEDVGGQIKGSDSKVKAAEEINMKKEGPNKLMKEMNTKKADPGEAASKSVECCAIQKDDDIGKTSVIPVFTVHVVNSNDVPDPIRKQQKNNEEGRKQEEKVKLADRIGVFEKVAAGGEGGSAKPVSAMNRYPSKLHEKLAALEGRVQKIATDIKKTKEMLDENNPNEPKQILSNIQKEITAIEKAISHVKDDNKIQLGTADSSECESSHPETAEKCTITKPGNLKQAGKGLNADELEARFFPHHKLLRGRISSTSTQQELSVDAKKDCSGKTRPAASDPGDDENSIAMEFLASLDGEENDFFKDRRAKKLEKNKICEVADATSKTSSQGSTKNPVAPNHKDEVELLATEELEEFDDQENKSSMMLQEETEESCNSQLSGIGNKSSTGGWFVSEGEAVLLAHGDGTCSYYDIANHEFKSEYKPPSLVSNNTWGDCWLIRAPGVDGCSGRFVVAASAGNALEPGFCSWDYYTREVKSFHVEEEASQTFAPTSRAILGALSNVGSSRSSSALSNTERQQWWYKPCGPLLLSTASKQKMVTAYDIRDGDVVMKWEVSNLVMGMEYSSPLQWRSRGKVVIAGSESIGLWDVNSLNPQPLLSVASGKKVYCLHVNNTDAEVGGGVRQRVSSSEVEGNDGVFSTQESVNVFDFRVPAGIGLKIARHGGTANSIFSRGDSVFIGSTEGRLQIKGGSRSRVQQYSLRKGKLVATYELPEFNAHIHHSAITQVWGDSNLVLAACGMGLFAFDTFKEDTQPTYSFDRGNTIAAREAIGPDDLYCPTFDYSSSRVLLVSRDRPAHWRYL

SEQ ID NO: 52590 - protein, 745 aa, Zea mays
  Coding DNA Sequence Number=SeqID_10811
  Gene Ontology: Mol. function=receptor activity; Cellular component =integral to membrane; Biological process=red or far red light signaling pathway
  Homolog annotation: Hit_ID=Q6K991; Match level="QueryCoverage=99%, HitCoverage=100%, E-value=0.0, Identity=58%"; Hit description =Putative phosphate transporter
  Pfam annotation: Domain name=EXS; Domain location=554-723; Score =243.1; E_value=5.8e-70; Accession=PF03124.5; Description=EXS family
  Pfam annotation: Domain name=SPX; Domain location=2-359; Score=74.0; E_value=4.9e-19; Accession=PF03105.10; Description=SPX domain
  Pfam module annotation: Pfam domain module=EXS::SPX; Domain location =554-723::2-359
MVKFSREYEASIIPEWKAAFVDYRCLKKLVKRIKIARRDATREAGGGSSSDATSSYGFSVLDPVRALAAHFASATPPAVSPANGDEEEEDDDAESLEPDSGELVVVATAKHEREFLEKAGEELEKVNKFYAAQEADMLARGAALVEQLRILADVKRILANHAVASRRSRPAGDSPPPPPSADGRSNSGRHLLSSSSPFLQASPQSMLDGSAELPQARVAEEVMAALERNGVSFVGSGLGSKAKKDGGGKQLTGRAAALPATVRIDVPPTSPGRAALKVWEELVNVLRKDGADPAAAFVHRKKVQHAEKSIRDAFLALYRGLDLLNKFSSLNVKAFTKILKKFVKVSEQQRKTDLFSEKVKRSPFSSSDKVLQLADEVECIFSRHFAGNDRKVAMNMFALISLHVFLYGCNLLAWKSSRISHNFIFDFSPSTALTHRDAFLLSASIMCTVVAALVVNLFLSNAGATYANALPGALLLLSAAALFCPFNVFYRSTRYCFMRVMRNIMLSPFYKVLMADFFMADQLTSQIALLRHLEFTGCYFMAGTFTTHAYGSCTSSSQYKNLAYVLSFLPYYWRAMQCLRRYLEEGHDIDQLANAGKYISAMVAAAVRFKYAAAPTPFWMWMVIVSSTGATIYQLYWDFVMDWGFLDLRSKNRWLRDQLILKNKPIYYASMMLNLVLRLAWAESVMKLRLGMVESRLLDFSLASLEIIRRGHWNFYRLENEHLNNAGKFRAVKTVPLPFRELETD

SEQ ID NO: 52591 - protein, 56 aa, Zea mays
  Coding DNA Sequence Number=SeqID_10812
MNLFVRQITIKDGDQFSRHASNMDNKSKDCICIARGGQHVEPGCRREQVANSAEGG

SEQ ID NO: 52592 - protein, 122 aa, Zea mays
  Coding DNA Sequence Number=SeqID_10813
MACSIVIIATAAPTPEGAQCAATAGPRAAAPPPLLLALLLLCAFLCAVLVLLAPAARQHGDDSDETEELHAASSPWGRRDLPRPAAAAAWRPRPRGRWNSAGQGLRDGKHEVPSGPNPDSNR

SEQ ID NO: 52593 - protein, 142 aa, Zea mays
  Coding DNA Sequence Number=SeqID_10814
MAGKKGNRGLSASKPQTQADHPVDCGLIPNYFGGFSAILTREGVSKVSGLRIQILRLRLDRQSGQTVQNDANDQTNEVRKCSPWIMAAAVLATRRRRSAVELDYGEELLATGGSFAQCGMGRSFVSPSRYPGSSAEDQSRCW

SEQ ID NO: 52594 - protein, 58 aa, Zea mays
  Coding DNA Sequence Number=SeqID_10815
MEGARPERCVGVHQEADAECTVKKGTVAFTEQTLVENTQTKSYNATKRDETLNFSTTN

SEQ ID NO: 52595 - protein, 62 aa, Zea mays
  Coding DNA Sequence Number=SeqID_10816
MPEMPLLLHQPLLLQNSVPTGAGPGVALLSADHHLPWHRSSPSSSCQGAVAELALPPFMDAV

SEQ ID NO: 52596 - protein, 100 aa, Zea mays
  Coding DNA Sequence Number=SeqID_10817
  Subcellular localization annotation: CTP_CleavageSite=23; ConfidenceScore=5.12e-01
MAALLRLFLSPISHSVLSSTFTPAMKPGGQGAQKFRGERGALGIDVPRYRPGTTGGGLGCLGCDNGQKQANIIPTRKEKQPPARWVTQEVEIGDGLGQSD

SEQ ID NO: 52597 - protein, 57 aa, Zea mays
  Coding DNA Sequence Number=SeqID_10818
MQPKTYELVFLLGGEAGADDRHLAFVREAKVGSLGFFSRPHGGSGRCFIHWDCEVIP

SEQ ID NO: 52598 - protein, 77 aa, Zea mays
  Coding DNA Sequence Number=SeqID_10819
MAQWVRVLSRGELTGDDLTAVKSHGDAIAVFGYVAQGQEAAVSPASISAQAAEQGGLLANAVVRALSSHALAIFVEL

SEQ ID NO: 52599 - protein, 352 aa, Zea mays
  Coding DNA Sequence Number=SeqID_10820
  Gene Ontology: Mol. function=receptor activity
  Homolog annotation: Hit_ID=Q8W338; Match level="QueryCoverage=63%, HitCoverage=21%, E-value=1e-93, Identity=80%"; Hit description=TGF beta receptor associated protein-like protein
MDNVLTFGSSDLKVQLYLSEVLDWYKILKEEGNWTEKTYSPTRKKLISTLESNSGYNTDALLKRLPQDALFEERAILYGKINQHLRALSLYVHKLQMPERAVAYCDRVYEEREQQPSKSNIYFNLLQIHLNPRKAEKEFEQKIIPVASQYSGIQKASATKPKGGRVGKKVVEIEGADDIRFSPSGTDSGRSDGDGDDVNDRGPIMLNEALELLSQRWDRINGAQALRLLPRDTKLQLTPRSRRLDCIDFGIDTSVPALFASIASSPFVYDGLDCVDLSVTSFRDDSFDITTSSTMVVAPLSSAISTSVQRAIICMGSLLVPTPVATFALRRHYDYGGMSGDQLVIPEDRPGA

SEQ ID NO: 52600 - protein, 103 aa, Zea mays
  Coding DNA Sequence Number=SeqID_10821
  Gene Ontology: Cellular component=endoplasmic reticulum
  Homolog annotation: Hit_ID=Q8S2K0; Match level="QueryCoverage=95%, HitCoverage=45%, E-value=1e-30, Identity=62%"; Hit description =Putative 24 kDa seed maturation protein
  Pfam annotation: Domain name=Reticulon; Domain location=1-100; Score=- 31.6; E_value=0.00012; Accession=PF02453.8; Description=Reticulon
MAKIPEDLALNVACTLRYEINMGFGTLREIGQGHDLKKFLIVIAELFYGIVHCASQVLYDKHEDKVDAFGEKAMVELKNYYTIFGEKCLSKIPKGPLKDKKQH

SEQ ID NO: 52601 - protein, 475 aa, Zea mays
  Coding DNA Sequence Number=SeqID_10822
  Homolog annotation: Hit_ID=Q8W338; Match level="QueryCoverage=42%, HitCoverage=19%, E-value=1e-100, Identity=91%"; Hit description=TGF beta receptor associated protein-like protein
MVGGREFVEVKEFGVPDILKSMAWCGDNICLGIRREYMIINSMTGALTEVFSSGRIAPPLVVPLLTGELILGKDNIGVFVDQNGKLIQDGRIIWSDTPASVVIHKPYAVARLPRHVEIRSLRPPNALVQTVVLRDVQKLVQTDHCILAALSNSVHGLLPVPIGAQIVQLTASGEFEEALALCKLLPPEDSNLRAAKESSIHIRGVKGLGLSPLELISRLLRGHEMPGFDDVPPGSTPPTTSTVATTIDARAAATNPISQADFMAFQQLVIQLFVALTSMFNRPFTTTAIVPFPSATTPLSSPISSLVPPSSTIPVPIHQIAFPHSPSLIPSFPEDALRAHHHPTAGAITMSYGPVRKVIARASACKVSAAVRLQAAARDLLVCRRLQEVHRQMLETALVAVDLSTRGRGLTLSDGHQQPLWAVVSKREHGACPAGDELQFYGNGGREGAPLLVIDEGALPSATTFLYRPPRGHLR

SEQ ID NO: 52602 - protein, 63 aa, Zea mays
  Coding DNA Sequence Number=SeqID_10823
MNVSFVRLRPSSVNVWRFKVVEMTTEGGSTGGEVDPTTHGFIRSKVEYEALEARERCLQIKDA

SEQ ID NO: 52603 - protein, 86 aa, Zea mays
  Coding DNA Sequence Number=SeqID_10824
MTGPALPTLQLISLTILRWAARQAVATLVRILIKAKQIRVIIVSRTGKNMWFKSCEKSWIKKIADDSTLLPSTASLLPTSAKSNDS

SEQ ID NO: 52604 - protein, 122 aa, Zea mays
  Coding DNA Sequence Number=SeqID_10825
  Homolog annotation: Hit_ID=Q5N821; Match level="QueryCoverage=99%, HitCoverage=8%, E-value=2e-50, Identity=81%"; Hit description =Putative formylglycineamide ribotide amidotransferase
MELLRKVKAKVSANIVDILTEQCFNIQLDNSLTPEKLTMLHWLLAETYEPEKLQTRSFLEDEVSRNSCTVIVEVGPRMTFSTAFSTNAVSICKSLSLVEVTRLERSRRYLLCLEPGSDPLDE

SEQ ID NO: 52605 - protein, 962 aa, Zea mays
  Coding DNA Sequence Number=SeqID_10826
  Gene Ontology: Mol. function=protein serine/threonine kinase activity; Cellular component=integral to membrane; Biological process=protein amino acid phosphorylation
  Homolog annotation: Hit_ID=P93425; Match level="QueryCoverage=97%, HitCoverage=97%, E-value=0.0, Identity=72%"; Hit description=TMK protein precursor
  Pfam annotation: Domain name=APH; Domain location=609-791; Score= -14.3; E_value=0.06; Accession=PF01636.13; Description=Phosphotransfer ase enzyme family
  Pfam annotation: Domain name=LRRNT_2; Domain location=340-378; Score =9.9; E_value=0.08; Accession=PF08263.3; Description=Leucine rich repeat N-terminal domain
  Pfam annotation: Domain name=LRRNT_2; Domain location=41-81; Score =31.6; E_value=2.7e-06; Accession=PF08263.3; Description=Leucine rich repeat N-terminal domain
  Pfam annotation: Domain name=LRR_1; Domain location=109-130; Score =10.8; E_value=2.7; Accession=PF00560.23; Description=Leucine Rich Repeat
  Pfam annotation: Domain name=LRR_1; Domain location=132-154; Score =12.6; E_value=1.2; Accession=PF00560.23; Description=Leucine Rich Repeat
  Pfam annotation: Domain name=LRR_1; Domain location=156-179; Score =0.4; E_value=2.4e+02; Accession=PF00560.23; Description=Leucine Rich Repeat
  Pfam annotation: Domain name=LRR_1; Domain location=205-227; Score =12.0; E_value=1.6; Accession=PF00560.23; Description=Leucine Rich Repeat
  Pfam annotation: Domain name=LRR_1; Domain location=228-249; Score =1.1; E_value=1.8e+02; Accession=PF00560.23; Description=Leucine Rich Repeat
  Pfam annotation: Domain name=LRR_1; Domain location=251-272; Score =12.7; E_value=1.2; Accession=PF00560.23; Description=Leucine Rich Repeat
  Pfam annotation: Domain name=LRR_1; Domain location=274-296; Score =8.6; E_value=7; Accession=PF00560.23; Description=Leucine Rich Repeat
  Pfam annotation: Domain name=LRR_1; Domain location=298-320; Score =3.9; E_value=53; Accession=PF00560.23; Description=Leucine Rich Repeat
  Pfam annotation: Domain name=LRR_1; Domain location=405-427; Score =17.2; E_value=0.058; Accession=PF00560.23; Description=Leucine Rich Repeat
  Pfam annotation: Domain name=LRR_1; Domain location=429-452; Score =6.5; E_value=17; Accession=PF00560.23; Description=Leucine Rich Repeat
  Pfam annotation: Domain name=Pkinase; Domain location=607-885; Score =160.3; E_value=5.1e-45; Accession=PF00069.15; Description=Protein kinase domain
  Pfam annotation: Domain name=Pkinase_Tyr; Domain location=607-885; Score=136.4; E_value=7.7e-38; Accession=PF07714.7; Description =Protein tyrosine kinase
  Pfam module annotation: Pfam domain module=APH::LRRNT_2::LRRNT_2::LRR_ 1::LRR_1::LRR_1::LRR_1::LRR_1::LRR_1::LRR_1::LRR_1::LRR_1::LRR _1::Pkinase::Pkinase_Tyr; Domain location=609-791::340-378::41
  Pfam module annotation: Domain location=156-179::205-227::228 -249::251-272::274-296::298-320::405-427::429-452::607-885::607-8 5
MPFPTAFTARRRRHEGAAGRWCGLVVLVLMALEAGAAAETSPSDVAAMRAVAKALGADKTLGWDVAGDPCSPKRWDGVSCDSSGRVTAIQVGARGLTGTLPPEVGDLTELTRLEVFDNKLSGPLPLLPGLSSLQVLLAHNNSFASIPADFFKGLTGLTAVAIDYNPFASWTLPASLAACASLANFSAISANVSGTLPDFLGAMPALQRLSLSFNQLSGPVPASLAGAPLVQLWLNGAHLNGSISFVSNMTSLEQLWLHSNEFTGPLPDFAGFDDLWDLQLRDNMLTGPVPESLFKLKALKNVTLTNNLLQGPMPQIPNGLHADIEADTERFCVQEAGKPCNPLVSLLLEVAAGFMYPKALAEDWRGNDPCMFPGVTCIQGNITGLTFANKGLSGSISPAIGKISSLKVLDLANNNITGTVPEEVAVLPLLTKIDLSNNNLYGKLPTFASKNVAVNTAGNPNIGKDAPAPTAGPGSSNNSPSGGSSSGSSGNNGNGGSSSSSVGVIAGSVAGTVAGLGLVAALGFYCYKRKQKPFGRVQSPHAMVIHPRHSGSDDMVKITVAGGNANGGARASETYSQASSGPRDIHVVESGNMVISIQVLRNVTNNFSEDNILGRGGFGTVYKGELHDGTKIAVKRMEAGVMGNKGLNEFKSEIAVLTKVRHRNLVSLLGYCLDGNERILVYEYMPQGTLSQHLFEWSENNLRPLEWKKRLSIALDVARGVEYLHSLAQQTFIHRDLKPSNILLGDDMKAKVADFGLVRLAPDDGKCVSIETRLAGTFGYLAPEYAVTGRVTTKADVFSFGVILMELITGRKALDETRPEDSMHLVTWFRRMQLNKETFRKAIDPVIDLDEETYASVSTVSELAGHCCAREAHQRPDMGHAVNVLSTLSEVWKPTDPDSDDSYGIDLNMTLPQALKRWQAFEDSSHFDGATSSFVASLDNTQTSIPTRPPGFAESFTSADGR

SEQ ID NO: 52606 - protein, 101 aa, Zea mays
  Coding DNA Sequence Number=SeqID_10827
MDFSWLLAPEAEGSHTIPGGIQLKGILYNEDSYFAEVEFGLLLPIGGRVEDAPVSGDEAAVLGEEPPSVTHADVGTCAITYSVTMRPGNDILLTCLPGRSL

SEQ ID NO: 52607 - protein, 156 aa, Zea mays
  Coding DNA Sequence Number=SeqID_10828
  Gene Ontology: Mol. function=Rab GTPase activator activity; Cellular component=intracellular; Biological process=regulation of Rab GTPase activity
  Homolog annotation: Hit_ID=Q5N703; Match level="QueryCoverage=91%, HitCoverage=50%, E-value=3e-44, Identity=56%"; Hit description =RabGAP/TBC domain-containing protein-like
MASSPRSPPAPTPEFEISRQSRLFAAGVGAGRLQLSKKLLLGYLPNDRALWPVAVGAEELAKKRGQYAAFKGEFLRNPVRVTREEHPLSLGKTSAWNQFFEYSEIMEQIDRDVKRAHPDMHFFCSDSSFAKSNQESLKNALLIFAKLNAGIGYVQG

SEQ ID NO: 52608 - protein, 364 aa, Zea mays
  Coding DNA Sequence Number=SeqID_10829
  Gene Ontology: Mol. function=protein binding; Cellular component =nucleus; Biological process=regulation of transcription, DNA -dependent
  Homolog annotation: Hit_ID=Q1S7L7; Match level="QueryCoverage=86%, HitCoverage=76%, E-value=3e-46, Identity=34%"; Hit description=Zinc finger, TAZ-type; BTB/POZ
  Pfam annotation: Domain name=BTB; Domain location=13-149; Score=-5.2; E_value=0.012; Accession=PF00651.21; Description=BTBPOZ domain
  Pfam annotation: Domain name=zf-TAZ; Domain location=223-313; Score =3.8; E_value=0.00014; Accession=PF02135.6; Description=TAZ zinc finger
  Pfam module annotation: Pfam domain module=BTB::zf-TAZ; Domain location=13-149::223-313
MCEAPRLGNRAGAGDPAAADVDVVTTGGRRRIPAHSSVLASASPVLGSILERRLRKDRESGKPGRSVVRIRGVTDDAAAAFVRLLYAGRFWMMTNDHVLNTTAKTRLGRCGEDEDDDMEEHAVQVLVLAHAYQVPWLKRACEGAIGARLTADSVVDVLQLAGLCDAPRLHLRCARLLAKEFAAVERTEAWRFLQENDPWQELHVLQRLHEADMRRRKWRRKRAEQRVYMELSEAMDCLDHICTEGCTEVGPAGRAPAPAPCARYATCRGLQLLIRHFSQCHRKSCARCQRMWQLLRLHSALCDRTDRCNTPLCMRFKQQEQDKAAAKGGDDGDKWGLLVKKVKTARVFSSLANRKQMSTTTTQC

SEQ ID NO: 52609 - protein, 65 aa, Zea mays
  Coding DNA Sequence Number=SeqID_10830
MEKVTGGIGSGCSGGGASWVRLVLEQQHAYCPLRGLDAIGVLRAMRVLCELLALSRAPYPNSDRT

SEQ ID NO: 52610 - protein, 48 aa, Zea mays
  Coding DNA Sequence Number=SeqID_10831
MAENPVEHSPHKSTLTSGNHFLRDHQAKRGDIESVSYFGEAMGLKGQD

SEQ ID NO: 52611 - protein, 611 aa, Zea mays
  Coding DNA Sequence Number=SeqID_10832
  Gene Ontology: Mol. function=zinc ion binding; Cellular component =nucleus; Biological process=regulation of transcription, DNA -dependent
  Homolog annotation: Hit_ID=Q6K937; Match level="QueryCoverage=96%, HitCoverage=84%, E-value=0.0, Identity=68%"; Hit description=Zinc finger (C3HC4-type RING finger)-like protein
  Pfam annotation: Domain name=VWA; Domain location=174-355; Score =106.7; E_value=6.6e-29; Accession=PF00092.18; Description=von Willebrand factor type A domain
  Pfam annotation: Domain name=VWA_CoxE; Domain location=104-328; Score= -67.2; E_value=0.0018; Accession=PF05762.4; Description=VWA domain containing CoxE-like protei
  Pfam annotation: Domain name=zf-C3HC4; Domain location=2-37; Score =13.8; E_value=0.0059; Accession=PF00097.15; Description=Zinc finger, C3HC4 type (RING finger)
  Pfam module annotation: Pfam domain module=VWA::VWA_CoxE::zf-C3HC4; Domain location=174-355::104-328::2-37
MRSGHGQALFTAECSHMFHFQCISSNVKHGNYVCPVCRAKWKEIPYRSLSSTSPHGRIGGDHTRSPQQDPHLALHQQVSNRRREVRRLRTSEPADYNDDEPLQRMEAFDDLNFGSSKTAEISSYPEFQAVPQSTCLDGFDILIHVKAPTSSSDDATGSLVNGSSLRLSRRVPIDIVTVLDVSGSMAGTKMALLKQAMGFVIQHLRPSDRLSVIAFSSTARRLFPLQRMSHHGRQQALQAINSLGAGGGTNIADALKKAVKVIADRSYKNSVCSIILLSDGQDTYNISSNFQGTSAGRRSLVPSANPNELHMVPLHTFGFGADHDSDTLHSISEASGGTFSFIEDEGVMQDAFAQCIGGLLSVAVREMRLSMECVDPGVLLCSIKSGSYPSKVARDGRNGFVDIAHLYADEEKDILLSVTIPKSCEQTSLLRVACAYKDPVSNETIKIQGDEVKIKRPASTVSVPVSIEVDRERNRIRATNSMESAWAAAERGALSEAVTILEDCRRALSQCVASQNGDRLCMGLVAELREMQERMGKRQLLRGFREGVYAIWIELSFMAEKNSTRRTLQIAPLLVIPIKRRPWSDAGSIPRIFGSLPQGPKATSPGSGDQS

SEQ ID NO: 52612 - protein, 158 aa, Zea mays
  Coding DNA Sequence Number=SeqID_10833
  Homolog annotation: Hit_ID=Q6QP51; Match level="QueryCoverage=57%, HitCoverage=30%, E-value=4e-09, Identity=63%"; Hit description =Putative growth-regulating factor 1
  Subcellular localization annotation: CTP_CleavageSite=40; ConfidenceScore=5.26e-01
MIPPRPSPASGKGSRPRRIHVLPEASGAIGSSASPDPRARAQPRRRTTDSVSPDPRARTQPRPQKTDSASPDLRARTQPRPRKMDSALPDPRARIQPRPRKTDSASPDPRARTRPRKTDSASPDPRARTRPRPRRSLRLARARARTDHVTGGPSLPYS

SEQ ID NO: 52613 - protein, 402 aa, Zea mays
  Coding DNA Sequence Number=SeqID_10834
  Gene Ontology: Mol. function=receptor activity; Cellular component =integral to membrane; Biological process=ion transport
  Homolog annotation: Hit_ID=Q8S1S0; Match level="QueryCoverage=93%, HitCoverage=92%, E-value=1e-89, Identity=42%"; Hit description =Putative lung seven transmembrane receptor 1
  Pfam annotation: Domain name=Lung_7-TM_R; Domain location=138-390; Score=7.3; E_value=1.6e-09; Accession=PF06814.3; Description=Lung seven transmembrane receptor
MQLDRFMAASVVVLAVVVSLAAVLPIARAEIKTTPIVSDSRSVILFEEFGFRRGGHATVSATGITWRVPEDSQLQAVDTTLMGFFLISNSLFYKINNESDYAEATGGAFCPLTSKYVQRLFLFKEVAPDGTGRGSLTIDSDDQYTVLFSSCQEGVEVTMEVRTEMYNLRRSGARETAERIHAVMGALLLFKALKIACAPEAQCFVERPARRTGGTSPFYVFGFFKGILLFTVIVLIGTGWSFLNPYLQEREKNVLMIIIPLQVIENIASAVIGETGPAGRDWLAWNQIFLLVDVICCCAVFFPIIWSIRNLREASKTDGKAARNLQKLTLFKQFYLVVVCYLYFTRIAASAVAAVLSYKYQWAVNVSIETASLAFYVFVFYNFKPEEKNPYLYVGDDEEEAA

SEQ ID NO: 52614 - protein, 444 aa, Zea mays
  Coding DNA Sequence Number=SeqID_10835
  Gene Ontology: Mol. function=receptor activity; Cellular component =integral to membrane; Biological process=ion transport
  Homolog annotation: Hit_ID=Q8S1S0; Match level="QueryCoverage=95%, HitCoverage=94%, E-value=1e-105, Identity=46%"; Hit description =Putative lung seven transmembrane receptor 1
  Pfam annotation: Domain name=Lung_7-TM_R; Domain location=132-420; Score=98.0; E_value=2.8e-26; Accession=PF06814.3; Description=Lung seven transmembrane receptor
MAASVVVLAVVVSLAAVLPIARAEIKTTHIVSDSRSVILFEEFGFRRGGHATVSATGITWRVPEDSQLQAVDTTLMGFFLISNSLFYKINNESDYAEATGGAFCPLTSKYVQRLFLFKEVAPDGTGRGSLTIDSDDQYTVLFSSCQEGVEVTMEVRTEMYNLRRSGAREYLPVGLLPLPWIFAAAAAVHFAFLGTWVLVCVKHRRTAERIHAVMGALLLFKALKLACAAEDQWFVERTGTPHGWDVAFYVFGFFKGILLFTVIVLIGTGWSFLKPYLQEREKNVLMIIIPLQVIENIASAVIGETGPAGRDWLAWNQIFLLVDVICCCAVFFPIIWSIRNLREASKTDGKAARNLQKLTLFKQFYLVVVCYLYFTRIAASAVAAVLSYKYQWAVNVSIETASLAFYVFVFYNFKPVEKNPYLYVGDDEEEAAGGQLEMESTFEI

SEQ ID NO: 52615 - protein, 266 aa, Zea mays
  Coding DNA Sequence Number=SeqID_10836
  Gene Ontology: Mol. function=protein binding; Cellular component =cellulose and pectin-containing cell wall; Biological process =protein amino acid phosphorylation
  Homolog annotation: Hit_ID=Q5Z8W0; Match level="QueryCoverage=79%, HitCoverage=39%, E-value=1e-91, Identity=77%"; Hit description =Putative extensin
  Pfam annotation: Domain name=LRR_1; Domain location=121-143; Score =9.3; E_value=5.2; Accession=PF00560.23; Description=Leucine Rich Repeat
  Pfam annotation: Domain name=LRR_1; Domain location=145-164; Score =11.2; E_value=2.3; Accession=PF00560.23; Description=Leucine Rich Repeat
  Pfam annotation: Domain name=LRR_1; Domain location=168-190; Score =2.4; E_value=1e+02; Accession=PF00560.23; Description=Leucine Rich Repeat
  Pfam annotation: Domain name=LRR_1; Domain location=191-213; Score =3.7; E_value=59; Accession=PF00560.23; Description=Leucine Rich Repeat
  Pfam annotation: Domain name=LRR_1; Domain location=240-263; Score =6.9; E_value=14; Accession=PF00560.23; Description=Leucine Rich Repeat
  Pfam annotation: Domain name=LRR_1; Domain location=97-119; Score =8.3; E_value=8; Accession=PF00560.23; Description=Leucine Rich Repeat
  Pfam module annotation: Pfam domain module=LRR_1::LRR_1::LRR_1::LRR _1::LRR_1::LRR_1; Domain location=121-143::145-164::168-190::191 -213::240-263::97-119
MNPQRTGELGQQVRAFWNQVAVTAVHLTVTFLRTDRLSSWSSYNFTSNWAGPNVCAYNGIYCAPRPSDGALVVAGIDLNHADIAGPIPADLPLGVPDLALLHLNSNRFCGVLPDTLLHLRLLHELDLSNNRFVGAFPAVVLALPSLRYLDLRFNDFEGPISPPLFDRPLDAILLNSNRLRGPIPANLGNSPASVLVLAHNRLGGCIPPSIGRMAATLNEIALIDDDLTGCVPPQVGLLRKVTVFDVSGNHLQGPLPCGGTARIIPT

SEQ ID NO: 52616 - protein, 307 aa, Zea mays
  Coding DNA Sequence Number=SeqID_10837
  Gene Ontology: Cellular component=membrane
  Homolog annotation: Hit_ID=Q2L3W4; Match level="QueryCoverage=50%, HitCoverage=32%, E-value=2e-47, Identity=66%"; Hit description =Mechanosensitive ion channel
MSGKSRPLPKSGRLTTVASKRGGGGAAAAASKQMHRQKIEHHLDDDISIDQLHKLSQKNISAWSMKRPMKIVWYGALTTMDEQLKHATGEDELATEIHSEYKAKVAAKRIFQNVAKPGSKHIYLSDLMCFMRQEEALKATNLFEGAQEHNRVSKRSLKNWVSVDFALPFHNGESLSLSSISSKPPPWCFIMADFSSAVCLQPHTLEESCGCGATSERRRMTAPKPGGGAVAAARAAAAGPRTVLITGVSRGLGQALALELARRGHAVVGCGRSAEQLRSLEVEITSPSRHFLTVADVVRLQCTFKYL

SEQ ID NO: 52617 - protein, 123 aa, Zea mays
  Coding DNA Sequence Number=SeqID_10838
  Gene Ontology: Mol. function=protein binding
  Homolog annotation: Hit_ID=Q5Z8W0; Match level="QueryCoverage=68%, HitCoverage=15%, E-value=3e-15, Identity=52%"; Hit description =Putative extensin
MADLQQLNVAGNLPRGPVLPAVCGLQGTLGNFIYEDNFFTSRPGCAVATADGRCNCIPGAPAHRPPPHCAAAAASFDCRTAQCQAPPMSGPPRSGPGGPSQPLSPPGNSNTPSHPSPPGQDEL

SEQ ID NO: 52618 - protein, 86 aa, Zea mays
  Coding DNA Sequence Number=SeqID_10839
  Subcellular localization annotation: CTP_CleavageSite=33; ConfidenceScore=5.42e-01
MVGLTGGPGKPVDGRMAVGGGRSRSGHALRRKSSSAARSPAYTRRFSSIGWLGERILERVIRRFRMRSCLVRGLGKLTETLGRLAK

SEQ ID NO: 52619 - protein, 111 aa, Zea mays
  Coding DNA Sequence Number=SeqID_10840
MACRRIAMRGGECARGLGKHRLADQGRTRKLRLDLLVSLASHMVVAVDASFMGIVRSSPVDASVFVIGGTTEGPTFTGCEEDWTKELRMQHLKGIHKRSVEVQDSRTKEAQ

SEQ ID NO: 52620 - protein, 82 aa, Zea mays
  Coding DNA Sequence Number=SeqID_10841
MEASLWVDGRGGRTWAVAGLGFERWVFKFAKRRRRRTTRCDLRAKRATSWQSDSRVVAADGRALSCSHARPRARGQGCGPRE

SEQ ID NO: 52621 - protein, 85 aa, Zea mays
  Coding DNA Sequence Number=SeqID_10842
MVWIVVLAIDGRGRNGGRGQRGGEKLAGPEQSEEGRGRAGAKAPDAQPSGPSDGVPAARRVYSEKRLNDKLLQKLAVWQNFGLNL

SEQ ID NO: 52622 - protein, 107 aa, Zea mays
  Coding DNA Sequence Number=SeqID_10843
  Subcellular localization annotation: CTP_CleavageSite=71; ConfidenceScore=5.66e-01
MTTAVLSPLRKQRDISKVPTTPTVVLLQGSSTTPTATTSYEQGTNTSPTATSTFSFQKMDHNLGAVIIGAVVTHSGADIIGVNFSYKFLSLSQTYLLKHEESHYKRN

SEQ ID NO: 52623 - protein, 125 aa, Zea mays
  Coding DNA Sequence Number=SeqID_10844
MSSSDDRTTSTSFLAVTRLPRLQICFGEWCGDCLCLCTAHRFRSHQSERSLDDGVRPRAGERVQKSRKCGASIRLKKTSSSTPYVSENQINMTESLTTSTGRYASMPHRNSHKGMSQIEDYDKIK

SEQ ID NO: 52624 - protein, 183 aa, Zea mays
  Coding DNA Sequence Number=SeqID_10845
MTTARSMTASITAIGVLSQKEPPAADARLDREHAEAELSAALRWCSNARRNSMRLRHSAIVAWRRGAGAAPLRGRADGNWEAGRRERCVVGAPGSGGGFCRSDRWGWGMRMGGYSTVGTAPCVVYIWVGPNGRTRSTKEKARPKHGTARNYFGPGRAGPLHRAVLGPTPRPTGGHEPGPFKQT

SEQ ID NO: 52625 - protein, 130 aa, Zea mays
  Coding DNA Sequence Number=SeqID_10846
MRPHQRASWSIFYGDTTAQPLRLILYDSGPLISNVQWQGWRTAGRTPTHCPSLSYSSLSSKGKDTSEANEINCAKDVQTTTKLKDPAWLPRPRSERSKTVNGSQSQPRPRVDSRASGGRLDRRRAIHEEH

SEQ ID NO: 52626 - protein, 215 aa, Zea mays
  Coding DNA Sequence Number=SeqID_10847
  Gene Ontology: Mol. function=sequence-specific DNA binding; Cellular component=nucleus; Biological process=regulation of transcription, DNA-dependent
  Homolog annotation: Hit_ID=Q43353; Match level="QueryCoverage=64%, HitCoverage=39%, E-value=2e-33, Identity=59%"; Hit description=ZAG2 protein
  Pfam annotation: Domain name=K-box; Domain location=11-143; Score =54.3; E_value=3.9e-13; Accession=PF01486.8; Description=K-box region
MIERYKKAHAVGSSSGPPLLEHNAQQFYQQESAKPRNQIQMLQNTNRHLVSDSVGNLSLKELKKLESRLEKGISKIRLTLLSSNLNCIMSNINKQREYLIIYTTLIAEFLFQSELLAAEINYMAKRETELQNDHMNLRTKDPRTCPTGHRPEDQPAGHQEDALQAAQVPVLLPRILLPRTTKFLAILNRLIYRTAASKNNKEHGMSYWASDLMIH

SEQ ID NO: 52627 - protein, 615 aa, Zea mays
  Coding DNA Sequence Number=SeqID_10848
  Gene Ontology: Mol. function=electron carrier activity; Biological process=electron transport
  Homolog annotation: Hit_ID=Q6YWQ1; Match level="QueryCoverage=96%, HitCoverage=95%, E-value=0.0, Identity=59%"; Hit description =Putative aluminum-activated malate transporter
  Pfam annotation: Domain name=UPF0005; Domain location=85-583; Score =639.3; E_value=3.2e-189; Accession=PF01027.11; Description =Uncharacterised protein family UPF0005
MAVASAARTATPASPARLGSLWSTLEDQRGAAVPLLSSAWTLPTTSQGGIAGDGEQLPKEGLLRRAGGVVARWWGAACGAVAELWAFARADPRKPVFAGKVALALALISLLVFLREPRDIVSHSVWAILTVVVVFEFSIGATLSKGFNRGLGTLTAGAFALVVAELSKHLGKLEEVILITSILIVAFFTTLTKLHPKMKPYEYGFRVFLLTFCYVMVSGYNTGKFTDTATSRFILIAIGAAVSLGINVGIYPIWAGEDLHNLIAKNFTGVAKSLEGCVDGYLRCMEYERIPSKILVYQASDDPVYSGYRAAVEASAQEETLLGFAIWEPPHGPYKTMNYPWRSFTKVSGALRHCSFAVMALHGCILSEIQAPPESRRVFSAEIQRVGQEGAKVLRELGSRVKTMTKLSSSGILFEVHMAAEELQKKIDEKSYLLVNTERWDASKQAQGIKEVVNGTRAVETENKNKENKDDGTSAVEKENKSKENNNGGLEPTIVDQTLVHQSKSFLANSFLSRYDSASTIDGFKPALSWPARKSFHPNIPLEDEDSQTYESASALSLATFASLLIEFVARLQNVVNAFEELSEKANFKDPVVEPTAVSTSNVRFLDKLCKFVGF

SEQ ID NO: 52628 - protein, 531 aa, Zea mays
  Coding DNA Sequence Number=SeqID_10849
  Gene Ontology: Mol. function=peptidase activity; Cellular component =cellulose and pectin-containing cell wall; Biological process =proteolysis
  Homolog annotation: Hit_ID=Q5Z6M6; Match level="QueryCoverage=77%, HitCoverage=80%, E-value=1e-146, Identity=58%"; Hit description =Putative nucellin-like aspartic protease
  Pfam annotation: Domain name=Asp; Domain location=159-507; Score= -69.2; E_value=1.6e-09; Accession=PF00026.14; Description=Eukaryotic aspartyl protease
MEDDEGKKQHQRIIPNANGHVMIVVPDDAHAHALPASASAPPRDADGPDEESGDEEERTPAGATSSLWRAAVLALAALALAAAAYACLYAGGDDDAGAAWRLLEARRQEDGGDDEHPGGRTSFLLPLYPKPPRRGGDDWPQNSTLFPHSLAGNLFPEGLYYTAISLGSPPRPYFLDVDTGSHTTWVQCDAPPCASCAKGAHPLYRPARTADALPASDPLCEGAQHENPNQCDYEISYADGSSSMGVYVRDSMQFVGEDGERENADIVFGCGYDQQGVLLNALETTDGVLGLTNKALSLPTQLASRGIISNAFGHCMSTDPSGAGGYLFLGDDYIPRWGMTWVPIRDGPAEAQVKQINHGDQQLNAQGKLTQVVFDTGSTYTYFPDEALTRLISSLKEAASPRFVQDDSDKTLPFCMKSDFPVRSVEDVKHFFKPLSLQFEKRFFFSRTFNIRPEHYLVISDKGNVCLGVLNGTTIGYDSVVIVGDVSLRGKLVAYDNDKNEVGWVDFDCTNPRKRSRIPSFLRRALRNQLL

SEQ ID NO: 52629 - protein, 241 aa, Zea mays
  Coding DNA Sequence Number=SeqID_10850
EHLMIGKVMETLDYCAKWEIDQDAKPMDFPPQVDMLPKKWMQNLKTIMQFGSFTSYMERDTWRLVVGRGGDWVLDLGTGVEGVSFSPLLSPKRGQHRPSDCQRSRPPHGPLLRVIPSIEERRVTGLGEDPSSAVSPAITALWEVHVLRSGWEVGEVLGRGRGEISEDGDDSWGGDGGGWGMEHDGDGRAREEHGRGGEAAQRTGTASIDAMRDFGAGRGGGPQTRGRTVHRPAVWTPTVLT

SEQ ID NO: 52630 - protein, 45 aa, Zea mays
  Coding DNA Sequence Number=SeqID_10851
MSARVCEAAEWQNELWPHLNNCCKTYPTKEKTLKDMLDLGIKERL

SEQ ID NO: 52631 - protein, 963 aa, Zea mays
  Coding DNA Sequence Number=SeqID_10852
  Gene Ontology: Mol. function=RNA binding
  Homolog annotation: Hit_ID=Q6K9R1; Match level="QueryCoverage=99%, HitCoverage=99%, E-value=0.0, Identity=72%"; Hit description=Pumilio- like
  Pfam annotation: Domain name=NABP; Domain location=308-668; Score =515.0; E_value=8.6e-152; Accession=PF07990.3; Description=Nucleic acid binding protein NABP
  Pfam annotation: Domain name=PUF; Domain location=669-703; Score =41.7; E_value=2.5e-09; Accession=PF00806.9; Description=Pumilio -family RNA binding repeat
  Pfam annotation: Domain name=PUF; Domain location=705-739; Score =43.5; E_value=7.3e-10; Accession=PF00806.9; Description=Pumilio -family RNA binding repeat
  Pfam annotation: Domain name=PUF; Domain location=741-775; Score =36.0; E_value=1.3e-07; Accession=PF00806.9; Description=Pumilio -family RNA binding repeat
  Pfam annotation: Domain name=PUF; Domain location=777-809; Score=5.6; E_value=1.3; Accession=PF00806.9; Description=Pumilio-family RNA binding repeat
  Pfam annotation: Domain name=PUF; Domain location=811-845; Score =36.1; E_value=1.2e-07; Accession=PF00806.9; Description=Pumilio -family RNA binding repeat
  Pfam annotation: Domain name=PUF; Domain location=847-881; Score =36.7; E_value=7.8e-08; Accession=PF00806.9; Description=Pumilio -family RNA binding repeat
  Pfam annotation: Domain name=PUF; Domain location=889-923; Score =30.6; E_value=5.3e-06; Accession=PF00806.9; Description=Pumilio -family RNA binding repeat
  Pfam module annotation: Pfam domain module=NABP::PUF::PUF::PUF::PUF::P UF::PUF::PUF; Domain location=308-668::669-703::705-739::741-775::777- 809::811-845::847-881::889-923
MAPSQAAAAAGPTFEDLERDLQAVLMDQNHMSPVDDLGMFRSGSAPPTVEGSRTAIGALFSGPPLHANSLGAGGGSGGTASGLDVLTDEEIRSHPAYLSYYYSNEHLNPRLPPPMVSKEDWRAAQWFQAVSGGIGDRRRRPAEVGSGNSLFSVQPGANEVGGEKALLSDRMERSGRNGLARQQSSEWLGRGSDGLIGLSDASALGSPRKSFADALQENISRPAVIAGHLSRSNSRNVLEGPTPIRSSDSRKPQLQNRSESMNGLRSGSTSPSLVRVQSLGSSMSHTFASAVGSSISRSTTPDPQLIRRTPSPCLPPVGVRMGSSDKKVEASVSSLNHDGADIVATLSSLSLSGNKMSNVENEVQTHAYQNFGDQADVLFNVPKEHRQFSPRNLTQKTDEDLLNAPEYAVFPNGGSNFSNLHASKVASHSNSKFPMQSPHGNANKKGSLMSSAGSVSQYQHLNGDSHDIDVSGWHTHTGGFTSSMLNNQLNPDGDYGNVLSNHGGSSYQGQPTETMYAQCLQANPDSPLGAAASMSPFQGRGFTGSGHLDSPGYQKAYLGSLFGQQKLQYGMPYLGNSGALNQNIYGNDSAFGIGMTYLTSPPSTPYISSPQGHVGQGNRLTRLPAVVRNTAGGSMGSWNSENGLMDNGYGSSLLEEFKSNKTRSFELLDIVGHVVEFSSDQYGSRFIQQKLETASTEQKNMIFPEILPQARTLMTDVFGNYVIQKFFEYGTETQTKQLATLLKGFVLQLSLQMYGCRVIQKALEVVEVEQQTQMALELDGSIMRCVRDQNGNHRILEHCDDESTQNAMMEEIMQSVVTLTEDQYGNYVIQHVLQYGKPEERSTIIAQLAGQIVKMSQQKFASNVVEKCLTFGSPEQRQILINEMLGTTDENEPLQAMMKDQFANYVVQKVLETCDDQNRELILSRIKVHLNALKRYTYGKHIVTRVEKLIAAGERRIGALPSC

SEQ ID NO: 52632 - protein, 432 aa, Zea mays
  Coding DNA Sequence Number=SeqID_10853
  Gene Ontology: Mol. function=protein kinase activity; Cellular component=chloroplast; Biological process=protein amino acid phosphorylation
  Homolog annotation: Hit_ID=Q9M7J5; Match level="QueryCoverage=80%, HitCoverage=79%, E-value=1e-129, Identity=65%"; Hit description =Protein serine/threonine kinase
  Pfam annotation: Domain name=Pkinase; Domain location=81-367; Score =155.2; E_value=1.8e-43; Accession=PF00069.15; Description=Protein kinase domain
  Pfam annotation: Domain name=Pkinase_Tyr; Domain location=81-367; Score=140.2; E_value=5.5e-39; Accession=PF07714.7; Description =Protein tyrosine kinase
  Pfam module annotation: Pfam domain module=Pkinase::Pkinase_Tyr; Domain location=81-367::81-367
  Subcellular localization annotation: CTP_CleavageSite=67; ConfidenceScore=5.64e-01
MRCLPFLHGDVSEKDPVTKSASVRSMSTTSRSRSGSDFTSLNVSDMSAESIRRTQYPSFTDCPSNLRVFSFAELKSATRNFSRSLMLGEGGFGCVFSGIIKTSDKPNERIEIAVKQLNRKGLQASDSRHGQKEWLTEMNVLGIVDHPNLVKLIGYCAEDDERGVQRLLVYEYMPNGSVDDHLSSRSTTLSWPMRLKVALDSARGLKYLHEEMEFQVIFRDLKTSNILLDENWNAKLSDFGLARHGPTEGLTHVSTAVVGTLGYTAPEYMQTGHLTAKSDIWSYGVVLYELITGRRPIDQNRPKSEQKLLDWVKPYISDVKRFPVIIDPRLEGHYNLKSATKLASVANRCMVRLPKSRPKMSEVYGMVQRIVDGVGTGPPQPPLLHYHHGSASEPGAKRAEKGSLRRRFREFRSGCRHVVLRRGRKPEVVKDL

SEQ ID NO: 52633 - protein, 572 aa, Zea mays
  Coding DNA Sequence Number=SeqID_10854
  Gene Ontology: Mol. function=phosphatidylinositol phosphate kinase activity; Biological process=phosphatidylinositol metabolic process
  Homolog annotation: Hit_ID=Q8LN60; Match level="QueryCoverage=73%, HitCoverage=56%, E-value=1e-136, Identity=60%"; Hit description =Putative phosphatidylinositol 4-phosphate 5-kinase
  Pfam annotation: Domain name=PIP5K; Domain location=221-512; Score =229.7; E_value=6.3e-66; Accession=PF01504.9; Description =Phosphatidylinositol-4-phosphate 5-Kinase
MPPGAAAVAATSQQADCCGHGPGPGPSWRGGGGCDVPGGASCSYLPLRKRLSVDGKFPAPRICIWECDGEAGDITCDIVAAPIRRSCSARAMPPPPAASLFRRMMTPPPSRPRPPQREVEDAVAARRPGETISKGHRSYGLMLNLQLGVSYSVGKSSALPFRKLSSSDFDPREKVWTRFPPEGSKLTPPHHSVDFRWKDYCPAVFRHLRKLFGVDPADYMLAICGSDTLRELASPGKSGSCFFVTQDDRFMIKTVKKAEMKVLIRMLRSYYEHVCRYKSTLLTRFYGTHCIKQAGCPKVRFIIMGNFCCSEYKIHRRFDLKGSSHGRTIDKAEEKIDEATTLKDLDLDYAFHLQRFWYDELMRQIQMDCTFLETQGIMDYSLLLGVHFRDDFSMSKIGVSQFIGLPKSTGKRKSFEGGGDVCELCFTESGCKDRDFIVDSRVTPCVCTYQETTGPVRQEHACPGRAETQSCTREDSKSSVAECSSENIKEQFVQRVTAPLAFYIMGSIGEVLGYDGFTDPERALEQWKGWSVYPTHSFLNNWRRGRRSTADTHANAERMRAKTVELCLFKDL

SEQ ID NO: 52634 - protein, 142 aa, Zea mays
  Coding DNA Sequence Number=SeqID_10855
  Subcellular localization annotation: CTP_CleavageSite=32; ConfidenceScore=5.15e-01
MAVASQSTGRSRALDSCVIRRPLQPTVALSSRCSAGAPDSPMNYSGAALVKPEGGKFEVVGPWAPDTVRCHTGQSDNFQQTIGQYLSGTIIRGTPKTPNLSCRQSQSDRSHFAASLTNLIGKQCRLRRFDCCATRQSEADNS

SEQ ID NO: 52635 - protein, 85 aa, Zea mays
  Coding DNA Sequence Number=SeqID_10856
  Subcellular localization annotation: CTP_CleavageSite=71; ConfidenceScore=5.12e-01
MARKLPWCTSNPYAPRSSKTNAEHSPRPPQKAPKSLVGDDAFAAHVGNSRAPNRAPHQSGDEVVAGGPSPSASDGSYNLNARRKR

SEQ ID NO: 52636 - protein, 47 aa, Zea mays
  Coding DNA Sequence Number=SeqID_10857
MARFSPCALLLLSSPPKQQASAAPSIVDAHRMFDVLRSPNIDVVHPR

SEQ ID NO: 52637 - protein, 156 aa, Zea mays
  Coding DNA Sequence Number=SeqID_10858
MWLHELASRLLRKVDDVDDREGTSRGSAMGVGASATGKRKRLLLLLDAVENGGTVERSRECWSIGLRPQSREGRCLGACTRGARPWMLLPPCARVEGAERCGEGGCGFLRLSSRKTEKREGDVPVGWVSSTMGRRCMRRPAAMEEQGTHRRDGGWD

SEQ ID NO: 52638 - protein, 105 aa, Zea mays
  Coding DNA Sequence Number=SeqID_10859
MAKLCLTVAEHGRGWWSSSAGGGFGRRRPGDGEAPASLKNGRAQLGLVCRGEISEAGGGGSMRRLEDGVGIPVWRGEATWERRSARGEDEVVVEDFQEFQEYDEF

SEQ ID NO: 52639 - protein, 110 aa, Zea mays
  Coding DNA Sequence Number=SeqID_10860
MVRIARCFIFPLRRRGAGVPTFYANFYDKELEFIFVCEGLLPWDADTINELYNLTVDVDEHSDFFTEVTDEKRDLLKGIVPREDEEFMENKGAINEASVGRMNRGKKHRY

SEQ ID NO: 52640 - protein, 98 aa, Zea mays
  Coding DNA Sequence Number=SeqID_10861
MTIKTIDVRKIILREIRNCVARHSGLAYFPFMITVLHLKAKILANITIEWKIEENGKLPKSPYTLTFLRFGQVCIKLVVMVDVYVYVLCYANETSEKK

SEQ ID NO: 52641 - protein, 307 aa, Zea mays
  Coding DNA Sequence Number=SeqID_10862
  Gene Ontology: Mol. function=nucleic acid binding
  Homolog annotation: Hit_ID=Q1SHC9; Match level="QueryCoverage=54%, HitCoverage=35%, E-value=8e-10, Identity=30%"; Hit description=Zinc knuckle, putative
  Pfam annotation: Domain name=zf-CCHC; Domain location=102-119; Score =20.0; E_value=0.0005; Accession=PF00098.13; Description=Zinc knuckle
MEQHQQFRSFVAAIQGWQTHPSLVEFENLLAGQEALAKQMGGVSLKKKEEALYANRGKWNSKIHTTGRSRKNNDKAKSHQGEESIRVGGASMNQDNDKKFEGNCYNCGKKGHMEKAYWSKKKSVESNVAASKSEDEWDAEALFTATTSEKIDYKKDWIVNSGCSNHMTDKKVLPDSDGFKYVVQSSQIQLGLDEAKDVDDEGNGKEGVAQSPWQTSVYQQPSEQDEPSVVETPTSLRRSTRIRKPNLKYANSAIVEEADAKESETFEEAFQNPEWIKAMEEEIAALDRNQIWELVPMQKYVKPISCK

SEQ ID NO: 52642 - protein, 93 aa, Zea mays
  Coding DNA Sequence Number=SeqID_10863
MVGAEIGDVDLGVYPFATWAPHRRHVLGLGANSIGPVQPPGGQTGSQSASQEVRPVSLNFPWTPVGPAWTPVELEVQLELRKLNSAEVQLSYS

SEQ ID NO: 52643 - protein, 91 aa, Zea mays
  Coding DNA Sequence Number=SeqID_10864
  Gene Ontology: Mol. function=sulfate porter activity; Cellular component=integral to membrane; Biological process=sulfate transport
  Homolog annotation: Hit_ID=Q9FY46; Match level="QueryCoverage=78%, HitCoverage=10%, E-value=3e-26, Identity=80%"; Hit description =Sulfate transporter 4.1, chloroplast precursor
MCALAAIVISAVTGLVDYEEAIFLWAIDKKDFFLWAITFITTLVFGIEIGVLVGVAFSLAFVIHESANPHIGMRVGSSQLNCAIPPLITNH

SEQ ID NO: 52644 - protein, 217 aa, Zea mays
  Coding DNA Sequence Number=SeqID_10865
MTATSHEDKGYDSFPLLGSSHSSLSSHEGHSHCEVDSRNVGMARINQRGAKGEAGLTRQYEAPRARGCTQAASTRGGAQDNRAQANSGRPPTVPKQPTLGMTLSLMPRLVAVRSVVPRPTPRLAWPRLAAPRKAWPRPPPAGSRSPGLGAGGAGGGDLKVVKTRVAARERAGPTATEAQAQGQGGGKLSGKIANFSREEPAGGEASSVQPTALGPRQ

SEQ ID NO: 52645 - protein, 112 aa, Zea mays
  Coding DNA Sequence Number=SeqID_10866
  Gene Ontology: Mol. function=unfolded protein binding; Cellular component=mitochondrion; Biological process=protein folding
  Homolog annotation: Hit_ID=Q53K99; Match level="QueryCoverage=100%, HitCoverage=58%, E-value=3e-27, Identity=54%"; Hit description =Retrotransposon protein, putative, unclassified
MAGGRPAGVQAPGLVNVGVDNRLIDGAPKVEVVVDIAPKIPKDLLDRTQVQLIGIMHIEVDLLNSACDVESGEGEMLKSTGEAVVDNGVTDRSAIAKELGLCVHRGHTGLAV

SEQ ID NO: 52646 - protein, 88 aa, Zea mays
  Coding DNA Sequence Number=SeqID_10867
MEQGLAQRTLAMGGAESSQEETATAREFVHAMEGRDMAQNARDRGAGRSDDRWEELRRAGEERGRWAEEGGWECGGAWEKELSSLLQP

SEQ ID NO: 52647 - protein, 81 aa, Zea mays
  Coding DNA Sequence Number=SeqID_10868
MDEERVCRSDDEQACECQCEPRASTSARTREQGRALREAQELAMSDGWSRVGLRTWQDRQCDDAEHNEHDIRGTTEWRTTR

SEQ ID NO: 52648 - protein, 169 aa, Zea mays
  Coding DNA Sequence Number=SeqID_10869
MGKGRKGRGSPRRAGDKRKRAPSPPSEDFGDSKYSKEVSSGSEGSSTPASPSASSDDSDDSQGLSAAVWTYICAVERSGLEGSDESEVSLDEENSSGSSEEQSSDDSDDEGDGSDDDSGGGDSDEGSDDDNSGGGVGGDGGSKGDGGSKGDSGVGDSGEGKASGTAPLV

SEQ ID NO: 52649 - protein, 186 aa, Zea mays
  Coding DNA Sequence Number=SeqID_10870
MGAASGAAPARAWLPAQHDLWHDVVHLDEGATDGAGVAADVSAAFDMVFLLAWCKPPSRDTESIDEQEPSPGVALKLSSSRRLAIVVRVSPSKVFPVSPLLSSSPPTMNLSLYVSPSSPQPLARRALAALRTSGRVPICGSSSSLRGQMHADEFRYPVRGMRAPLPGRSRPPTRVAPDRSRHGMLA

SEQ ID NO: 52650 - protein, 231 aa, Zea mays
  Coding DNA Sequence Number=SeqID_10871
  Gene Ontology: Mol. function=ubiquitin-protein ligase activity; Cellular component=ubiquitin ligase complex; Biological process =protein ubiquitination
  Homolog annotation: Hit_ID=Q64HA9; Match level="QueryCoverage=52%, HitCoverage=21%, E-value=4e-11, Identity=33%"; Hit description =Spotted leaf protein 11
  Pfam annotation: Domain name=U-box; Domain location=71-131; Score =12.9; E_value=2e-05; Accession=PF04564.6; Description=U-box domain
MGVTEGVQGGPSTREVSELDIDTTLKDGILGGALEPVGATAGNDGKQSMELCRMMDELDAAAGDDGGGDEAVPVVFICPISLEPMVDPVTLCMGQMYERANISRWLALGHRTCPTTMQELWDDALTTQRHPPAAHRRLVLPPPPRHDNAQKAALKGQARVAALRELRTLAASHQSVIKAIAKAGCVALLMSLLGPFTSLAVGTEVVAISSAGCCLTLTQRPRSMQPWWQRD

SEQ ID NO: 52651 - protein, 174 aa, Zea mays
  Coding DNA Sequence Number=SeqID_10872
  Subcellular localization annotation: CTP_CleavageSite=48; ConfidenceScore=5.23e-01
MRTSNPTPAIWIWSSQKGLIMTSSRLSPSPPRGLSLETIRIYKLVGGAAAAAWNPSLAGLVEFGGQSALALRLLLVVFPSKISTGANQPFGEEGAGEDDGNDLLEMQASDPEAYNDNVIRALCVELEMSVSYVIVCFQLAACSYFVIVMSFVGFVLGDWPPRPQAQSLSSCLKT

SEQ ID NO: 52652 - protein, 307 aa, Zea mays
  Coding DNA Sequence Number=SeqID_10873
  Gene Ontology: Mol. function=DNA binding; Cellular component=nucleus
  Homolog annotation: Hit_ID=Q6YTS9; Match level="QueryCoverage=29%, HitCoverage=30%, E-value=3e-14, Identity=41%"; Hit description =Proline-rich protein family-like
MSSSCSDASRDDAVSSPDLPPLAAPVAAAAAAAAAAASSGGGIGLGGVGSGRRLPPPCWTHEETLALIEAYRDRWEALQKGNLRAADWDDVANAVTARCGACRHKVEKLRKRYRAERSRSAGRSKGPKWPFFPLLHDLAGGGVPDPSPNAIVKIKTKGPAPPASSPSPVSSPSSEVEAVRSRSLHGLISNGGAGSGLRFTIPKASRTKPVAAAAVKSERSGSEDDAESEAMAEVAAALRAVGEGFLRMEERRLELSLQMEKERMESEMKRTQTMLDAQQLFLEAFLGKQLQHKKAHVSPSSAAMEED

SEQ ID NO: 52653 - protein, 95 aa, Zea mays
  Coding DNA Sequence Number=SeqID_10874
MVVEMRNGGGGGEPVIKGGGGAVVGRGRGPRLRGEMTGCGGHRPPRRPAWVVLRDWSQSLREGRKVIQSFGSTCCNFHPGVPVQGLFIKRYIYIK

SEQ ID NO: 52654 - protein, 145 aa, Zea mays
  Coding DNA Sequence Number=SeqID_10875
MGKSNKRKREPTPPSEDFGDSEYSEEEFSSESEGSSAPVSPPVSSDDSDDSQGLATEVWTYIRAVERSGLEGSDESEYSSDEEDSSEEDGGGDGEDDDDDDDNDGGDDGDGDDRGGNGGSKGGNGGSSRGSNGGGSSKGSNKASG

SEQ ID NO: 52655 - protein, 182 aa, Zea mays
  Coding DNA Sequence Number=SeqID_10876
MGARSTFGLLVMGVEHELLTRADLLVVGAKHGLLMRADGAAISGRSGVARLVWGLGRNDAGENGSGVADADADGSRGTGESRTEVEACQDSAQSGSTGQCPVRQTGSGELAALGKSSATYGYNSPNGPVYTGLSGEPTVGRAIYAGHVAEPTARRGHRTVRCAPDMSGAPTALKLPTVGFAI

SEQ ID NO: 52656 - protein, 321 aa, Zea mays
  Coding DNA Sequence Number=SeqID_10877
  Gene Ontology: Mol. function=calcium ion binding; Cellular component =membrane; Biological process=homophilic cell adhesion
  Homolog annotation: Hit_ID=Q6QP54; Match level="QueryCoverage=33%, HitCoverage=44%, E-value=3e-18, Identity=57%"; Hit description =Putative kinase
MGPCRVGPARPNLQDYSGREDTPKPLGRLPPRARDAERIHKTASGAIGSSVSPNLRARPPSRPRTTDSASPDPRKRTQPRRRKTVSASPDLRARTQPRRRKTVSASPDPRARTQPRRRKTVSASPDPRARTQPRPRTTVSTSPDPRAQTQPRPRTTVSASPDPRARTQPRLRKTVSASPDPRVRTQPRPQRSHHIARPRARTDHVIGGAIITLPLASSGYVEQDRRPIWLAPVKQVMMAPRVIHDDGGSQPLTEASRRQQGSNSPDSCLPQGSSAPPTATTSHEQGSNTSPTATTTWLSYEKVAARENGLMDSLSLPRERL

SEQ ID NO: 52657 - protein, 128 aa, Zea mays
  Coding DNA Sequence Number=SeqID_10878
MANVARCRGGLLAAAHLEHMVPWLFAFIGHRYSQGVERILRHLGASMISATLCLPRLWVRLPMAAWIGQRRTRRLPTRKENSKMEENYNDYFSSEEMRPVKEGLEDYQQGKRTQKWKRTTTITSLVKR

SEQ ID NO: 52658 - protein, 177 aa, Zea mays
  Coding DNA Sequence Number=SeqID_10879
MGGIRLTHAILARSRDSAVSSRSRCITLSATPCHEKKLLEDQRCRSPGEEEEEAALRKKKTTLRCAATDDWSVGVMRRSAVSVRRAAPAALAILFGALLLVSFVVDGVRKAAPPAAIGGRRMMLGGGAGGLRTLEDFKAHDPFQDSKRRVPNGPDPIHNRYFDLRTAYCAASFGFGV

SEQ ID NO: 52659 - protein, 534 aa, Zea mays
  Coding DNA Sequence Number=SeqID_10880
  Gene Ontology: Mol. function=actin binding
  Homolog annotation: Hit_ID=Q1S960; Match level="QueryCoverage=62%, HitCoverage=46%, E-value=1e-14, Identity=22%"; Hit description =Prefoldin
  Pfam annotation: Domain name=DUF827; Domain location=6-454; Score= -64.3; E_value=1.1e-05; Accession=PF05701.2; Description=Plant protein of unknown function (DUF827)
MGEIDTKPIEPVKVAISLFGEKSDQLRRRSSSSDHWFRDIILERFFKYMKNLSNHIRHSHPECEYHIDIQLLSVNMLFLTSFFLFCQSDMEKEKNTEGLEKELANYRLQIEAKDSAYMQALLQLEHYKKTAEELAVLLRNSEHERDRYIEECNEFKNRVDELESKTKGMVDQLSETAKVREQLSCVLNELKVTQADVLNMESQLAAAKDLEIKAITQAEIMEVSANMEMERSEKLLGRIAELHDAVLISQLSATEAENEKCRVVSEKDAEMEAMKATAFQAQEEMEDLRKQLETIRELENKLVAKTAYIESLQAKLEQVSNVLNSMENASLDGGIDLNQIKQDLEFKERKISDQAFYIEALETELKRLKLELENANQVAKNLKNDAQVSHHFVQTEKCVDHIMISVEEYNSLIRKVEKADEFSRSSAEGFDQLTTESVSKNQVEALKKQLEVAMAKIGLFRNRAEQAATRAEAAEKAKATAEEQLRKWQLQKQRRRAALAALREESAPKEFCLPTIEKLPTKHQPLGKVLNMNF

SEQ ID NO: 52660 - protein, 38 aa, Zea mays
  Coding DNA Sequence Number=SeqID_10881
MRRMHIGENLKSTTINPFERAYLRMCFDSKLTFSNLGF

SEQ ID NO: 52661 - protein, 141 aa, Zea mays
  Coding DNA Sequence Number=SeqID_10882
  Gene Ontology: Mol. function=metalloendopeptidase activity; Biological process=proteolysis
  Homolog annotation: Hit_ID=Q1T0S6; Match level="QueryCoverage=54%, HitCoverage=9%, E-value=4e-24, Identity=70%"; Hit description =Peptidase M, neutral zinc metallopeptidases, zinc-binding site
MGHENATAENGPWMITLDAPSFIFVMQHARNCAFHEEVYRAYITPASSGDLDNTPIINQILKLRLKKAKLLNYNNYAEEIYQTTENILHRFIQTPENIIFSKKAQPPNYNATLKQNFPNIQQIDSEYANGKHLQSLVVWSL

SEQ ID NO: 52662 - protein, 167 aa, Zea mays
  Coding DNA Sequence Number=SeqID_10883
  Homolog annotation: Hit_ID=Q9ZQ71; Match level="QueryCoverage=97%, HitCoverage=97%, E-value=2e-49, Identity=58%"; Hit description =Expressed protein
  Pfam annotation: Domain name=DUF538; Domain location=25-166; Score =182.8; E_value=8.5e-52; Accession=PF04398.3; Description=Protein of unknown function, DUF538
MEKALTKVGSFWISKKAKEELYAVSNTVEEKAKWILNKLKGKHVKPLADVLREHNLPPGLFPRNITCYEMDESKSKLSVYMPAACEVRFKDGSAVRYGRRVKGTLSKGKLSGMEGMKTKVVVWVKVTEVCVESCKSDKVWFMASGVKKSRPRDAYELPHDSVRVEEI

SEQ ID NO: 52663 - protein, 87 aa, Zea mays
  Coding DNA Sequence Number=SeqID_10884
MARLSASSGDQSWAEYGGKLDYDISGSENIDPNRDSIKEDWPIEIGKGKKCPRQGRAAECNENLILECLENGEPPGMTSPLACAEGD

SEQ ID NO: 52664 - protein, 117 aa, Zea mays
  Coding DNA Sequence Number=SeqID_10885
MAGARPLDAGPRRRQRLGHSATTDGDSASGRGADGRGPRATGRKTGVTAVRHGGPTTAADCGAPVRLQTLACCGAAVARLVVWPSVTGVRCLVRASAECRRGGLLALVGHGQAHLRF

SEQ ID NO: 52665 - protein, 113 aa, Zea mays
  Coding DNA Sequence Number=SeqID_10886
MVRADRTRDNGQVINWANWLAHKVCDGRQTPKSIIGNIESISLSEGDRDIMKALCDKTMDKVVRTGRILMKRSSVVVPDDIAADVLAASVDKSKSSSSGDPADKVPCGDAPTQ

SEQ ID NO: 52666 - protein, 39 aa, Zea mays
  Coding DNA Sequence Number=SeqID_10887
MAQGATVPQGELGMQCNVPLYIVNIKLLTVYYRYGQVYS

SEQ ID NO: 52667 - protein, 81 aa, Zea mays
  Coding DNA Sequence Number=SeqID_10888
  Homolog annotation: Hit_ID=Q00UQ3; Match level="QueryCoverage=53%, HitCoverage=27%, E-value=3e-09, Identity=63%"; Hit description =Chromosome 15 contig 1, DNA sequence
MSEERPVPRRESPWGLPEGDTRQPKAHRCNDRAEDVVQACFEGNPFKTVPGPFKLFWQCMRSKPGYVYLVIIYALTFWHIS

SEQ ID NO: 52668 - protein, 684 aa, Zea mays
  Coding DNA Sequence Number=SeqID_10889
  Gene Ontology: Mol. function=3-dehydroquinate dehydratase activity; Cellular component=integral to membrane; Biological process=aromatic amino acid family biosynthetic process
  Homolog annotation: Hit_ID=Q6H7J6; Match level="QueryCoverage=97%, HitCoverage=91%, E-value=0.0, Identity=51%"; Hit description =Oligopeptide transporter OPT-like
  Pfam annotation: Domain name=OPT; Domain location=29-650; Score =606.0; E_value=3.4e-179; Accession=PF03169.6; Description=OPT oligopeptide transporter protein
MEGSEAAAREALSTEKAFEGERLPAWSEQITVRSVVVSTALGLFLSFIVMKLNLTSGIVPSLNMSAGLLAFFLMKTWTSALERCGVFPKPFTRQENTVVQTCVISCSSIAFSGGFGTYILGMSKKIAEGFDEAKTSINVEEPSLGRIIAFLFLVSFVGLFSIVPLRKIMIISYKLTYPSGSATAHLINSFHTPQGAIQAKQQVSILFKSFVGSFLWSLFQWFYSAGPGCGFSSFPTFGMEAYRRRFFFDFSATYVGVGMICPYIINFSLLLGSVVSWGLMWPYIESKRGLWYDAELPRSSLHGLNGYQIFISIAMIIGDGLFNFLSILVRTSYDMYLKRTRPAEAAAKPFAGVDVTERQALSFDDRRRTQVFLKDQIPTSIAAGAYVLLAAISVVAIPHIFRQLQPRHVVWAYVVAPVFAFCNAYGTGLTDWSLSSSYGKLAIFIFGANVGAADGGVVAGLAACGLMMGIVSTASDLIQDFKTGYLTLTSPRSMFVSQVMGTGLGCVISPVVFWIFYKAYDIGMEEGYPAPYAKIYRGIALLGVNGWNQLPKYCLRFCLAFFLLAVAICALKEVAKARRWWVQDYIPSALGMAVPFFLGSFFTIDMCVGSIVLYLWSKSDRVRAHMFAPAVASGLICGDGIWSLPSSILSLINVNPPMCLRVFSADTNYQVEEFLWTLRNPAAT

SEQ ID NO: 52669 - protein, 677 aa, Zea mays
  Coding DNA Sequence Number=SeqID_10890
  Gene Ontology: Mol. function=3-dehydroquinate dehydratase activity; Cellular component=integral to membrane; Biological process=aromatic amino acid family biosynthetic process
  Homolog annotation: Hit_ID=Q25CH9; Match level="QueryCoverage=99%, HitCoverage=99%, E-value=0.0, Identity=58%"; Hit description =Hypothetical protein osysl7
  Pfam annotation: Domain name=OPT; Domain location=31-646; Score =459.3; E_value=4.9e-135; Accession=PF03169.6; Description=OPT oligopeptide transporter protein
MEQVDDGQHTQEGVSTERAFEADPIPSLSETITARAIAASFILGVALCAVAMKISLNSGFLPSLTVPAGLVGFYLVRAWIRALDCCFQVPHQLPFTRQENTVIQTCVVACSAITFSGGFGTYILAMGKNAAGGDVRDGKNIVEPSIGRTVAFLFLVSFSGMFVLMPFRKVMIIRHRLTQQVEMLFRSLGGTMLWNMFQWFFAAAKGCGFGVFPIFGLEAYKHGFYFDFSMSNIGIGMLCPYTITVSMFIGSVVSWGLVSPYLATKAGVWYSSHLSPSSLSGIRGYKVFIGVSMILADGLFNFLSIVAYTLHTMRKRRSRQQPIIIQGGGCGGGSEADDGDTQPLPFHCLNAAAEQPKKSFDDRRRAQVFLRDHISNSVNIACYVLLSMVSVAAIPYLYPQMRRAHVALIYLAAPVVAFCDAYAFGVTDMNLSSTYGKLAMVLVGSSVGRNDGGVVAGLVACGIVMGTMSNANNLMQDLKTGYLTLTSPHTVFISQAIGTALGCVVNPVMFWAFYRVVQNGDTDVFDAPYARVYRSIAMLSAGQDGIPMHSLWLCKLFFALALALSVFREVAMWKRWRVARYIPSIICVAIAFVVPARIPIDMFVGSLVLYLWRRADPSKAPTFSMAVASGMICGDGLGMLLSSTMALMHARAPICIKFMSRTDNVKLDAFLATLPVT

SEQ ID NO: 52670 - protein, 55 aa, Zea mays
  Coding DNA Sequence Number=SeqID_10891
MRDEVCLGHERHTGREEEDHEALAAGAKLHHFRFLYLVSDSSNFNKFSRVSGVGY

SEQ ID NO: 52671 - protein, 633 aa, Zea mays
  Coding DNA Sequence Number=SeqID_10892
  Gene Ontology: Mol. function=hydrolase activity, hydrolyzing O -glycosyl compounds; Cellular component=anchored to membrane; Biological process=carbohydrate metabolic process
  Homolog annotation: Hit_ID=Q6Z4B2; Match level="QueryCoverage=69%, HitCoverage=84%, E-value=0.0, Identity=73%"; Hit description =Putative beta-1,3-glucanase
  Pfam annotation: Domain name=Glyco_hydro_17; Domain location=166-499; Score=257.3; E_value=3.3e-74; Accession=PF00332.9; Description =Glycosyl hydrolases family 17
  Pfam annotation: Domain name=X8; Domain location=514-596; Score =159.5; E_value=8.6e-45; Accession=PF07983.3; Description=X8 domain
  Pfam module annotation: Pfam domain module=Glyco_hydro_17::X8; Domain location=166-499::514-596
MLAVGKKSSQPPECFEIGDRRLKAEDGSLAGPSRTEGSGHSLSLPLSVPSAPCSSHRVDIDTRSCARLQRTAAHFAAHAYWLTWVEDELMENGDIINIDVNVFQNGYHGGTFRTFACGQVNDSIKHFLNEQAQQGTLPNPNGEQERRRECPSAVLVSAAGSGEPYVGVTIGTQVTNLLSPSDLASFLRAQRITRVRLYDADPRLLSALAASGVRAIVGVPNDELLALGSSPATAASWVSRRVVPFAGVNSSTPNVVSAIAVGDEVPTALPSALPVLLPAIRSLAAALAAANLSSIPVSTPLPFSVVVDPFPPSQAFFNQSLDKSFVAPLLAHLANTSAPLMLNLYPYYSLMQSKGVIPLDNALFRPLPPSMEMVDPNTLLRYTNVFDAMLDAVRVAVRNLNATGGAGVPILVTETGWPSYGDRRAEPYAGRDNADAYNSNLIKHVLEEKAGTPMAPGAGAQSSAYIYELFNEDLRAGPVSEANWGLFYGNGTPVYLLHVSGADGFLGNDTTDRTFCVAADDADQKAVQAAMDWACGPGRADCTAIQPGQACYQPDDVRSHASFAFDAYYQSQGRAAGSCYFQGAGMVTTVDPKNNFPFFRHGFPDLLAKLSVYFATCGPEVSEHHVNGNIVPV

SEQ ID NO: 52672 - protein, 163 aa, Zea mays
  Coding DNA Sequence Number=SeqID_10893
  Subcellular localization annotation: CTP_CleavageSite=72; ConfidenceScore=5.77e-01
MTARRGLSISHPSSPRPLALSRRSPVFHSVTRTRPDLNPLSPTQRFPSRLLRRGTGPIWRPQRPWFPSPTPVAMADDDDVYPLTGNDDLRVAGLVPDDEDDIQADAAALLGTDLTSAPDDISSAPGDGGGGPVTATDTSAGSTSTDGGTGTSLVDESRLEGGE

SEQ ID NO: 52673 - protein, 273 aa, Zea mays
  Coding DNA Sequence Number=SeqID_10894
MTRLGIKAERAERARWRTGNRTRDAATGLSTHKDDDVGRVAHTRRNKLMVVQGLIFPGAEARVLGVYSGAPRRPSPASSKGRFSEVDGKQRDDELEYQGDPSAVAKQWDAAARRGVTEVTEAEQRNTGDTRGMKESSPRRAETSRRSARRGRTRTRRWSRERWAQGASFTRAERQREFRPWELREMKLDVAEKEVAPAEDKGAAQRSRGAELRSSAPWREARAERQPDQAKDGGKKSFEVPSAREKVKETRNPKPGVKKKTCKVKVDRVKKSY

SEQ ID NO: 52674 - protein, 79 aa, Zea mays
  Coding DNA Sequence Number=SeqID_10895
MDDGQYRPHLDYRATVYARGDSQPRFASYTPGYDATTLADTRESEAVCMLRSRGFSFLERAHAETIAPTTGAHTVMFEI

SEQ ID NO: 52675 - protein, 135 aa, Zea mays
  Coding DNA Sequence Number=SeqID_10896
MTTVGGPNDLGGSVTLGDRPRDIFMAEVEKEAKDLVGPVSEHEVEKGIELRGGKVSLNCVLSQMGLVYEEHKVHLKRRTSKMLIGFLPSLRCRWILRQSARERWMQGSHPQPSPPFLSRLVIYPWARCLTYEFKA

SEQ ID NO: 52676 - protein, 162 aa, Zea mays
  Coding DNA Sequence Number=SeqID_10897
  Homolog annotation: Hit_ID=Q6QP51; Match level="QueryCoverage=23%, HitCoverage=17%, E-value=5e-09, Identity=74%"; Hit description =Putative growth-regulating factor 1
  Subcellular localization annotation: CTP_CleavageSite=39; ConfidenceScore=5.13e-01
MAVAGGQEQRPRRQPSSRPIRGQQENPLSRREDNAPVLRSSNGSRTRNGRPANHSPRRINSAAGQAGPGKGDTPKRILPREGTRLRAPLLIRGSKAGPPEGFDSRLRSRGPYTHYWSEVRRPAPRKGSTATSGYSGSAPITDQGFEGWPPKGSQPPQTPSEG

SEQ ID NO: 52677 - protein, 680 aa, Zea mays
  Coding DNA Sequence Number=SeqID_10898
  Gene Ontology: Mol. function=RNA-directed DNA polymerase activity; Cellular component=intracellular; Biological process=RNA-dependent DNA replication
  Homolog annotation: Hit_ID=UPI00004C1731; Match level="QueryCoverage =90%, HitCoverage=43%, E-value=0.0, Identity=80%"; Hit description =UPI00004C1731 related cluster
  Pfam annotation: Domain name=RnaseH; Domain location=312-439; Score =13.5; E_value=3.2e-06; Accession=PF00075.14; Description=RNase H
  Pfam annotation: Domain name=rve; Domain location=486-620; Score =56.3; E_value=1e-13; Accession=PF00665.16; Description=Integrase core domain
  Pfam module annotation: Pfam domain module=RnaseH::rve; Domain location=312-439::486-620
MSFGLRNAGATYQRCMNHVFGEHIGRTVEAYVDDIVVKTRKASDLLSDLEVTFRCLEAKGVKLNPEKCVFGVPRGMLLGFIVSERGIEANPEKIAAITSMGPIKDLKGVQRVMGCLAALSRFISRLGERGLPLYRLLRKAECFTWTPEAEEALGNLKALLTKAPILVPPAAGEALLAYVAATTQVVSAAIVVERQEEGHALPVQRPVYFVSEVLSETKIRYPQVQKLLYAVILTRRKLRHYFESHPVTVVSSFPLGEIIQCREASGRIAKWEVEIMGETISFAPRKAIKSQVLADFVAKWVDTQLPTAPIQPELWTMFFDGSLMKTGAGAGLLFISPLGKHIRYVLRLHFPASNNVAEYEALVNGLRIAIELGVRRLDARGDSQLVIDQVMKNSHYRDPKMEAYYDEVRHLEDKFYGLELNHIARRYNETADELAKVASGRTTVPPDVFSRDLHQPSVKIDDTPEPEAPSAQPEAPSAQPEVPSAQSEAPSARPEASSVQPEKAPGGYTHLLVTIDKFSKWIEVRPLNSIRSEQAVAFFTNIIHRFGVPNSIITDNGTQFTGRKFLDFCEDHHIRVDWATVAHPMTNGQVERANDMILQGLKPRIYNDLHKFGSPCDATTPEGFGPETSRWATWCFGCDNMPEGGISSRLPGKGPFVIAKVLKPGTYKLANSQGEVYSNA

SEQ ID NO: 52678 - protein, 815 aa, Zea mays
  Coding DNA Sequence Number=SeqID_10899
  Gene Ontology: Mol. function=transferase activity; Cellular component= chloroplast; Biological process=metabolic process
  Homolog annotation: Hit_ID=Q53NI2; Match level="QueryCoverage=99%, HitCoverage=76%, E-value=0.0, Identity=71%"; Hit description =Probable NAD kinase 2, chloroplast precursor
MSALCDPETGECPVRYDVESEDLPVLEDKVAAVLGCMLALLNRGRNEVLSGRSGVASAFQGSEDSTADRIPPLALFRGDMKRCCESMQVALASYLVPSEPRGLDIWRKLQRLKNTCYDAGFPRADGYPCPTLFANWFPVYLSIVSDDSGMDELEVAFWRGGQVSEEGLAWLLGKGFKTIVDLREEDVKDDLYLSAVQEAVSSGKIEVVNMPVEIGTAPSAEQVQQFAALVSDGAKKPIYLYSKEGVSRTSAMVSRWKQYVTRSERLAVQNHSLNGNGNILTNHKTMQHTGIPSSSPNGAENGMITESDRTMNNGESSEIDIDTARHNLEVTNALCNDQSTQQGEMPDTVAELLSNFKLESNPLKAQFPTCDVFSRKEMTKFFRSKTVYPKSVLNSRRRSSSLVIRRKQNLCTERSGTNDYEAAEFAVLRSSNGKSFDSDYILSVASGITDGKPSNNEASLIEEKEREVSVATIDTRASANSSNRKVQVGSQESAEKNSTPYLERNKSDNVDRNMCASATGVVRLQSRRKAEMFLVRTDGFSCTREKVTESSLAFTHPSTQQQMLMWKSPPKTVLLLKKLGDELMEEAKEKPTQVVFISCIWYQWITHLKEALGSLTYIMNMLLEKFVCENGLMFWSKMHGSWHAKLQSFPSQVASFLHHQEKMNVLVEPDVHDTFARIPGYGFVQTFYTQDTSDLHERIDFVTCLGGDGLILHASNLFRTSVPPVVSFNLGSLGFLTSHNFEGFRQDLRDLIHGNNTLGIYITLRMRLRCEIFRKGKSMPGKVFDVLNEVVVDRGSNPYLSKIECYEHNHLITKV

SEQ ID NO: 52679 - protein, 37 aa, Zea mays
  Coding DNA Sequence Number=SeqID_10900
MDHNMWLSFQNGVGCGKMDVVENRPYEFFITSNSEIQ

SEQ ID NO: 52680 - protein, 132 aa, Zea mays
  Coding DNA Sequence Number=SeqID_10901
  Subcellular localization annotation: CTP_CleavageSite=64; ConfidenceScore=5.33e-01
MARVVYKSYPRPPPIRVSAAAAVVRRLAKRQNTMAHPTRVGGSRHTRRWSMDEPRQSGWADPKRASAVMADMRVHRWPTCKRAVRRDPVQTGRGSGRQVAEWDWRRQKGSTACGWTRHRRFTVDGWMTRTIS

SEQ ID NO: 52681 - protein, 77 aa, Zea mays
  Coding DNA Sequence Number=SeqID_10902
MNHCEALTTSPPRRDLPIPPEPVAAPIFPFSDSGEQNPPRSVASRSQPPPVMVGPSNGVIDGVRIVARVCSGEEIES

SEQ ID NO: 52682 - protein, 117 aa, Zea mays
  Coding DNA Sequence Number=SeqID_10903
MEWNGSLASLARLLLRMVGPNRRWQKSLNRSHDDMPPHLAPWQSTKYHVGVVPMRKAATAETLVRVLADGKGYGQGRGGYCDVQKGGKQHDEQGVEGSIVVMVEKEGNIVAPYPNIS

SEQ ID NO: 52683 - protein, 321 aa, Zea mays
  Coding DNA Sequence Number=SeqID_10904
  Homolog annotation: Hit_ID=Q6QP54; Match level="QueryCoverage=35%, HitCoverage=37%, E-value=4e-11, Identity=45%"; Hit description =Putative kinase
MTGLNDRGCRIQTGNELRNALKKDSVVGKLKMGNKFNFERTFGLAVVFKIVHWLRSWAILQQPTSQDMVVATSKHLMLVAKGTILAGSNSGYLLPRPSRLLLYWLPRHLKHWPLDLVGIEDIGHNISPRLFEQLVVELDVGENSVACPAPTAVPLAKVRPTAAKSSLGRHRKLRLARPQGSAPVSASEDGLRLARPKSSDSTSTSEDGLRLARPQGSGLSLDSGRRSPPRPTPGLGLSLDSGRRSSASPTPGLGLSLDSGRRSPPRPTPGLGLSIDLGRRTPPRPAPGLGLSLDLGGVTASPDLGLGPTTSQGGHHYPTPS

SEQ ID NO: 52684 - protein, 159 aa, Zea mays
  Coding DNA Sequence Number=SeqID_10905
MGKQRTRGTAAVVLLAVAMVEKSAAVGVRILQRHDPYDNQKCSLWRLGNGRDLCGWLQRWEITELLAGVPTLPRDPPPPLSSGVGCRGVLGGRLGVAGLLARSWPWRAVAYHFALVSGHREDGKDARIIGSHPTAEIRRKVLVRADAIMAVDLTRDDYD

SEQ ID NO: 52685 - protein, 80 aa, Zea mays
  Coding DNA Sequence Number=SeqID_10906
MVGTSAVTARRPVGVSEALYAKAVPWRTWLLEWLGRPPYHRVGLLSGTLPRLRRSMRSDGTGFPISLFIYRSLFPLHLEQ

SEQ ID NO: 52686 - protein, 130 aa, Zea mays
  Coding DNA Sequence Number=SeqID_10907
  Homolog annotation: Hit_ID=Q8SA97; Match level="QueryCoverage=25%, HitCoverage=6%, E-value=7e-07, Identity=78%"; Hit description =Ornithine carbamoyltransferase
MAPPVDVAGPHPRLGDVEASPRSRSSPSSVAEAESEPRGRARRRPLAEARAEFESRGRAKRSSSSSGAEPKSEPWVGRSGVRRLPGLCPSLSPGSGGAEFAVFPGFARVRALGRAERSSPSSRGLARVRA

SEQ ID NO: 52687 - protein, 207 aa, Zea mays
  Coding DNA Sequence Number=SeqID_10908
  Gene Ontology: Mol. function=inositol-3-phosphate synthase activity; Cellular component=cytoplasm; Biological process=phospholipid biosynthetic process
  Homolog annotation: Hit_ID=O65195; Match level="QueryCoverage=99%, HitCoverage=51%, E-value=1e-96, Identity=73%"; Hit description =Inositol-3-phosphate synthase
  Pfam annotation: Domain name=Inos-1-P_synth; Domain location=46-158; Score=210.5; E_value=4e-60; Accession=PF01658.8; Description=Myo -inositol-1-phosphate synthase
MENLLASVDKNEAEISPSTLYAIACVTEGVSFINGSPQNTFVPEWQTKMKSVLVDFLVGARIKPTSIVSYNHLGNNNGMNLSAPQTFRSKEISKSNVVDDIVSSNAILYGPGEHPDHVVVIKYVPYVGDSKRAMDEYTSEIFMGSKNTIMLHNTCEDSLLTAPIILDLVPPGTPVVNALAKQRAMLENIMRACVGLAPENNMILEYK

SEQ ID NO: 52688 - protein, 193 aa, Zea mays
  Coding DNA Sequence Number=SeqID_10909
  Homolog annotation: Hit_ID=Q69RQ8; Match level="QueryCoverage=39%, HitCoverage=18%, E-value=9e-19, Identity=60%"; Hit description=Leaf senescence related protein-like
MLDGLPAMVQVVLSNEPTVQLKATTQFRKLLSIGEVRHSPEFHDCTLVNEGTEENGDALVVIDLQAYVVKGVGKVQAKWSPVGTIDIECSMRGVDGEVRNDVLLGQTVASPSYTNLTVAYHRTNILVRYCRWSRNPNGGNLESLRYKQGYRFDVDIPDQTWNADHCCNYFTLGSRTNFDGRLQIFFDIYVISD

SEQ ID NO: 52689 - protein, 119 aa, Zea mays
  Coding DNA Sequence Number=SeqID_10910
MEKVVMELSSVVGVERHAVGREDPGIEGVIASGVRQVDDGSCLAGGRSECEISGAQGLAGVWAAGRIPGGDGWRASGMLDARKEDNAGGGGIAGRKTAWAGAGLQEGRRRGAGGWSGGT

SEQ ID NO: 52690 - protein, 72 aa, Zea mays
  Coding DNA Sequence Number=SeqID_10911
  Subcellular localization annotation: CTP_CleavageSite=52; ConfidenceScore=5.05e-01
MEKNSLSSSSDSDGPSVPPRMLRTVGVGREGSQPVANLQGMPGPPLELATAGASYQAGRVVHGEEDDKRECG

SEQ ID NO: 52691 - protein, 120 aa, Zea mays
  Coding DNA Sequence Number=SeqID_10912
MVDDDAQSSDELAYWPIRSTTGVLLWPKPNSRPTNGFPSHNFTNGYPAILGGLVRDYPMDLTARSIYRRQEWWPVNLGETRGGRRKRRSLAHGISGCNRGNSPTITGHARCGSLRRGQAL

SEQ ID NO: 52692 - protein, 174 aa, Zea mays
  Coding DNA Sequence Number=SeqID_10913
  Homolog annotation: Hit_ID=Q6QP51; Match level="QueryCoverage=28%, HitCoverage=22%, E-value=1e-15, Identity=79%"; Hit description =Putative growth-regulating factor 1
MQAACNRTKGAHPFDFDASSMEAQAHTSCNRRAGYYVRETAPPLAPVPRLLDCGTGAMTRGNPAHGPTVPTEHIDHGTGGTFSRRSRQRFTSAMMTASKRDRERGYSERDPSPRRKRAPSPPTDQRFEGWPLGRVRQPPQSTRAPRPLLVEGSKAGPSEGFDSRLRPLGLRAHY

SEQ ID NO: 52693 - protein, 150 aa, Zea mays
  Coding DNA Sequence Number=SeqID_10914
  Gene Ontology: Mol. function=carboxyl- and carbamoyltransferase activity; Cellular component=ornithine carbamoyltransferase complex; Biological process=amino acid metabolic process
  Homolog annotation: Hit_ID=Q8SA97; Match level="QueryCoverage=62%, HitCoverage=21%, E-value=5e-22, Identity=55%"; Hit description =Ornithine carbamoyltransferase
MAPPVDVAGLRPRLGDVEAPPKPRSSLSTVAEVESEPLGRARRSSSSSGAKPKSEPWVGRSGVRRLPGLSPSLSPGSGGAEFAVFRDLARVRALGRAKRSFLWCLRPGLTACQPHSVRWHRSRSGAGGAVFLSGRSVERRSDGGHFGSVG

SEQ ID NO: 52694 - protein, 187 aa, Zea mays
  Coding DNA Sequence Number=SeqID_10915
  Gene Ontology: Mol. function=protein binding; Cellular component =nucleus; Biological process=multicellular organismal development
  Homolog annotation: Hit_ID=Q6EUF9; Match level="QueryCoverage=96%, HitCoverage=98%, E-value=6e-78, Identity=76%"; Hit description =Putative flowering locus T
  Pfam annotation: Domain name=PBP; Domain location=20-166; Score =161.6; E_value=2e-45; Accession=PF01161.10; Description =Phosphatidylethanolamine-binding protein
MAPAANDSLVTAHVIGDVLDPFYTAVDMMILFGGAPIISGMELRAQAVSDRPRVEIGGEDYRDAYTLVMVDPDAPNPSNPTLREYLHWMVTDIPASTDNTHGREMMCYEPPAPSTGIHRMVLVLFQQLGRDTVFAAPSRRHNFSTRGFARRYNLGAPVAAMYFNCQRQTGSGGPRFTGPYTSRRRAG

SEQ ID NO: 52695 - protein, 68 aa, Zea mays
  Coding DNA Sequence Number=SeqID_10916
MEGIRWKSHISGQDRDRMSSHPYGIGGQIGMISVSKLYSDLEKRALLSKVRGVKLFEEREQDYFRIGK

SEQ ID NO: 52696 - protein, 103 aa, Zea mays
  Coding DNA Sequence Number=SeqID_10917
MGWGKYLSWCRFLIGNRGPYFPSKGLDCHRIGSVGSILVRVVLSFLAFWGVQVQLMLDSSGMHVNTRASIDTGSSSSGNISEQGRVQIDLIYTSELVKVSGAR

SEQ ID NO: 52697 - protein, 87 aa, Zea mays
  Coding DNA Sequence Number=SeqID_10918
MASQVLHAGWQTNQKMDLNQCSSPWDKSTQPNGTLETSTKIRKLALAKWQKKASYHSITRSMPSPGPETRRQELDSVLRVPFLLFFV

SEQ ID NO: 52698 - protein, 100 aa, Zea mays
  Coding DNA Sequence Number=SeqID_10919
MELSKQARGSGPASRPLPSAARGPQLQAACEPRHGWPWQMAIGGRRKKCIGMKYTENLPEIMLLNDFVEAPDPDIPSECYSTETAQDARAFHTLKPEKIM

SEQ ID NO: 52699 - protein, 144 aa, Zea mays
  Coding DNA Sequence Number=SeqID_10920
  Subcellular localization annotation: CTP_CleavageSite=30; ConfidenceScore=5.16e-01
MRRKLQHQRQQSVESASSSKEKTPTSTPTRCFSKKRLFFLVRIQGSEDNPKCFLWRHDEASCGRCEFTVGGRQCWLLVSDLFDFMRMRARRVRLTTAKFSLRRNRKLRLTRPWASASGGGLRLARPQGSAPASASEGGLRLARP

SEQ ID NO: 52700 - protein, 204 aa, Zea mays
  Coding DNA Sequence Number=SeqID_10921
MSHRNHCFFSEKIELEIDASTRQGSKRDRYIRSEGNLLLNDSKQHAADAPEPDAAGEESWDFESSSTMPSHQPFHGGAFATGQWSIGGQRLELVSRRSGAVPVSGSGRLGDGVGGGKDGSPLALSSEMDRLLAACFSLLLVAMDHRRKHLAKPDLPGGLNRKACVLHLLPPVTACARGFPAALGGPPLAANGVHQTLDRAAQGS

SEQ ID NO: 52701 - protein, 154 aa, Zea mays
  Coding DNA Sequence Number=SeqID_10922
MDYSAPAGSRWKLAPGSLTSGGDHLYSEWLASEGGHVCTNGSPAAAATFALVGLPATAATSARAKRSSPPSSYEGEDKTIQERGRHPHGVWHLVRPPEQRRSSATGGQGTPRIRWTCAQRDRRPCGGQTATPRLAAGGSVGGGTKAIKAKKIEP

SEQ ID NO: 52702 - protein, 100 aa, Zea mays
  Coding DNA Sequence Number=SeqID_10923
MGAHRKWAMDLAYHGRSPLCRTIASEFGRRSSACAKGSTQTNKKINLGFKRREQKKSKRTLKSEQALEAHRIVNSVCPVWHLTVQCPKMSELQRSKPLAP

SEQ ID NO: 52703 - protein, 175 aa, Zea mays
  Coding DNA Sequence Number=SeqID_10924
  Homolog annotation: Hit_ID=Q6ZKB1; Match level="QueryCoverage=36%, HitCoverage=13%, E-value=6e-09, Identity=53%"; Hit description =Putative dihydrolipoamide acetyltransferase
  Pfam annotation: Domain name=2-oxoacid_dh; Domain location=10-148; Score=-145.0; E_value=0.0021; Accession=PF00198.13; Description=2 -oxoacid dehydrogenases acyltransferase (catalytic domain)
MNNNSGDDVGGPGWGMGLGVPDVPLGSIIKSKGVTMTVLLAKAIAMALLQHPMVNLQLQGWKELHINSSINIAIAVAIDGGLITLALQDAEKEVELINEPQIQESPSAPALLDDEVDFDESVKMKGIHMEVSNASVAQKISECHNGTFNAEAAHRSSAEWQGSLNAEGAHHLPVE

SEQ ID NO: 52704 - protein, 262 aa, Zea mays
  Coding DNA Sequence Number=SeqID_10925
  Homolog annotation: Hit_ID=Q6QP54; Match level="QueryCoverage=35%, HitCoverage=39%, E-value=6e-16, Identity=51%"; Hit description =Putative kinase
MVSTVYAAARAYCLPIEWTDTYAACRMNPGTLLRVARTPHREVRDPSQGALTRAKSRKTANSAPPDPRAWTRAKSRKTANSAPPDPRARTRAKSRKTANSAPPDPRARTRAKSRKTANSAPPDPRARTRAQPQKTTNSAPPDPRARTRAQPQKTTNSASPDPRARTPPWPLPNDLCLARPRGSDSASATEDRLDLGFGGASTSPNLGRKPATSTGSAIITLPRADSGRREQDRLRRSSDGHDITPAGCQDLSGCHIGMYLGR

SEQ ID NO: 52705 - protein, 257 aa, Zea mays
  Coding DNA Sequence Number=SeqID_10926
  Gene Ontology: Biological process=nitrogen fixation
  Homolog annotation: Hit_ID=Q6H658; Match level="QueryCoverage=86%, HitCoverage=92%, E-value=9e-45, Identity=48%"; Hit description =Nodulin-21-like
  Pfam annotation: Domain name=DUF125; Domain location=75-244; Score =178.5; E_value=1.6e-50; Accession=PF01988.9; Description=Integral membrane protein DUF125
MDLHLSSHVHAAAAAQATASAFPNGKKAESTDVLPPRAVVTIDVEAGAPTNAAGDDPRDADGDAGGVDYMARAQWLRAAVLGANDGLVSVASLMIGVGAVSATPKAMLVSGTAGLVAGACSMAIGEFVSVYAQYDMEVSQIKRGDGGEEEEEGAARDGLPSPTQAALASALAFAFGALLPLLAGVFVPSWAARVAAVCAATSVGLAAFGVAGAYLGGASMLRSGLRVLLGGWFAMLLTFAVLRLFGTVFHIQVSSSV

SEQ ID NO: 52706 - protein, 256 aa, Zea mays
  Coding DNA Sequence Number=SeqID_10927
  Homolog annotation: Hit_ID=Q6H664; Match level="QueryCoverage=15%, HitCoverage=21%, E-value=6e-13, Identity=85%"; Hit description=Auxin- responsive protein-like
  Pfam annotation: Domain name=Auxin_inducible; Domain location=136 -247; Score=98.4; E_value=2.1e-26; Accession=PF02519.5; Description =Auxin responsive protein
MNCQHPSVADPSRLIQLISGSARISTGDVDVDVAVGSRPQEEPGQTVSLAHAAPSAQRWTKDSTKGETFPRSLAILLLAIAMLRRSRHGGVRLGRKLLGLWRRALCGGRRRRRRGGYRRLKQQQQQPCAGTPERAARKLAPALLRWGRSLARRLRLGWRAGGGRRMLAGAEAEVATTPKGQVAVYVGGGGGEAAQSLRYVVPVVYLNHPTFGELLREAEEEFGFQHPGVITIPCPAARFEQAAALAAAGKKGFARW

SEQ ID NO: 52707 - protein, 203 aa, Zea mays
  Coding DNA Sequence Number=SeqID_10928
MVKAASQADVVEATNGGVAPLTVKDFDLDDVEMVTKYPLMEWCSVPRGLRVSPHQELGRLISQRSMRGFEGGRYTPSFDEGCFNVHKGSTQTNKILKKGFKKKGAKKPSVPWSGALDCPLCHRTVSGAPDCPVHQRSNGSFAQRSTAKAEIQMNSAQTVRAEVRAVARGTPDSEQYLSGAAPDCLVPLEDKATNSRQHPNPNG

SEQ ID NO: 52708 - protein, 119 aa, Zea mays
  Coding DNA Sequence Number=SeqID_10929
MAGENEKGGKTEEDACASVDRGRLKAGRRSAYVPRPESGLGPRIKEAENQGPESEPAWELWKFGGVRLDVSACASTEPKRVRWLGIQEEHPRARLRRQKEEAADVPRLTSFSAVGRIWL

SEQ ID NO: 52709 - protein, 54 aa, Zea mays
  Coding DNA Sequence Number=SeqID_10930
MEYQTQQAEYHRQKGEYYTNLLALQQAFLSGFETPPSSFVARGDGSGQDDASVS

SEQ ID NO: 52710 - protein, 90 aa, Zea mays
  Coding DNA Sequence Number=SeqID_10931
MVHARLARGGRGSRSYPRSSRACVGVLAWPTHGDGGDGDRACSHGRPAAATMRVVGWGKAGWRRLCCCLARLVKSKLLVPYVELGNDGSG

SEQ ID NO: 52711 - protein, 105 aa, Zea mays
  Coding DNA Sequence Number=SeqID_10932
  Subcellular localization annotation: CTP_CleavageSite=38; ConfidenceScore=5.22e-01
MSKRVLMMLLAATVILLCLPLVLPPLPPPPLFLLFVPVVMMLLLFSLSGGPQENFCSNLSNPDGAPSWSEGLYSSKPVVSTAAPATKPGGRDDAAPIYGSGRVKA

SEQ ID NO: 52712 - protein, 353 aa, Zea mays
  Coding DNA Sequence Number=SeqID_10933
  Homolog annotation: Hit_ID=Q2QQ06; Match level="QueryCoverage=69%, HitCoverage=55%, E-value=2e-41, Identity=41%"; Hit description =Expressed protein
  Subcellular localization annotation: CTP_CleavageSite=26; ConfidenceScore=5.10e-01
MAPSPVTCSPSAARHRPLQLRSPAPRAAVVAALPLRRREALPHALWIAADPWASARAWTSLGLGTGRRDAARCAAAGQVAGTSSAGVGRSAGMEVVVAAAAVVAMGTGNRVLYKLALVPLRKYPFFLAQFATFGYVVVYFSILYLRYRAGIVTDEMLSLPQKPFLAVGLLEAFGAAAGMAAGDNGNQVPALSSMKGAVLSGASIPILSQTYLVWQLLLSAIFLKRRYRINEIAGCFLVAIGVIITVARNPQYITNHAAGVHVPYWAWLEMIASRVKELCYGLQYFSIGGSGTSASFKSSGILWPLLMIISFFFQAADTILKEIIFIDASKKLKCGSVDLFVVNSYGSAYQVRI

SEQ ID NO: 52713 - protein, 73 aa, Zea mays
  Coding DNA Sequence Number=SeqID_10934
MAPVINGEQGSFVISKGSLWESSSPPKVLKTKIQLKMTMMNTEAIAEEQQLWLSLATKIKHEAEPKRKRLASP

SEQ ID NO: 52714 - protein, 42 aa, Zea mays
  Coding DNA Sequence Number=SeqID_10935
MVGRPRVAFWAFSPNCLTGGPFLGRLGALFGYPVPRNFNEKR

SEQ ID NO: 52715 - protein, 133 aa, Zea mays
  Coding DNA Sequence Number=SeqID_10936
  Subcellular localization annotation: CTP_CleavageSite=73; ConfidenceScore=5.04e-01
MEPMAIVTVTGGVLGPVFVLLSRIQPVVDFFRRLCDCLRHPQRRPARPLRAPCLRPLWSRLSRRAPLYLKYVNLSRRAPLYLKDPDAEVLQSGLSGPIGRQGYMFGVMLDRCPSAPLPRSGHGSMMSRHVDEA

SEQ ID NO: 52716 - protein, 69 aa, Zea mays
  Coding DNA Sequence Number=SeqID_10937
MASPESIGRAPWAKSKASAIHYADLRPSPPTHAVATPFHCTKSWHAQFPPMHKLERMESQIRWRTGGDQ

SEQ ID NO: 52717 - protein, 96 aa, Zea mays
  Coding DNA Sequence Number=SeqID_10938
MTKDFAMTAALPPYEDIGASGCSAAPSADVFFGGMMKVDALPKVVEVEALSAIASAFIHITFGLYLHIAHAFIIREDLHPKPKSSVTVYAILKTYD

SEQ ID NO: 52718 - protein, 136 aa, Zea mays
  Coding DNA Sequence Number=SeqID_10939
MGAMMAGAHEAQRVNGPALVTREPLCGACISVAALASQMGRIRDNVELSLMRRAAVSIALPGVSSFSTLARILFRSLAEKGLSTCSLARMRSRAFGASPRFHNSHPRMVECASLGCWTRLSGYTAPATTENVLLSP

SEQ ID NO: 52719 - protein, 104 aa, Zea mays
  Coding DNA Sequence Number=SeqID_10940
  Subcellular localization annotation: CTP_CleavageSite=84; ConfidenceScore=5.49e-01
MKVLSQAVVEGGRLSSPDVGANVGGIPRRPSSSAAVPRGTVGSVASATISGKNCIPEFTRLSSSHRIYLSRESRIRAWARGSPACSAVGENDTAFGRYEVEDNV

SEQ ID NO: 52720 - protein, 105 aa, Zea mays
  Coding DNA Sequence Number=SeqID_10941
MKSIKRSKSLLKEKRKKSETAVSVICSDNYLCDANRSGELPNNLYLLVAHFFLVEMTTTSHLAGTLTSRWHSALLVHSIMQPGPTTAASGFAYAKFGKTKVIVSV

SEQ ID NO: 52721 - protein, 343 aa, Zea mays
  Coding DNA Sequence Number=SeqID_10942
MEQAYIWSVERAGLGGSDDSEEEVSTEEVEDFSNFEESSDSKDDSNKGGGGSNDGVEGSDNGDGGDGNSDNGKVGDDGDAFEDRMYPAYLYTDVNDPSRITNKQISKEDMLSRVDSMLRGKASNAEDIEAFIATYRVLPEEGKQTNLWMQAIVDEAEVNDVLSMLADESFVSARTESPSAAAGRAFGGEEGACSPGGVCHKRTRRAGYPAMSAETKKRKRKLRHSSGLEVEGDSAAPDLGGDPASADLKDDIESCGGIRDGGHVSEEEVDVDEFPLLVCRNRRSKASNDVPILPLSGLVNLQGMTMSAIDHALEGDDPRRKVTGASLDSKLINVICEVFVITL

SEQ ID NO: 52722 - protein, 51 aa, Zea mays
  Coding DNA Sequence Number=SeqID_10943
  Homolog annotation: Hit_ID=Q4U0Z7; Match level="QueryCoverage=53%, HitCoverage=2%, E-value=5e-07, Identity=79%"; Hit description =Cellulose synthase BoCesA4a
MCRPCYEYNRKDDTQACPQCKTNKRHQGLEVKPGPTVKCVLGHDFILHFPV

SEQ ID NO: 52723 - protein, 120 aa, Zea mays
  Coding DNA Sequence Number=SeqID_10944
MALMVAETVSSIMARRSGGGRGGGGAVVSGAEETEGTRARARGRRLDGSAGVWKQRRSGAYGCSCAGAGEEEERAPGGWGPQNIIMHSIMIFGVMLISPITCLFVLLRVDEQAIEGPSTQ

SEQ ID NO: 52724 - protein, 91 aa, Zea mays
  Coding DNA Sequence Number=SeqID_10945
GLRAEVWTSIRGRRALRGSRSSEEFEFSSDEEDSDGGEGEDDDDDNDGDDDDGDGGNGGGGSGGKGGTKGGSSVGSTGGGGGKGSGSRASG

SEQ ID NO: 52725 - protein, 85 aa, Zea mays
  Coding DNA Sequence Number=SeqID_10946
  Subcellular localization annotation: CTP_CleavageSite=59; ConfidenceScore=5.68e-01
MAPSYASAMFHAQALQEDGRSTHALRLCTFFSNPGLVPSPSTTSPSTCSTGNGPRLVVVTDTRSTTPRTTHSSTSAQKGIFEKLL

SEQ ID NO: 52726 - protein, 156 aa, Zea mays
  Coding DNA Sequence Number=SeqID_10947
  Gene Ontology: Mol. function=methyltransferase activity; Cellular component=cytoplasm; Biological process=striated muscle development
  Homolog annotation: Hit_ID=Q4S465; Match level="QueryCoverage=92%, HitCoverage=65%, E-value=2e-23, Identity=39%"; Hit description =Chromosome undetermined SCAF14743, whole genome shotgun sequence
MEALLFPFYGLVKRITVFACDCNPSHHGIREEHPVFLGENQCCAGGMDFITMIFTLSAIPFDIMPTTIEQCVSVLKPGGLLLFRDYGLYDMTMLRFLPHQRVGFREYMRSDGTFSYFFSLDTVRELFRAAGLVELELEYCCVKSVNRKNGKTMRRV

SEQ ID NO: 52727 - protein, 48 aa, Zea mays
  Coding DNA Sequence Number=SeqID_10948
MAGPSMTWQLEAPGLLTKSGTVPKADFSGQDCGRSGPKARMVRSAKEQ

SEQ ID NO: 52728 - protein, 79 aa, Zea mays
  Coding DNA Sequence Number=SeqID_10949
MALAYEGAMAARWHHQIFHLGLGPSIVDGALDVAMQAEALHTERRPWTRVDGEVDGEGTSPGLEKKAQRKRACVERPSS

SEQ ID NO: 52729 - protein, 301 aa, Zea mays
  Coding DNA Sequence Number=SeqID_10950
  Homolog annotation: Hit_ID=O82268; Match level="QueryCoverage=43%, HitCoverage=60%, E-value=9e-61, Identity=79%"; Hit description =Expressed protein
  Pfam annotation: Domain name=DUF640; Domain location=65-197; Score =303.8; E_value=3.2e-88; Accession=PF04852.3; Description=Protein of unknown function (DUF640)
  Subcellular localization annotation: CTP_CleavageSite=63; ConfidenceScore=5.18e-01
MEPGPDAPAGGGGGGGTSEPAEAGPSPSSSSAAAAASSSSRQQAEQEAQQQQGAQQREQPAVRAQAQPQPQPLTQQPPAGLSRYESQKRRDWNTFLQYLRNHKPPLTLARCSGAHVIEFLRYLDQFGKTKVHAEGCAYFGQPNPPAPCTCPLRQAWGSLDALIGRLRAAYEESGGRPESNPFAAKAVRIYLRDVREAQAKARGIPYEKKKRKRGSAAAPPVAPPPVVTAEAAGTSSGAGGGDDEDDDEPSPSADEPQRQQTATPAPPASIISSASASSSSVAPATTTTTSKKEKEGSAPSS

SEQ ID NO: 52730 - protein, 231 aa, Zea mays
  Coding DNA Sequence Number=SeqID_10951
  Gene Ontology: Mol. function=protein dimerization activity
  Homolog annotation: Hit_ID=Q1S398; Match level="QueryCoverage=99%, HitCoverage=52%, E-value=3e-58, Identity=50%"; Hit description=HAT dimerisation
  Pfam annotation: Domain name=hATC; Domain location=131-225; Score =16.8; E_value=0.00055; Accession=PF05699.5; Description=hAT family dimerisation domain
MSLVVDVRTRLINLRNDGWEPLLEETTIICLANDIPIPNMSDVVSQFGRSRKGGRNNITTKHFYRVDTFYAVIDSITIEFNNRFNELSLELLVCFSCLDPRNSFYKFDVDKLARLADIYFDDFCFVGCKTIKDQLRTFIIHVRRLEEFKACHDLVSLSKTTVQLERHIVFPLVYRLIELALLLPVATATVERAFYTMKIIKTELRNKMSDGWLNDLMVCYIERETFKGLDL

SEQ ID NO: 52731 - protein, 154 aa, Zea mays
  Coding DNA Sequence Number=SeqID_10952
MECEIRRHRRKPPRAGFVAIEGSLRGWEAALQLRGWPTKEAAGFKDGAQREADGTRRVDDIGDMLDEKNASSRVKTLPKTLFAPSMCKISKMHVSVQDEEDCNGSAASIGRPNSSKLFSSGLNGIATRTAQCGRVWIAPYQTGACQTHLQHEAN

SEQ ID NO: 52732 - protein, 149 aa, Zea mays
  Coding DNA Sequence Number=SeqID_10953
  Subcellular localization annotation: CTP_CleavageSite=32; ConfidenceScore=5.04e-01
MELNLNLNQGSFATGLAAATAVLAATIAFTALAAIVVAFAAVIVVAVVAIALVIAVVAALLLGRVEGVLLIRGDIRLIRPLEPGVLDRADVRSHLSSSPWESSESSDDVEGEARASDPSNSEETSSSEYSESPKSSEGGLGSHFHLSSA

SEQ ID NO: 52733 - protein, 91 aa, Zea mays
  Coding DNA Sequence Number=SeqID_10954
MGGAEMGAGGGKMEARVVEVVGIAEVVDGFEATGAGEVESVVDTVAEGVKVGVRVTGGGMRVQGKTGIDLSKFEWFGHFTEHMACGFEEYR

SEQ ID NO: 52734 - protein, 217 aa, Zea mays
  Coding DNA Sequence Number=SeqID_10955
  Gene Ontology: Mol. function=pectinesterase activity; Cellular component=cell wall; Biological process=cell wall modification
  Homolog annotation: Hit_ID=Q8LQ65; Match level="QueryCoverage=99%, HitCoverage=65%, E-value=1e-113, Identity=77%"; Hit description =Pectin methyl esterase-like
  Pfam annotation: Domain name=Pectinesterase; Domain location=3-212; Score=111.5; E_value=2.4e-30; Accession=PF01095.10; Description =Pectinesterase
MRAFITLEGAGADKTVVQWGDTADSPTGPKGRPLGTFNSASFAVNAQYFLARNITFKDTLYDHSGRHYYKDCYIQGSVDFIFGNALSLYEDCHVHAIARDYGALTAQNRQSMLEDTGFSFVNCRVTGSGALYLGRAWGTFSRVVFAYTHMDDIIVPNGWFNWGDPNRELTVFYGQYKCTGPGATYAGRVAWSHELTDDEAKPFISLSFIDGTEWVRL

SEQ ID NO: 52735 - protein, 331 aa, Zea mays
  Coding DNA Sequence Number=SeqID_10956
  Gene Ontology: Mol. function=ATP-dependent peptidase activity; Cellular component=integral to membrane; Biological process=ATP -dependent proteolysis
  Homolog annotation: Hit_ID=Q5JKW4; Match level="QueryCoverage=99%, HitCoverage=77%, E-value=3e-81, Identity=65%"; Hit description=ATP -dependent protease La (LON) domain-containing protein-like
  Pfam annotation: Domain name=LON; Domain location=97-331; Score= -35.4; E_value=0.00039; Accession=PF02190.7; Description=ATP -dependent protease La (LON) domain
MAERDRVLERERRQMEQILELDMEELQVEEVDDDGSSSSSDVDTFLRNTHGDGGINTYEELSIDTSTVSLQDHTYLGAKVDGARGKFAFLHGDRVLNLPMFYLQGVVLFPEASLHLRVFQPRLVEAIDKAINHVDAPCMIGVVYVYRHTNDGHYTIASVGTMAEILKIQQLYDGSSCIFSHGQQRFRLLRHWLDVDGVPWGEVQIIEEDTPQRTPRDAFAQLAAPNSFRQCASSIMPSLHVYCSTQLDHVDSDMDRDSLSPTSTSSDHSITDKRIYLLGSRSSGLICGDKVILNPSMDDHVRKPNYLSYCIGSKLPISESLRQELLEIDGV

SEQ ID NO: 52736 - protein, 144 aa, Zea mays
  Coding DNA Sequence Number=SeqID_10957
MEFEMPRALPLLFFLNLLGQNGKFPQQPEKEELHIGFILGSESSPLSAQLYVCTYQAAEQEENELGLEPCDCEQPGTEGVVSVRVCHGGRGVRVRPCLPPRCRRRRSGERSSRPGGTSFAHPPKFCEIPSNIRCDCYRYVFPTL

SEQ ID NO: 52737 - protein, 117 aa, Zea mays
  Coding DNA Sequence Number=SeqID_10958
MAPILYATLKLLAALAQGLVRLCRIAPGIVPPNQSLYKLEKQSGSESFRPIHPVETNKALTRTILVAIRFNRIRPKAAADAPPDAEWHRAGRVHMESMWRAVLAPSVAILSAAAPAS

SEQ ID NO: 52738 - protein, 400 aa, Zea mays
  Coding DNA Sequence Number=SeqID_10959
  Gene Ontology: Mol. function=metal ion binding; Biological process =metal ion transport
  Homolog annotation: Hit_ID=Q6YSW8; Match level="QueryCoverage=45%, HitCoverage=42%, E-value=6e-41, Identity=51%"; Hit description =Putative heavy-metal-associated domain-containing protein
  Pfam annotation: Domain name=HMA; Domain location=141-203; Score =23.0; E_value=0.0011; Accession=PF00403.16; Description=Heavy-metal -associated domain
MAKVQQDKAASGGNGGGDGAAAPAGEQLVIRAPVHCDGCGRKLRRSLQRLEGKKEQASKRPAACAQLYFVPSYLLVSELCYCTERVVERKTGEKAVLVSPSPPEKLLLPARSSAPKAKGGETNTNKDIGNELPELDMKMVTVLKINLHCDACSEEIKRRILKITGVEEAMPHLKSSQVAVKGKVEPATLVGFIHKCTGRRAAIIRAEPLDDVLLPQPPNPPAAPPASKAESKKDEPPAENPPAKVEEPNEENRGGGEKDNADDDNPKTEKPASDGHGAGAAEEHGAHATTEGPDRDNDDDAGDGLVLENHTKAAVDRLFAVPTPAGVVTVVAPEMALGSRSYCYPAYPCAQYYYPYQPHLYPPQPYPAASAYSPVAMYGYPASYPPEAFSEENPNACTIV

SEQ ID NO: 52739 - protein, 104 aa, Zea mays
  Coding DNA Sequence Number=SeqID_10960
  Subcellular localization annotation: CTP_CleavageSite=43; ConfidenceScore=5.88e-01
MTKIKACRRWSSTGRSLGKITFMSLTFTVSKRSVSSFTIVLVLSRSFSSHSFGVGPSFFQITLFLTMRTFILKLKLPVTVYYTGKHVSCVFEDLRKMKTPNIGF

SEQ ID NO: 52740 - protein, 1269 aa, Zea mays
  Coding DNA Sequence Number=SeqID_10961
  Homolog annotation: Hit_ID=UPI00004BF616; Match level="QueryCoverage =12%, HitCoverage=27%, E-value=5e-18, Identity=35%"; Hit description =bromodomain containing 9 isoform 1
  Pfam annotation: Domain name=Bromodomain; Domain location=215-293; Score=68.5; E_value=2.2e-17; Accession=PF00439.15; Description =Bromodomain
  Subcellular localization annotation: CTP_CleavageSite=26; ConfidenceScore=5.12e-01
MPRTPSLSPSPSPSPERHQHQPARRRGGAAPSQLALHHHHHHRGGHSPSPPPRRSLRPRRAAAPSSRPLVDDFFPFPSSPSSSPFRSRQRGPSPEPSSSDSGADGGAAGSSVSDRRRRKLKLVVKLSQLPPDQLQRRAPPPPSYSDDSDGTEDLAGDGSGDEEQVKPPKKRRIEPRADRSRHREFGGGGRSDPTSAPRTKRPSVPGTARTTPLPDQKALEMILEKLQKKDTYGVFAEPVDPEEHPMDFGTVRKKLARNAYRSFEQFEDDVFLICSNAMQYNAPDTIYFRQAHSIQELARKKFQELRDEGIPTENPIKIGQKIRPNFCTGALVKKPVLRYPDDDIDLSHKEKVKRPNSNNVDDDMSFKNQVKKTMSKNSQDRSCLLQKERIKKPIPRNSEDNLSSSFHKERPKKLISRHSKDDPDSPSGKEQVRKVISKNLENDESSPFHKHQVKKSTPQSSKDDFLSQKKHIKPIGRNGEDPGFSSRKKPIEDPVRTNVEDAGFSSTKRLSEKPISVNGEEDRDHCHQESSKEPSCGVEQDGQGYSCDEEAVKKPVCMDSHDAQGSDISAATIASVGDGSNGLSMSQPNATEPTGCPLTNGVIDKDISSPLDEIRSEKTDDILAKPSYKPIVVDETRRKTYDASEEQPLMKSDPVFDVFSAEPKELVNVGLDAEHSYAYVRSLARFAGSLGTQGWRIASDRIRQALPADVNYGRGWVGEYEPPLPSILVVNDQPRYPKSSETNRRRNAPLPRDNERFRSTETNNPKDMRRVATCNNVVGVAGPLESPEIKPRLFGVTTEPQHRSTDALSLHENHRVSGNVAKTKRTTNEQTRKGNSSSSARPLEMQLQKGASSGALDIPAPNKMAGQPRPFLQPPESTRAQQMKKIDSSKSKIPIEMAPQQVECAKDADSSVHDTPSSNGQPKHFFQSQAAASSGVHDMHSSNGQSKHYQSQAAASSGMHAMSSSNGHPKHYFKSQAAPSSGVHDMSSSNGQPKHFFQSQAVASGVHDMASNGQSKPLFQSQEATVLQPKNEATWVYHGRPGDGKVGTSKKSRPSTSIGFITKNQSINAAKFAMNLNGQSIVSDHTKSAGATAMPAQANIPNRGLDAPRNIFSAFPANVRENQSIPSAPVAQSWISFGAATENKPTIVSPAFVDNNCGWKMPFANVQPCDDTKLSVVPQFFRHPVQVVRENSVQNKGLVIFPQLVQPDFARSQGQPQWQGLFPHMQQKPGKDVLRPDLNIGFPSPGSPPARQSSGINLEAQQPDLALQL

SEQ ID NO: 52741 - protein, 150 aa, Zea mays
  Coding DNA Sequence Number=SeqID_10962
MVKEATNVRVSDDLVKKQPASSAGTATEDKETREWCLVTRFCIIVLGHWIRTRQQAEPLKAKAGAPWLDALMGSSAHGSLHSWTSPSRITSDVSTLALSMPPQSALRRIKQDSLKLTLCQLLYGARDPLFMGSERPGLLRGLEMPHVRSK

SEQ ID NO: 52742 - protein, 138 aa, Zea mays
  Coding DNA Sequence Number=SeqID_10963
  Subcellular localization annotation: CTP_CleavageSite=21; ConfidenceScore=5.36e-01
MAVAGLPCFPLSAAAAAPAVRLAARPNRQRPPRRWTGAAPSADRGEMGNDDGGGEALPPGRSVVVTTTKPAAAELSVKGDSHRYMEYTPYRFGRDFGVSPYCLDDRLGPTRLTGRRNMTNIHRTARQTRVIKVRITRA

SEQ ID NO: 52743 - protein, 174 aa, Zea mays
  Coding DNA Sequence Number=SeqID_10964
MESLAKATLCSSKCHIGRWKMWEETSEHRMRNGGICCWLSLFVGLPWLGPCGGYTRRHAQQAVLPVRRGSLGTESLVATSGANSSTSRWRPQGTEYEGTNDGGGRDEVRREEDDERTGSLRSERMRNMAECTVTEEAIEAARMRRPEGGGGAGMWWPDADSNGRWEEDKNARRG

SEQ ID NO: 52744 - protein, 807 aa, Zea mays
  Coding DNA Sequence Number=SeqID_10965
  Gene Ontology: Mol. function=zinc ion binding; Cellular component =nucleus; Biological process=regulation of transcription, DNA -dependent
  Homolog annotation: Hit_ID=Q5VRR4; Match level="QueryCoverage=94%, HitCoverage=97%, E-value=0.0, Identity=80%"; Hit description =Putative far-red impaired response protein
  Pfam annotation: Domain name=FAR1; Domain location=53-262; Score =46.6; E_value=8.6e-11; Accession=PF03101.5; Description=FAR1 family
  Pfam annotation: Domain name=SWIM; Domain location=542-578; Score =33.5; E_value=7.2e-07; Accession=PF04434.8; Description=SWIM zinc finger
  Pfam module annotation: Pfam domain module=FAR1::SWIM; Domain location=53-262::542-578
MDCSQDPQEESHQRRENGEEAEKTADYGNALSRKEVTEELLGCVVHSEEEAYRLYCDYGHRIGFSVRKGKQSYFIGTKNIRTKDYYCSKEGLKYDEPVTEANFNRPDTRTNCKAMIRFRVDEKGRWTVIRFVPVHNHQLAKPGERHMLRSAKSLAVGKSGVIDPLASTEAHPINGFSDMTGDIVENSGYTIRECYNQVGMQSITVIEAGDSQSLVSYFKHKTNEEGMFYWDVQVDQEGRMTNFFYRDGKSRNDYGCFGDAIIFDTTYRTNKYNLICAPFVGVDHHWQNVVFGCAFLLDESVTSYAWVFKSFLESMGGRSPKSIFTDQDEAIMQAVKQVFPNTQHCFSYWHILKNAQSHLGSLNTSQAFQSMFTKCMQGSDSEEDFKESWTAMIQEYKLQDNNWLIDLYTFHHKWCSAFNKDTFDGGINSSQWGEVSSNILNGISDENTSLTRFALLLEKVVKDLRRNESEEDFRCSQTAPVRAIKHSTVLKQAAESYTHRIYKLFEAEFLDGCGATSCHETSSGGNLLRFGITMQGRGSKVWDVVLDTSTMEISCGCRKFERMGLLCSHALKVFTLQNVDTIPEKYVLKRWTKDARRSMYTLAQDDSTQQECTEAELAYRNRAMQYAYNLIIKSQELEESRKIFWDSLETGEKALEVFFEMRNMRTQAAKDADKNVKKKKKTSKGTNPKKAKQAPGVSSTGPELIVHTNEHQFQSSQDAQGNATIGRPYYYQQAFPNAPIQPNQMYMHTNMHTMPLCTPQLRKSIYMATKANQQKAAATPFTQCNTMAVASGVLGDIQQHSVNSELN

SEQ ID NO: 52745 - protein, 126 aa, Zea mays
  Coding DNA Sequence Number=SeqID_10966
MTEPWEQYRRASDKHDTRYVLESIPADRWDQSTSVTGDLNIEVFTVTHTPEGTRQYVVPGIRQRMIEGDIEEMTEDKAVLKTSLNLTTSQLSGIHQAPLCLYQKSYKNPYGKRTRSDATGVRQSTT

SEQ ID NO: 52746 - protein, 215 aa, Zea mays
  Coding DNA Sequence Number=SeqID_10967
  Pfam annotation: Domain name=NC; Domain location=141-211; Score=43.4; E_value=7.6e-10; Accession=PF04970.4; Description=NC domain
EASPSAHTRTAPNRSGAREPKAEGGGAIAGVLIAAGGRGMVGVLSNRVDRDDLKAGDHIYTWRAAYIYAHHGIYAGDGMVIHFTRAAGHEIGTGTFLDWFLYSSSPAATEGPPCQKCGHLVKSDGVITSCLDCFLDGGSLYLFDYAVSPAFFLAKARGGTCTLAASDPSDVVIHRARYLLDNGFGMYSLFKNNCEDFAIYCKTGLLVETAFSVGP

SEQ ID NO: 52747 - protein, 381 aa, Zea mays
  Coding DNA Sequence Number=SeqID_10968
  Gene Ontology: Mol. function=cysteine-type endopeptidase activity; Cellular component=mitochondrion; Biological process=regulation of catalytic activity
  Homolog annotation: Hit_ID=Q5D214; Match level="QueryCoverage=91%, HitCoverage=89%, E-value=1e-135, Identity=67%"; Hit description =Cathepsin B-like cysteine protease
  Pfam annotation: Domain name=Peptidase_C1; Domain location=163-362; Score=217.6; E_value=2.8e-62; Accession=PF00112.13; Description =Papain family cysteine protease
  Pfam annotation: Domain name=Propeptide_C1; Domain location=33-76; Score=58.1; E_value=2.9e-14; Accession=PF08127.3; Description =Peptidase family C1 propeptide
  Pfam module annotation: Pfam domain module=Peptidase_C1::Propeptide _C1; Domain location=163-362::33-76
MGGELLLALLLVSAAAAPQVLGVGNGDNHMRIIQEDIIETVNNHPSAGWTASRNPYFSNYTIAQFKHILGVKPAPQNALSNVPVKTYSRSLELPKEFDARSAWSRCSTIGNILVARWILISCLNFSILDNPDLHEQIKVTVALVGLLVLWSASRTVFAFTSTWRVDTEDIAVLISILLSVNDLLACCGFMCGDGCDGGYPIEAWRYFVQNGVVTDECDPYFDPVGCKHPGCEPAYPTPKCEKKCKEQNQVWQEKKHFSIDAYRINSDPHDIMAEVYKNGPVEVAFTVYEDFAHYKSGVYKHITGGIMGGHAVKLIGWGTSDAGEDYWLLANQWNRGWGDDGYFKIIRGKNECGIEEGVVAGMPSTKNMVPNFGGAVGRAIV

SEQ ID NO: 52748 - protein, 288 aa, Zea mays
  Coding DNA Sequence Number=SeqID_10969
  Gene Ontology: Mol. function=prephenate dehydratase activity; Cellular component=cytoplasm; Biological process=L-phenylalanine biosynthetic process
  Homolog annotation: Hit_ID=Q8LAP1; Match level="QueryCoverage=59%, HitCoverage=38%, E-value=3e-33, Identity=45%"; Hit description =Putative chorismate mutase/prephenate dehydratase
  Pfam annotation: Domain name=PDT; Domain location=83-270; Score=71.7; E_value=2.3e-18; Accession=PF00800.9; Description=Prephenate dehydratase
MENLYRFESCECVIPYVLCGAECWIALSLRIKGYLLSPSVFDQHETHLQSSSDSSAGHAHDRGYGNPLGTRNPHGYEFEQNFITVMGHRLRLFGHWILKCVMFVWHIRDHLAVESSLADIAILPIENAYTGSFHKSYDILLSHDLQIVQEVQMDVELCLLALPGVHKDDLKTIFSHPQYLAQCEHSISGLSVSKKNVDHGVVGAEIISKQNLRDSGVICSARAAELYGLNILECNFQLNFIQKYDTVKTKMLQDESPNVTRYLVLAKTANLPKEHDQYKVFSDETYIG

SEQ ID NO: 52749 - protein, 120 aa, Zea mays
  Coding DNA Sequence Number=SeqID_10970
  Homolog annotation: Hit_ID=Q10PC9; Match level="QueryCoverage=32%, HitCoverage=12%, E-value=8e-08, Identity=69%"; Hit description =Expressed protein
MVGNNAGELDEEIETAIEEGLHNVVEALVDGHEREQESTVPSAVSASAPIERQFPQQQQHQHRQNNQQEEISTIARTTIHFAFPPQQPTRTTRQRQCKEEAVNVSIVGNKVTARITARRK

SEQ ID NO: 52750 - protein, 448 aa, Zea mays
  Coding DNA Sequence Number=SeqID_10971
  Gene Ontology: Mol. function=transferase activity, transferring hexosyl groups; Cellular component=integral to membrane; Biological process=metabolic process
  Homolog annotation: Hit_ID=Q65X83; Match level="QueryCoverage=97%, HitCoverage=98%, E-value=1e-122, Identity=50%"; Hit description =Putative flavonol glucosyltransferase
  Pfam annotation: Domain name=UDPGT; Domain location=5-440; Score= -44.6; E_value=2.2e-08; Accession=PF00201.9; Description=UDP -glucoronosyl and UDP-glucosyl transferase
MAHKTVILYPSLGVGHLNPMVELAKVFLRRGMAVVMAIVDSPDKDSVSAEALARLAAANPDIAFRHLPVPSRGTERCSTNPVMRAIDVLRAANPALLGFLRALPAVDALVLDMFCTDALDVARRARRPGDTPETVLHFPGVPPIRALDMGATMQDRDSDVAKARLSQCARMLEARGILVNSFDWLEARALEALSRGLCTPGRSAPPVHCIGPLVLAGNKGGASERHACLEWLDAQPDRSVVFLSFGSLGRFSMPQLREIARGLENSGQRFLWVVRSPPEHRSNSVEPDLDLEPLLPEGFLERTRERGFAVKNWAPQSEVLRHLSIGAFVTHCGWNSALEGIASGVPMICWPLYAEQKMNKVHMVEELKVGVVMEGYEEELVKAEEVEAKVRLVMAPGSGDGEELRQRLVTAKDMAVEVLKEGGSSHVAFDAFLTDLLKNTRTEKSGFL

SEQ ID NO: 52751 - protein, 76 aa, Zea mays
  Coding DNA Sequence Number=SeqID_10972
  Homolog annotation: Hit_ID=Q6Z358; Match level="QueryCoverage=46%, HitCoverage=7%, E-value=9e-12, Identity=88%"; Hit description=RRM -containing RNA-binding protein-like
  Subcellular localization annotation: CTP_CleavageSite=34; ConfidenceScore=5.03e-01
MAAYDYNSPDCPVSQQSDGPMVGSPLRFVPSGFSAAAERRGIVHRLLRDAQADRWERLDFPIICESCLGDNPYVRM

SEQ ID NO: 52752 - protein, 98 aa, Zea mays
  Coding DNA Sequence Number=SeqID_10973
MGRGKRGRSWPRRGDNKHKRAPSPPSEDFGDLEYSEEAYWRSIERAGLGGSDELGVSLDEADSADSSEEWSGDDGDDEGDDSGDDRGEGDGGKGGGEG

SEQ ID NO: 52753 - protein, 74 aa, Zea mays
  Coding DNA Sequence Number=SeqID_10974
MLAFLIQVDQYIGISTWEQECAFARERKRNIALAWEQECVVVNALACQLAEAEQQLGGAAIVDPVLEYDDVGVP

SEQ ID NO: 52754 - protein, 166 aa, Zea mays
  Coding DNA Sequence Number=SeqID_10975
  Gene Ontology: Mol. function=protein binding; Cellular component =nucleus; Biological process=regulation of transcription, DNA -dependent
  Homolog annotation: Hit_ID=UPI00005A2D55; Match level="QueryCoverage =75%, HitCoverage=20%, E-value=7e-31, Identity=61%"; Hit description =PREDICTED: similar to Smad nuclear interacting protein
  Pfam annotation: Domain name=FHA; Domain location=37-117; Score=58.5; E_value=2.1e-14; Accession=PF00498.16; Description=FHA domain
MDRAFTHRRRQDDTWECDTLNRRHPREPLYVHRMTCYLFGRERKVADVPTDHPSCSKQHAVLQYRLVEKEQLDGMMTKKIRPYLMDLDSTNGTFINGNRIEPRRYYELFEKDTIKFGNSRLYSIVYSVKFEIGDEIEYTEIEWPGVCFAPRKFNRMSFEKIQQNED

SEQ ID NO: 52755 - protein, 128 aa, Zea mays
  Coding DNA Sequence Number=SeqID_10976
  Homolog annotation: Hit_ID=Q2QMU2; Match level="QueryCoverage=54%, HitCoverage=19%, E-value=9e-07, Identity=46%"; Hit description =Retrotransposon protein, putative, unclassified
MGGDVKAEGMGLTVAKELVLNDNLGLASNVVKLANDLQQLDGDSAKDPREGDFVHLVPRRDRQAYNVSDDMIIEGRSATELAMISCLGDTNIIVLEDGVNDRSTPELLLGLRKLASKSINNDTFLLPS

SEQ ID NO: 52756 - protein, 586 aa, Zea mays
  Coding DNA Sequence Number=SeqID_10977
  Gene Ontology: Mol. function=cation:chloride symporter activity; Cellular component=integral to membrane; Biological process=sodium ion transport
  Homolog annotation: Hit_ID=Q6Z0E2; Match level="QueryCoverage=94%, HitCoverage=56%, E-value=0.0, Identity=87%"; Hit description =Putative Na+/K+/Cl-cotransport protein
MVTAAASAGLLDCSWTVAEKAEAPVEQASRGRRLLTATVAWPAPAVIYIGIILSTLGAALQSLTGAPRLLAAIANDDILPVLNYFKVSEGSEPHAATLFTAFICICCVVIGNLDLITPTITMFFLLCYAGVNLSCFLLDLLDAPSWRPRWKFHHWSLSLVGALFCVVIMFLISWSFTVVSLALASLIYYYVSIKGKAGDWGDGFKSAYFQLALRSLRSLGANQVHPKNWYPIPLIFCRPWGKLPENVPCHPKLADFANCMKKKGRGMSIFVSIIDGDYHELAEDAKTACRQLDAYIDYKRCEGVAEIIVAPTMSDGFRSIVQTMGLGNLKPNIVVMRYPEIWRRENLTQIPSTFVSIINDCIIANKAVVIVKGLDEWPNEYQRQYGTIDLYWIVRDGGLMLLLSQLLLTKESFESCKIQVFCISEEDTDAEELKADVKKFLYDLRMQAEVIVVTMKSWESHMESSSSGVQQDNSHEAYTSAQQRIETYLDEMKETAQRERQPLKENGRQVVVNEQKVDKFLYTMLKLNSTILRYSRMAAVVLVSLPPPPLNHPAYFYMEYMDLLVENVPRMLIVRGYTRDVVTFFT

SEQ ID NO: 52757 - protein, 858 aa, Zea mays
  Coding DNA Sequence Number=SeqID_10978
  Gene Ontology: Mol. function=protein kinase activity; Cellular component=cell surface; Biological process=protein amino acid phosphorylation
  Homolog annotation: Hit_ID=Q2RAY8; Match level="QueryCoverage=95%, HitCoverage=62%, E-value=0.0, Identity=61%"; Hit description=D -mannose binding lectin family protein, expressed
  Pfam annotation: Domain name=B_lectin; Domain location=91-204; Score =102.3; E_value=1.4e-27; Accession=PF01453.15; Description=D-mannose binding lectin
  Pfam annotation: Domain name=PAN_1; Domain location=360-438; Score =13.8; E_value=0.0067; Accession=PF00024.16; Description=PAN domain
  Pfam annotation: Domain name=PAN_2; Domain location=358-423; Score= -6.6; E_value=0.0064; Accession=PF08276.2; Description=PAN-like domain
  Pfam annotation: Domain name=Pkinase; Domain location=553-849; Score =179.9; E_value=6.5e-51; Accession=PF00069.15; Description=Protein kinase domain
  Pfam annotation: Domain name=Pkinase_Tyr; Domain location=554-849; Score=84.8; E_value=2.6e-22; Accession=PF07714.7; Description =Protein tyrosine kinase
  Pfam annotation: Domain name=S_locus_glycop; Domain location=227-346; Score=-0.8; E_value=4.2e-05; Accession=PF00954.11; Description=S -locus glycoprotein family
  Pfam module annotation: Pfam domain module=B_lectin::PAN_1::PAN _2::Pkinase::Pkinase_Tyr::S_locus_glycop; Domain location=91-204::360- 438::358-423::553-849::554-849::227-346
MAALALALALASITLSTLAPRPLPLMTSAFSYTAPHDTIPRKSRLIVEEYKTRILRSSPDGTFSCGFHQIYDGAFTFSVWYTNSSTDGDDTAAIVWSANRGRPVHAWGAAVALRKDGSMVLTDYDGTVVWQAQESSSSPDAGAAQYAQLLDTGNLVLKNSSGAIVWQSFDSPTDTFLPTQRIAETSRLVSTTELQLPGHYAFRFSDQSILSLIYDDTNVTSVYWPDPDFQYYENSRNLYNSTRIASLGPSGDIFSSDFANSQHELAAADRGAAGILRRLRLDRDGNLRLYSLNSSDGTGTWSVSWVAESQPCKTHGLCGPYGICHYSPAPVCSCPPGYQMTNPGNWTQGCRPAVDIPCDDDGEQNLTFLELRNTDYWGSDQERIEKVSLETCKDTCLRDCSCKGVQYQEGNGTCYPKSLLFNGRSFPTPTVRTMYIKLPSLSLKASKLPIPQSNVLDSSVPHRLRCDPVTSTTIMEKDSHRRTDQEEPRWIYYFYGFVGAFFVIEVFFFAFAWFFVLRRELRSSQVWAAEEGYKMMTNHFRMYSYRELAKATEKFTHELGWGGTTYKGVLDDGRAVAVKRLGNIRQHSREEFHDELHVIARINHMNLVRMYGFCSERSHRMLVLEYADRGSLADVLFRGRGRGGNNNNSKTSSSLDWKQRFSVALGVAKGLAYLHHECLEWIVHCNLKPENILLDQDLEPKIADFGLAKLLSRSGSGPARNVTPTRARGTVGYIAPEWVSGLPITAKADVYSYGVVLLELVSGTRVFDLVLKGEEDDRAHAHAVLKKFVRMVSYRLDKDEPFWVAEFVDLRLGGEFDCSQVKGMLRLAVSCLEEERKKRPTMESVVQSLLSVNSAGSQ

SEQ ID NO: 52758 - protein, 99 aa, Zea mays
  Coding DNA Sequence Number=SeqID_10979
  Gene Ontology: Mol. function=structural constituent of ribosome; Cellular component=intracellular; Biological process=translation
  Homolog annotation: Hit_ID=Q1T0D3; Match level="QueryCoverage=54%, HitCoverage=73%, E-value=2e-13, Identity=93%"; Hit description =Ribosomal L29e protein
  Pfam annotation: Domain name=Ribosomal_L29e; Domain location=4-43; Score=46.6; E_value=8.6e-11; Accession=PF01779.7; Description =Ribosomal L29e protein family
  Subcellular localization annotation: CTP_CleavageSite=47; ConfidenceScore=5.29e-01
MAKSKNHTAHNQSFKAHKNGIKKPKRHRQTSTKGKLSSCFFEEDGPEVSEELEVLKEGQQEEWARLSPRSKMMVIEFVATNASLVSLRVLAVNLVLTSV

SEQ ID NO: 52759 - protein, 59 aa, Zea mays
  Coding DNA Sequence Number=SeqID_10980
METISTFMLIVVRATQCKHKVDLSLVAQVWSTRNKAADGEGEGHMRVCVDGLGAVKDER

SEQ ID NO: 52760 - protein, 93 aa, Zea mays
  Coding DNA Sequence Number=SeqID_10981
  Gene Ontology: Mol. function=S-adenosylmethionine-dependent methyltransferase activity
  Homolog annotation: Hit_ID=Q1RUT0; Match level="QueryCoverage=61%, HitCoverage=25%, E-value=1e-16, Identity=61%"; Hit description=Zinc finger, RING-type; RINGv
  Pfam annotation: Domain name=zf-C3HC4; Domain location=1-34; Score =24.8; E_value=0.00031; Accession=PF00097.15; Description=Zinc finger, C3HC4 type (RING finger)
MESPCGCSGSLKYAHRGCVQRWCDEKGSTLCEICLQNFKPGYTMPPKKTPVVETAVTIRRIPSDPTRSTSNRIRPEMVPEPNRSIMLMLPLTF

SEQ ID NO: 52761 - protein, 94 aa, Zea mays
  Coding DNA Sequence Number=SeqID_10982
MVDGNIGRKKTGWRDGANVGCAGRKRPKWGGHTGRKTMWVVVHGRHVGTLARFRGYDDVTSSPAPRPIVVQAMPLPPLSSSPVVERRTKYGLAP

SEQ ID NO: 52762 - protein, 84 aa, Zea mays
  Coding DNA Sequence Number=SeqID_10983
MTVMMISAAGGQEAVGEEVEGATGGATRFGPRSDRFDNDRSRTATTWEMRRMRERRWKASQEELLDSVLGQILSIDGYSRTAGA

SEQ ID NO: 52763 - protein, 152 aa, Zea mays
  Coding DNA Sequence Number=SeqID_10984
MASNQGVGRRVDRELRSGAHIRKLDGGASRKREEGTAGRWARHGWNQGCGELAGEGAAGGESWARAELLAGDPECGEQGARSRRASRGKRHGGELEAWRSGELKPRAGARDHAASTNEQQGRGSKSRSTGRKKLRRQREEKTGPRRLDFHGS

SEQ ID NO: 52764 - protein, 37 aa, Zea mays
  Coding DNA Sequence Number=SeqID_10985
MSSIAILVYAKNPRRLDAEGNKLVCDGKILDVEEKIG

SEQ ID NO: 52765 - protein, 399 aa, Zea mays
  Coding DNA Sequence Number=SeqID_10986
  Homolog annotation: Hit_ID=Q941Y5; Match level="QueryCoverage=63%, HitCoverage=78%, E-value=1e-48, Identity=44%"; Hit description =Putative LRP1
  Pfam annotation: Domain name=DUF702; Domain location=192-367; Score =223.0; E_value=6.8e-64; Accession=PF05142.3; Description=Domain of unknown function (DUF702)
MPRYSSLPQLQRALPLPLFLWARLQLIVEEKLIVDEKVSVASSSGRRFPSDTTAIAGWLPSPAGAGRAEDLSLSFNAGAISASSGASLAAGLWGPAASRQAAGYGAIGATGDVGMLVVAPAGSFHHQRAAADDPVLPLITAAQRTLVGADGPSGNAKLPVSSAGAIQFWQQEPAAGGSLGKKALAMLDHGRGGSGSGGATCQDCGNQAKKGCAHSRCRTCCNSRGFECDTHVKSTWVPAARRWERLQLAGGAGAGATASPPSLAPTTTKRPRLACPTPTRTTNSRASTSNATTPRSFDTSSSHQDASFKDSLPRQVRGPAVFRCVRVTSVDDGGGGGTNGEVAYQAAVTINGHLFRGLLYDHGAEDAVMPTASDLNLRSTRAPRSSSAAWATVTHHELI

SEQ ID NO: 52766 - protein, 322 aa, Zea mays
  Coding DNA Sequence Number=SeqID_10987
  Gene Ontology: Mol. function=structural constituent of ribosome; Cellular component=ribonucleoprotein complex; Biological process =translation
  Homolog annotation: Hit_ID=Q60E59; Match level="QueryCoverage=73%, HitCoverage=66%, E-value=1e-125, Identity=94%"; Hit description =Putative chloroplast ribosomal protein L1
  Pfam annotation: Domain name=Ribosomal_L1; Domain location=100-305; Score=428.7; E_value=8.1e-126; Accession=PF00687.11; Description =Ribosomal protein L1pL10e family
  Subcellular localization annotation: CTP_CleavageSite=52; ConfidenceScore=5.73e-01
MATAAAATASSSLLAPAASSTAPASSNALLFPSSVPSLRAYPRLLLAFRRPAAAAIADPQGAVLEEEAEVDQQGQYDDDDGFDGAQTRSKRFLEIQKLRESKKDYDVPTAISLMKQMSSAKFVESAEAHFRMNLDPKYNDQQLRATVNLPKGTGQSVKIAVLTQGEKIDEARAAGADIVGGEDLIEQIKGGFMEFDKLIASPDMMPKVAGLGKILGPRGLMPNPKAGTVSSNITQAIEEFKKGKVEYRVDKSGIVHIPFGKVDFPEEDLIANFMSVVRSVERNKPSGAKGIYWKTAYLCSSMGPSIKLNIKEMLDYGLESSD

SEQ ID NO: 52767 - protein, 91 aa, Zea mays
  Coding DNA Sequence Number=SeqID_10988
MTGAAPGKLLPPDSSDFGSTETPGHLPDLGWELGRAGVRVCDRVVSARATGKEKHGELAGPRRAQVFGAPDLAQPRGPRAMRMRARQPDRL

SEQ ID NO: 52768 - protein, 438 aa, Zea mays
  Coding DNA Sequence Number=SeqID_10989
  Gene Ontology: Mol. function=methyltransferase activity; Biological process=metabolic process
  Homolog annotation: Hit_ID=Q00TN0; Match level="QueryCoverage=86%, HitCoverage=32%, E-value=7e-56, Identity=35%"; Hit description =Homology to unknown gene
MSGRKNAGKVSPWLLVLICLGCFFVTYNLLTMPSRGRDGPRKFLGGGGDRHSTASLGSGSDSDPAKRFHVALTATDALYSQWQSRIMHYWYKEMRDRPGSDMGGFTRILHSGKPDGLMDEIPTMVVDPLPEGKDQGYIVLNRPWAFVQWIQKAKIVEEYILMAEPDHVFVKPLPNLSHGDEPAAFPFFYIKPTENEKILRKFFPEEKGPISNIDPIGNSPVIIKKVKKTLEPLLFFEKRRRTAPHYIKKEKQGLRRPDTVWGNTENMFVFNRRLQHYLRNKVPKLKAQLEKIAPTWMNVSLKMKEDQETDKAFGWVLEMYAYAVASALHGVHHSLHKDFMIQPPWDLKTDNTFIIHYTYGCDYSMKRKMICLCYFELTQGQLTYGKIGEWRFDKRSYLQSPPPRNLSLPPPGVPESVVTLVKMVNEATANIPGWEDDR

SEQ ID NO: 52769 - protein, 69 aa, Zea mays
  Coding DNA Sequence Number=SeqID_10990
MMKVPKVHKKPIKRPRKGFNKTEQGITEVLPGLAHWTVRCTTGQAEFNTFGNSQRRSAIIHRTARCTTG

SEQ ID NO: 52770 - protein, 336 aa, Zea mays
  Coding DNA Sequence Number=SeqID_10991
  Gene Ontology: Mol. function=peroxidase activity; Cellular component =vacuole; Biological process=response to oxidative stress
  Homolog annotation: Hit_ID=Q9FJZ9; Match level="QueryCoverage=90%, HitCoverage=91%, E-value=1e-133, Identity=75%"; Hit description =Peroxidase 72 precursor
  Pfam annotation: Domain name=peroxidase; Domain location=50-298; Score=484.6; E_value=1.1e-142; Accession=PF00141.13; Description =Peroxidase
MASLVPLVVALLLCPSSSLAMASGAGPAQWGKKLDPHFYDQSCPHAQHIVASIVGKAHHQDPRMAASLLRLHFHDCFVKGCDASLLLDSSGSIVSEKRSNPNRDSARGFEVIDEIKAALEAACPATVSCADILALAARDSTVMTGGPGWIVPLGRRDSRGASVQGSNNDIPAPNNTLPTIITKFKLQGLDIVDLVALLGSHTIGDSRCTSFRQRLYNQTGNGLPDFTLDASYAAALRPRCPRSGGDQNLFFLDPVTPFKFDNQYYKNILAYRGLLSSDEVLLTGSGATADLVKLYAANQDIFFQHFARSIVKMGNISPLTGANGEIRKNCRRVNHA

SEQ ID NO: 52771 - protein, 205 aa, Zea mays
  Coding DNA Sequence Number=SeqID_10992
MKCDIERVLSEVQGSLRWFSAVDRANLSITETSTSMGALRGRASEGERCEDRACAKATQSAYDCRVEVSKRNQEVVTLDCLERMWVTMRFQASKLRRQNVQAQVVVMNREAVYRIEEEDRLHDRIGGTQKGTHQHMLRAVDVAHERFGTSLRFEHFVDRVRELEVETFRRGVNQTFVIARSHEGGINLEALSEDYCDNWSVAELT

SEQ ID NO: 52772 - protein, 259 aa, Zea mays
  Coding DNA Sequence Number=SeqID_10993
MTVGLLYSDLASDIVDVANVSLMMGQIRWLHGVHSSDPLAVRLAPRPSSASLHPPTRRAGVIGRMTVGLLYSDLASDIVDVANVSLMTGQIRWSHGVHSSDPLAELNYRLIYVLGDEALHAALFFYASTPLLEKGQLPSPSLFPMDLGKRQADDNPPVMRPLRQRMVDSWYGPLHRQGLIFSVFLFTFCSFIGEWSQWVRERILGCPFIKSWRRRSQASVKAPTRPHSWSALVALTGRNVSWMSQTGLMTQFTVVFIGA

SEQ ID NO: 52773 - protein, 764 aa, Zea mays
  Coding DNA Sequence Number=SeqID_10994
  Gene Ontology: Mol. function=phospholipase D activity; Cellular component=membrane; Biological process=phosphatidylcholine metabolic process
  Homolog annotation: Hit_ID=Q75KP6; Match level="QueryCoverage=99%, HitCoverage=89%, E-value=0.0, Identity=71%"; Hit description =Putative phospholipase D
  Pfam annotation: Domain name=PLDc; Domain location=265-303; Score =38.0; E_value=3.3e-08; Accession=PF00614.12; Description =Phospholipase D. Active site motif
  Pfam annotation: Domain name=PLDc; Domain location=595-622; Score =39.0; E_value=1.6e-08; Accession=PF00614.12; Description =Phospholipase D. Active site motif
  Pfam module annotation: Pfam domain module=PLDc::PLDc; Domain location=265-303::595-622
MVPPVNSPKWDESFRIYCAHDASDIIFTVKADNAIGATLIGRAYLPTDSVVAGNKVNLWLPIRDEKRQPLEGGDQIHVQLQFTDVAADPTAGWGAGVGSAAYDGVPHTFFKQRRGCRVRLYEDAHVAADFSPRIRLAGGRFYEPRRCWVDVFDAINRARRMVYIAGWSVNTDVVLVRDPRKQAAAASENLGELLIRKANEGVTVLMLVWDDRTSVGLGPIRRDGLMATGDQDTAAFFRGTRVQCVLCPRNPDKDRSYVQDIETDTMFTHHQKTVIVDGGGRPAPWSPPGLVGFLGGIDMCDGRYDTQDHPLFRTLGTTHNRDFHQPNFPGASISKGGPREPWHDIHCRVEGPAAWDVLENFEQRWRKQGKGDNLLVALNKEWAEREAAPRGDAESWNVQVFRSIDGGAAAGFPEPSADAPREAAALGLVTGKDHVMERSIQDAYIHAIRRARDFVYIENQYFLGSSYAWRQNDGVSVEDINALHLIPRELSLKIVSKIEAGERFAVYVVVPLWPEGVPESGSVQAILDWQRRTMEMMYKDVLMAIRAKGLQADPRDYLTFFCLGNREAPCPGEYVPPEHPDPNTDYERAQRARRFMIYVHAKTMIVDDEYIIVGSANINQRSMDGGRDTEIAIGAYQPGYLAIRNTWGRRRRRHWAARGQVHGFRVSLWKEHLGQAAAAALGGDLLRPSSLTCVRRMNQVAKQHWDMFASDAFQGNLPGHLMAYPVSVLDDGGGKIVATTETFPDTNAKVLGIKSDILPPILTT

SEQ ID NO: 52774 - protein, 176 aa, Zea mays
  Coding DNA Sequence Number=SeqID_10995
MDMGYLQWEPEAEPGVLHGWLDDVGGGDIEVIFGTSHMGPFFIDLNTLFPSGVAKKYVDADLGAKHWNEPPGGALCGGADNLRHRVGRSTTWAQERILLCLLSNGSHLGLVCPRWHRGYSSPRRTLELVPGRDSVEGESSKALLYVSRPPSSRPYEQGLYAGALVLLRTSYKQDDL

SEQ ID NO: 52775 - protein, 71 aa, Zea mays
  Coding DNA Sequence Number=SeqID_10996
MAMMDSTSEKMYLCQVPNFGFEMIKLRPGSDTSGHGRTIRLSQPDHLDEHRTVRAQSGTLRAIPLYDIFDV

SEQ ID NO: 52776 - protein, 108 aa, Zea mays
  Coding DNA Sequence Number=SeqID_10997
MASPEFSLGRNRELRLARPQASASAPALGEGLRLARPQASALASTSRGGLRLARPYASASASASGEGLRLARLQASASVSALGEGPRLARPQPRPQEKSPPRPTSASD

SEQ ID NO: 52777 - protein, 153 aa, Zea mays
  Coding DNA Sequence Number=SeqID_10998
  Gene Ontology: Mol. function=DNA binding; Biological process=DNA integration
  Homolog annotation: Hit_ID=Q10N73; Match level="QueryCoverage=38%, HitCoverage=19%, E-value=2e-28, Identity=94%"; Hit description=Zinc finger, C3HC4 type family protein, expressed
MARSMLKAMNLPNWLWGEAVATAVYILNRSPTQGNEGSTPYETPERKFVTKISALEICNEIVNGLLQSDSAPLRLLDDPEEKRKLGYGTQRERLGKDSIKPFDACCLCLKPLIGPLCCPKGHTFCKECILECLLYQKEGHQAGVVGWAIGGVE

SEQ ID NO: 52778 - protein, 193 aa, Zea mays
  Coding DNA Sequence Number=SeqID_10999
  Gene Ontology: Mol. function=transferase activity, transferring hexosyl groups; Cellular component=integral to membrane; Biological process=electron transport
  Homolog annotation: Hit_ID=Q10MK2; Match level="QueryCoverage=65%, HitCoverage=26%, E-value=7e-40, Identity=62%"; Hit description =Glycosyltransferase 5, putative, expressed
MALVVHVAHDDRKIGMSCNSYYGGESAWSQYICAMETRKCAAPRGRWGGKTFLESSYRLSGFLAYIADKFEEMRRDSTTPPVPGSEQRPLTTHFMGCKPCGRNDSIYDAVWCRRSMERALNFGDDQILNLYGFEHKSFNTTTVRWVRNDTGGPLDAVDEELGRLLHPTFRAANLLLLISRIILITWDFLISSY

SEQ ID NO: 52779 - protein, 106 aa, Zea mays
  Coding DNA Sequence Number=SeqID_11000
MGDGTERDDGVKGKGSRATEADDGDANVGSAGPGGGNWGKAGARGRGSARLGCNNKAAGDDGDVSSAPGGAHVIRHSMAMGVKLGRGDAEKGKVFKAARGVAVYRG

SEQ ID NO: 52780 - protein, 200 aa, Zea mays
  Coding DNA Sequence Number=SeqID_11001
  Gene Ontology: Mol. function=transferase activity, transferring glycosyl groups; Cellular component=integral to membrane
  Homolog annotation: Hit_ID=Q10MK2; Match level="QueryCoverage=46%, HitCoverage=19%, E-value=1e-38, Identity=76%"; Hit description =Glycosyltransferase 5, putative, expressed
  Pfam annotation: Domain name=Glyco_transf_34; Domain location=97-200; Score=-77.9; E_value=0.0075; Accession=PF05637.3; Description =galactosyl transferase GMA12MNN10 family
TMKRALQSDDLRLRKSTLHTIHITVQVQCTAMQQISNSGPMVQCTAVQQGAASSFYSIVDDDEATRCGRPTSPAASSAPPSGLPRLLPLHHRAVRPLLVQDIRIDDPNGKHMLLRAFKNKADYCRVHGFDIFYSTVLLDAELSGFWSKLPLLRTLMLVHPETELLWWVDSDVIFIDMLFEPPWDKYAGHNLVFPGSEEKV

SEQ ID NO: 52781 - protein, 120 aa, Zea mays
  Coding DNA Sequence Number=SeqID_11002
MEDTTVARWTVRARPGHSGGTAGNSWERPHLLPFSAASSAQLSPLHSPSPISLTAPSLVLAPPAGRRSSPWWPSSSMDVSPHPQVAPPMAFVPAQPWTCPSLLLLAVDRLGALILRLPLP

SEQ ID NO: 52782 - protein, 365 aa, Zea mays
  Coding DNA Sequence Number=SeqID_11003
  Gene Ontology: Mol. function=protein binding; Biological process =apoptosis
MESRLEEQQEESGNMKGKENGEHYELSPQVLNEWAPVSGKWLGDVKQQGQDNEKGKQFQWPIVWMPAGNGSGDHNNGSPVVTGHQDNMILEGNPKITPVVPKSIHDGKKPPRENCKTIPVVPEKEINEKKASTYRTIPVIKESDEKKIGMREKRESKEANSAEMVEENRKKKHNDSSVVKHSKLPPVCLRVDPLPRKKPGNDSSRSPSPPRKNTDNTKKDVEEAQSQILEPKQSSTSKDITVSEEEEAPTSKDGQKVQAASTTVGDQENADLKSIEEDHVQENAGAGSLNGCDKRKNEDGTVIESETAKDDARTYGVNLSESDVAVRIQSAYRGKPTQKEQVAIGETIMNLLLKLDAIQVYFHRQ

SEQ ID NO: 52783 - protein, 205 aa, Zea mays
  Coding DNA Sequence Number=SeqID_11004
  Subcellular localization annotation: CTP_CleavageSite=60; ConfidenceScore=5.55e-01
MAGIPTTLHGSNQSDRTATVPIAATPNAQSGHRTPPRNSAIRSRAQRNQRGRYHTDNGAAQSTVGGRTSPRRSLALRRTILRNSVAHAPDAPHPHDSKPLASPRDSPPSTDQRSGEVSRAADHRRVRLQASIPHSIGGHNLSKIVAARGGMWRRGRRKQMRISLTGGVHTAVECASGCQVGPERQERGERAAGRDVGLARAKQMG

SEQ ID NO: 52784 - protein, 430 aa, Zea mays
  Coding DNA Sequence Number=SeqID_11005
  Homolog annotation: Hit_ID=Q9LHP1; Match level="QueryCoverage=23%, HitCoverage=37%, E-value=3e-16, Identity=49%"; Hit description=60S ribosomal protein L7-4
  Pfam annotation: Domain name=Ribosomal_L30_N; Domain location=231 -313; Score=59.3; E_value=1.2e-14; Accession=PF08079.2; Description =Ribosomal L30 N-terminal domain
TSRHPRPPSPLRGILLRYGKRLPPLRPDSESASSSASWLSVLRPQCPWKEIENPGPRPGSKWKEIEESASAAPWHPLRPPPLPRLPARETIAIVPLPRAARDDPLPRDSEVFATHGVSLYADLLLHLVSDHLLCLVSFRDPCVPEIQTVLLFTAAFIVSSPTASAAPIRPPWNHMMSLYWSVYYAEGIGTGSGSQEWKANLSWVLAALAPRRSSSRCLMSSEASKVAVPESVLRKRKREEQWATEKKEKALVEKKKSIESRKLIFTRAKQCLMKENPDMLSVCLWGCLEQEKELVQLKREARLKGGFYVSLEAKLLFVASIVPCSTATVLSSPPARNQRSVDTAPPQSTRIRGPSSPPPRNRSAGVPPTAAIRNLKSSQISFRSGTVALGRVSHELSVPPSPSTRQRNPARVCANRWRWSGSVTRPHQAL

SEQ ID NO: 52785 - protein, 83 aa, Zea mays
  Coding DNA Sequence Number=SeqID_11006
MALDKLPCDENAGGRRCRPGIRARLGAATEGARRQQQHHHRHRHHDLEVGTWPLASSASVPVRVTLTACGRSSSVMVHLNCAE

SEQ ID NO: 52786 - protein, 73 aa, Zea mays
  Coding DNA Sequence Number=SeqID_11007
MAGGIELAGAKERWLAGEGYVAPKDDVDLPVDIGERLGIAPLLLRWQVLVSSRRWWRKHMEWLALDDHVRNMP

SEQ ID NO: 52787 - protein, 119 aa, Zea mays
  Coding DNA Sequence Number=SeqID_11008
MWVDEEGVTTAFYRAGACSGERLWPNFNWSVLRAIGGYKRARTWSNWEVTNPKSVDHGGVLHGGVKNREEGICGLREFSGEIELIAQLLRSRTVSMTVAKWFVPMARGTIDRVYRFGPL

SEQ ID NO: 52788 - protein, 161 aa, Zea mays
  Coding DNA Sequence Number=SeqID_11009
MGKNNKRKREPTPPSEDFGDSEYSEEEFSSESEGSPAPVSPPASSDDSDDSQGIAAKVWTYIRAVERSGLEGSDESEYSSDEEDSDGDGEDEDDDDDDGDDDDGGDGDGDGSGSSRGSGGGSRDGDGGGSSRGSNRGGSSKGSSKGSTRGGGGGNSNRASG

SEQ ID NO: 52789 - protein, 84 aa, Zea mays
  Coding DNA Sequence Number=SeqID_11010
MGAAERVELNSEFQLNMASTSQNAAGNHLIIDRSIHDFSDQNLCEHRVLSAPLVFSKSFVRTLPSRFLGCGFARSRASSWSQAR

SEQ ID NO: 52790 - protein, 50 aa, Zea mays
  Coding DNA Sequence Number=SeqID_11011
MGPRVVDDCSPESQGYHRPYHAVARLPLVYTTDHDPTTEMNMYPFVWQTS

SEQ ID NO: 52791 - protein, 165 aa, Zea mays
  Coding DNA Sequence Number=SeqID_11012
  Homolog annotation: Hit_ID=P30236; Match level="QueryCoverage=46%, HitCoverage=67%, E-value=4e-15, Identity=37%"; Hit description=22.0 kDa class IV heat shock protein precursor
  Pfam annotation: Domain name=HSP20; Domain location=52-137; Score= -7.7; E_value=0.0027; Accession=PF00011.11; Description=Hsp20alpha crystallin family
MSRRAAAALALACLAVMAAALADGALLPWFGEGRRGGDEAAAAAASPLSGPGVGLLADPFRILEHVPLGFDRDDVAMVSMARADWRETPDAHEIVFRLPENADLDSVGASLDNGVLTVRFRKLAPEQVKGPRVVGIAGGDGDGDAKKSIGGGAGDGHHQTKKVEL

SEQ ID NO: 52792 - protein, 118 aa, Zea mays
  Coding DNA Sequence Number=SeqID_11013
MTIRTHGYLDLDKGGTQRVSNFGLIGYSNAVYVGYKVHKNQIEVSMQQIARIKACTGYNTCKITSMPFTFANDFKDLQKTKAPNRNVLEHLRRTRNPDFGKGAFGTKFEPKHDSKLGV

SEQ ID NO: 52793 - protein, 181 aa, Zea mays
  Coding DNA Sequence Number=SeqID_11014
MAMSLLDSNMIHGSRSQKMVRLRTIFYQDEEEDDMTPLNTTIGYKLLTRRALASPTMLGYSESAIKNAMHPCPPSQSVLGHDDEATMKTEDLPLVSVSNLSPTSKFIVRVLGLGGCARWAQDLYWFRQNIPTSSHQRLALPAPLMIKTRSRDYKWAREGGEATKSLIEVEVELRATEWSPS

SEQ ID NO: 52794 - protein, 156 aa, Zea mays
  Coding DNA Sequence Number=SeqID_11015
MERGSTDMGEKGRTNSPRESSQMKMAAAGGGRSPANPSWIALPPSLTASHPLASGHWDEFHNYEFVGRFQAGIERFQRDWARFTYTCGLNKHFFFGGLVFDPYLNNTHGSGRDPSQFQPNQTGPKVEISMLMIQGFEQMSPHNHYIMTLLVITHVI

SEQ ID NO: 52795 - protein, 155 aa, Zea mays
  Coding DNA Sequence Number=SeqID_11016
MELLVRNQNHPPWILVFPKATPRRTIVNLWAPGPPQATALARRYVDVHSHGQTRDCEGSNDDLSGGVDRRRRSSRLGFGVGGADRLARMEAGTGKTTQKQATSYRAHGHRNSEPASWTHVKRNGPESTREAVKPVEGVKSLQVLIEKMWFWLTNK

SEQ ID NO: 52796 - protein, 250 aa, Zea mays
  Coding DNA Sequence Number=SeqID_11017
  Gene Ontology: Mol. function=RNA-directed DNA polymerase activity; Cellular component=mitochondrion; Biological process=RNA-dependent DNA replication
  Homolog annotation: Hit_ID=UPI00004C1731; Match level="QueryCoverage =82%, HitCoverage=14%, E-value=1e-108, Identity=90%"; Hit description= UPI00004C1731 related cluster
  Pfam annotation: Domain name=rve; Domain location=116-248; Score =77.6; E_value=3.9e-20; Accession=PF00665.16; Description=Integrase core domain
MEALPERNQGEGKGNGCPFDATITQGRDTSRETAVGLLELLASRSVGRGWARLMAFCGVTCGHHAAPRALVGNAFRQGFYWPTAVADATRIVRTCQGCQFYARQTHRPAQALQTIPITWSFAVWGLDLVGPLQKAPGGFTHLLVAIDTFSKWIKVRPLNSIRSEQAVAFFTNIIHRFGVPNSIITDNGTQFTGRKFLDFCEDHHIRVDWAAVAHPMTNGQVERANGMLLQGLKPRIYNDLNKFGKRWMKE

SEQ ID NO: 52797 - protein, 75 aa, Zea mays
  Coding DNA Sequence Number=SeqID_11018
MPVSATERCVDSLNNRFRPIWGLTAVAIFSVDDTSSSAAPRCALPSLCGGSFCWKEQAAAPRRVTRPNVRVTRPN

SEQ ID NO: 52798 - protein, 445 aa, Zea mays
  Coding DNA Sequence Number=SeqID_11019
  Gene Ontology: Mol. function=nucleic acid binding; Cellular component= intracellular; Biological process=chromatin modification
  Homolog annotation: Hit_ID=Q53JG9; Match level="QueryCoverage=60%, HitCoverage=62%, E-value=1e-102, Identity=71%"; Hit description=Zinc finger, C2H2 type, putative
  Pfam annotation: Domain name=zf-C2H2; Domain location=205-228; Score =26.2; E_value=0.00012; Accession=PF00096.16; Description=Zinc finger, C2H2 type
  Subcellular localization annotation: CTP_CleavageSite=47; ConfidenceScore=5.22e-01
MPFPPVAVKEMSREARKTKSRSSPSPSSWLDRSMKFYYPSSTSRKSRAQAAPAAATEGKSTDGGDKPSNGSSGKKKKKKKRSISIGRSMACGSSICSTSTKESSVMSRDSSSGASSRSLRSPNVDAVYASAAAAISATSSFSSVTTTAATTVTSSTSSSSPLSSALSSPLSSIGRSFRGVQIRRLSGCYECRHSVFDPSGFAASFPCADCDEVFSKPESLELHRATRHAVSELAPEDTSRNVVEIIFQSSWLRKQTPPVCRIERVLKVQSSDRTVKRFEQYRESVRERARSDDQGQGKKNPRCVADGNELLRFHCATFTCSLGLAGSTALCRAPSAQCMLCSIIKEGFRVDGDGKIATMATSGRAHDTAQLVLPDGSDKRAMLLCRVVAGRVKKASGEKCSEDSTNFDSVSLSPSTEGVYSDLDELFVFNPRAILPCFVVIYSGY

SEQ ID NO: 52799 - protein, 149 aa, Zea mays
  Coding DNA Sequence Number=SeqID_11020
  Subcellular localization annotation: CTP_CleavageSite=93; ConfidenceScore=5.17e-01
MDFALPDPRARTQPRLGRRWTPPRPTPGLRLNLDAGRRTPPRPTQGSDTASASEDGLRLARPRARAQPRRWTTDSASPDPRALTQPQPRKMVSASPDLGLGLNLDLGRRTPPRPTPGLGLNLDLGGIATSPKLRPGPATSPGGPSLLCP

SEQ ID NO: 52800 - protein, 157 aa, Zea mays
  Coding DNA Sequence Number=SeqID_11021
  Gene Ontology: Mol. function=protein serine/threonine kinase activity; Cellular component=spindle pole body; Biological process =protein amino acid phosphorylation
  Homolog annotation: Hit_ID=Q5N942; Match level="QueryCoverage=93%, HitCoverage=41%, E-value=2e-77, Identity=93%"; Hit description =Serine/threonine-protein kinase SAPK4
  Pfam annotation: Domain name=Pkinase; Domain location=4-157; Score =66.1; E_value=1.1e-16; Accession=PF00069.15; Description=Protein kinase domain
  Pfam annotation: Domain name=Pkinase_Tyr; Domain location=4-157; Score=-77.2; E_value=9.8e-08; Accession=PF07714.7; Description =Protein tyrosine kinase
  Pfam module annotation: Pfam domain module=Pkinase::Pkinase_Tyr; Domain location=4-157::4-157
MDKYEAVRDIGSGNFGVARLMRNRETRELVAVKLIERGHRIDENVYREIVNHRSLRHPNIIQFIEVILTPTHLAIVMEYAAGGELFDRIVDRGRFSEDETRYFFQQLICGVSYCHHMQICHRDLKLENVLLDGSPAPRLKICDFGYSKVVTNFSLYW

SEQ ID NO: 52801 - protein, 198 aa, Zea mays
  Coding DNA Sequence Number=SeqID_11022
MSGAPEDSNANSPPSGISRGDSAIIHRTVRCTPDSVRCAKEERSQELAGFGNLQRLVRYNSPDMSGVHRTVRCNSGATAIRRQRLPATQLMRAQRAQKSGAPILAHRTRYSACPVCTGHPGGPTSQKLQRSESKGSDDVAGAPDMSDRGVPGPTSECRRVPQPRWVEREGEREGGRARRPETDVREVGIPRPSCSSRA

SEQ ID NO: 52802 - protein, 135 aa, Zea mays
  Coding DNA Sequence Number=SeqID_11023
  Homolog annotation: Hit_ID=O65757; Match level="QueryCoverage=43%, HitCoverage=45%, E-value=1e-15, Identity=62%"; Hit description =Putative Pi starvation-induced protein
  Pfam annotation: Domain name=Subtilisin_N; Domain location=35-101; Score=32.7; E_value=1.3e-06; Accession=PF05922.7; Description =Subtilisin N-terminal Region
MKKTSSPLLIVLFLTAAAMAAEPEKQAAPAAQETAVHIVYVDRPEDADPEEFHIRTLTPVLGSEQKARDAVLYHYKNAASGFSAKLTPQQVKDLKAFLRTWLWGCEENPRRIIINQSDYFSTLLCAHKRVKELEN

SEQ ID NO: 52803 - protein, 74 aa, Zea mays
  Coding DNA Sequence Number=SeqID_11024
MAPGGPHTPSYATPMEIKLFTTGAHHLKNVGHIEDHHAHANVDSPSVLVMPAGTCEDSQISRPAMMRTGGGLTH

SEQ ID NO: 52804 - protein, 174 aa, Zea mays
  Coding DNA Sequence Number=SeqID_11025
MQAACNRTKGVDPFDFDASSMEAQAHTSCNRRAGYYVRETAPPLVPVPRLLDCRTDAATRGNLAHGLIVPTEHIGHGDRERGYSERDPSPRRKRAPSPPTDQRRPGSTARPSTAKRPGSLPARSSSGPPLYGSTRLRDHWSTARPPADPRRADSTGARTAVTASSDGAHSTAAA

SEQ ID NO: 52805 - protein, 113 aa, Zea mays
  Coding DNA Sequence Number=SeqID_11026
MQVLDAYQGPLAGVCSETKKALSTALAPVPCDSEEKEDDSEFCVITIDDLFPEDAKQPETVDTKAKQPQTTGLKANLPENADPKFYVELRVMRIANSFFIPLMWLATAANMML

SEQ ID NO: 52806 - protein, 456 aa, Zea mays
  Coding DNA Sequence Number=SeqID_11027
  Gene Ontology: Mol. function=GTP binding; Cellular component=nucleus; Biological process=small GTPase mediated signal transduction
  Homolog annotation: Hit_ID=Q7EZC9; Match level="QueryCoverage=82%, HitCoverage=72%, E-value=1e-151, Identity=74%"; Hit description =Nucleolar GTP-binding protein 1-like
  Pfam annotation: Domain name=MMR_HSR1; Domain location=218-349; Score= 18.5; E_value=2e-05; Accession=PF01926.13; Description=GTPase of unknown function
  Pfam annotation: Domain name=NOG1; Domain location=325-382; Score =80.3; E_value=6e-21; Accession=PF06858.4; Description=Nucleolar GTP -binding protein 1 (NOG1)
  Pfam module annotation: Pfam domain module=MMR_HSR1::NOG1; Domain location=218-349::325-382
MASSSSCCHHAPLPLRASEASRPPLPPQSYSLDDKLQGELDDTQGEQRKLETVGAFQKIPMVMPATDILMSAQRKSRNVPPTKGIANIAKRERNKGAKQLDALMKELSVPLRTYTENFPKRRDLHPYERSLIELTFGEGYYEQVLGRVDTLRKRITSVGKQHASVCAKSTTKREAEERLTEGRKKLEEAFQHGKHAIDDLVNVAKALRSMPVVDLHIPTLCLVGSPNVGKSSLVRILSSGKPEVCSYPFTTRGILMGHIVSNQERFQWHNNQVKHNSRGGQGGHNTAHRLAPSLRRLNGKKVTYHRRSPYRRNNHGVAFMYDRNNIERLTLAVLSYLPIAVLYVHDLSEDCGTSVADQYITYKHIKDRFGDRLWLDVISKCDLLGKKEPISFHDADEDVARYRRLGPEGALQVSVQTEIGVKQVSYSRASLILSSDCLLSLLIAYHSDLQALKNLG

SEQ ID NO: 52807 - protein, 179 aa, Zea mays
  Coding DNA Sequence Number=SeqID_11028
  Homolog annotation: Hit_ID=Q6QP51; Match level="QueryCoverage=41%, HitCoverage=33%, E-value=2e-14, Identity=56%"; Hit description =Putative growth-regulating factor 1
MTASKKVRHVIRFRILFLFLFLSLTTGTGKGDTPKGILLREGNGPRAPLLIRGSKAGPSEGFNSRLRALGLRAHYWSEVRRPAPQKGSTAASSHSGSAPTTDQGFVGWPSKGSTAASDVERGITLAWAPAADYTTARSQGTALSGAEVVDGGGTKGGRVGAGHPPSPVFEVQRWRLKGK

SEQ ID NO: 52808 - protein, 976 aa, Zea mays
  Coding DNA Sequence Number=SeqID_11029
  Gene Ontology: Mol. function=protein binding
  Homolog annotation: Hit_ID=Q1RSL1; Match level="QueryCoverage=33%, HitCoverage=43%, E-value=1e-24, Identity=29%"; Hit description=IMP dehydrogenase/GMP reductase
  Pfam annotation: Domain name=PWWP; Domain location=15-89; Score=62.2; E_value=1.7e-15; Accession=PF00855.8; Description=PWWP domain
MVPAAGGGRVWANGAPRFGDMVWAKVKSHPWWPGHIYSVSLTDDEEVHRGYRYGLVLVAFFGDKSYGWFEPSELVPFEEHFTEKAAQGGSTRSSFAGAVAEAVDEVARRSALALLCPCKSPDAFRPHPSDGNFLLVDVPAFDTDADYHPDQIQAARQRFVPRKALDYLLDAAVTQRDAAEKAARTVPGMEMAALFSAYRRAVFSPIDNTYAQAFGVDPELALAAEQKAAAERAQRARPLKGGPRKTADQATPAAGRRRGGAGGAAARLMEKIVPGAPAMKTKSSKKDQYLLKRRDAPEASAHSQPQLPDAPPPAPTLAAEDGPPGFPASGDPPTPPLPGSSVADEDFMLQRRVPLVDVPPAVQAQPSEGPAAPKNATKLKKPRKREREEGPDATPDSADAAGDPKKKKKKKKLSDVDGAGGKVAFVVEGRDVLDLTQVLSDIRNLPLAPFHGAERLISDAARSFVLAFRSKYYKKSYENDPPEELKSLDKPSAAATDGQSPKKKKPAPRPGAGNDPTKAGVKRGPSDRQGELAIKKKAKLDKIKVLSSEKKAAGLEQKDTAAAAAQQQARAAGAKDKAEMGAAKKKEPASARTVRTPSPTALMMKFPLNSTLPSVASLKARFARFGPLDVDGIRVYWKSHMCRVVYRFKFDAEAALRYAKANAMFGQVDTQYHLREVEAGAGREPLAAPEAAPQQRSELRLMETAAFRPGTSGNGAPLPMSRAGAAPARPAVGVGQPPKSILKKSTDEGSSGTTREVSRVKFVLDGADGGTLAPPPSVGGNGNGADGGSSMVAKAAKSVGFAPSQALQPPPRTLQPPMRPAHQQPPRAAVTQQLPPPPLPQHLPYHQHPRGADGTPLAPPPGQLLAYPPRGHGEGPSALPGLPPPLPYQPRPTGFPGGQQLGYPPRSGDNLPLLAGQPQFPPRPSNAKAGSEGPAWRRGEKEFKEEVWRLMTGIAKMVEPLTDKNGFFPYHLFRAQ

SEQ ID NO: 52809 - protein, 128 aa, Zea mays
  Coding DNA Sequence Number=SeqID_11030
MAKSFIIALEGPTLTWQQEKETLELAPRGASVGAKADCPIARYIYNKRDKSGRSGSEGPKTEGAKALRRRERSRQAKALPVPCAVRNAKVALLAEKKGKTALVDDIPHKVLEDEAIISRRHHQENPPT

SEQ ID NO: 52810 - protein, 54 aa, Zea mays
  Coding DNA Sequence Number=SeqID_11031
MSRAFDIYYIMDCGVISVPEARDVLSNHETIEIVSYIEVCIKADGCNVVVKQLN

SEQ ID NO: 52811 - protein, 79 aa, Zea mays
  Coding DNA Sequence Number=SeqID_11032
MEQMANDEEVEDFGAWRLESMKPLAEGAGAGTEDQPVPLTGVGEGDPVATVALPEDTSVAVAPAAEDPAVTSDPAQVAG

SEQ ID NO: 52812 - protein, 252 aa, Zea mays
  Coding DNA Sequence Number=SeqID_11033
  Homolog annotation: Hit_ID=Q6QP54; Match level="QueryCoverage=17%, HitCoverage=15%, E-value=3e-11, Identity=77%"; Hit description =Putative kinase
MEDYWAKACPVHSELAYSAAPILKRIIRQVIVKPRSSCVHKESRSDRSHFAAPLTGLTEGQRRLRRSDCCVARQSEADRQSGPASGTIGSSASPDPGLDSGSAPEDGKLRSARPRARTRAQPRKTANSAPPDPGLGLGLSPRRRRTLLRPTQGSDLGSAPEDDELRFARPQGSDSALASADGLRLARPRGSDSTSATEDRLDLDLGGASTSPDLGRGPTTSTGGAIITLPQAGSGYEKQDRRPIWLAPPDRQ

SEQ ID NO: 52813 - protein, 418 aa, Zea mays
  Coding DNA Sequence Number=SeqID_11034
KDTYGVFSEPVDPEEDDVFLISTNAMCYNSPDTIYYRQARGIQEIAKKDFENLRQDSDASDPEPEPELELEPEPEEPKPQPRRGRPPNKNNAKQKVGKPPTERATADFSGATLATAANIGRHAQADVDLSRRAMDKAMMDMLRASFANRRNEHNWSGERKFERFEECSGFKLSPFSRSFKNCPLKGYRGTWSAKMGKRPILMEDSRRSTYCETQPSNSIYELPVGVQLQQSYSRSLARFAAQLGPVCWEIASRRIERSLAPGTKFGRGWVGDGETPNSFQPPVLAAFSETTTPQDRTAASGEQPCPSMSSPPATEACAGNDRSHLAGSQPDATPYASTSTTQRMSSEALASQQCGSLPQISINRAERTLEMMKGSPNNLHGHPGMQQTANGFNAVPGPMMFPHVAQLVVNQMQTHTAD

SEQ ID NO: 52814 - protein, 134 aa, Zea mays
  Coding DNA Sequence Number=SeqID_11035
  Gene Ontology: Mol. function=RNA-directed DNA polymerase activity; Biological process=RNA-dependent DNA replication
  Homolog annotation: Hit_ID=UPI00004C1731; Match level="QueryCoverage =57%, HitCoverage=5%, E-value=3e-36, Identity=90%"; Hit description =UPI00004C1731 related cluster
MGVPDFCARWRAINALAAPRALVGNAFRQDFYWSTAVAEATRIVRTCEGCQFYARQTHPPTHALQTIPITWPFAVWGLDLVGPLQKAPGSYTHPWEGPFVIAEVLKPRTNKLADSQDEVYSNAWNIQQLRRFYP

SEQ ID NO: 52815 - protein, 679 aa, Zea mays
  Coding DNA Sequence Number=SeqID_11036
  Gene Ontology: Mol. function=RNA-directed DNA polymerase activity; Cellular component=intracellular; Biological process=RNA-dependent DNA replication
  Homolog annotation: Hit_ID=UPI00004C1733; Match level="QueryCoverage =91%, HitCoverage=45%, E-value=0.0, Identity=93%"; Hit description =UPI00004C1733 related cluster
  Pfam annotation: Domain name=RVT_1; Domain location=56-225; Score =144.8; E_value=2.3e-40; Accession=PF00078.17; Description=Reverse transcriptase (RNA-dependent
  Pfam annotation: Domain name=RnaseH; Domain location=455-582; Score =4.3; E_value=2.3e-05; Accession=PF00075.14; Description=RNase H
  Pfam module annotation: Pfam domain module=RVT_1::RnaseH; Domain location=56-225::455-582
MPGIPRDVAEHSLDIRAGARPVRQPLRRFDEEKRRVIGEEIHKLMAAGFIKEVFHPEWLANPVLVRKKGGKWRMCVDYTGLNKACPKVPYPLPRIDQIVDSTAGCETLSFLDAYSGYHQIRMKESDQLATSFITPFGMYCYVTMSFGLRNAGATYQRCMNHVFGEHIGRTVEAYVDDIIVKTRKASDLLSDLEVTFRCLKAKGVKLNPEKCVFGVPRGMLLGFIVSKRGIEANPEKIAAITSMGPIKDLKGVQRVMGCLAALSRFISRLDERGLPLYRLLRKAESFAWTPEAEEALGNLKALLTKAPILVPPADGESLLVYVAATTQVVSAAIVVERQEEGHALPVQRPAYFVSEVLSETKIRYPQVQKLLYAMILTRRKLRHYFESHPVTVVSSFPLGEIIQCREASGRIAKWAMEIMGETISFAPRKAIKSQVLADFVAEWVDTQLPTAPIQPELWTMFFDGSLMKTGAGAGLLFISPLGKHLRYALRLHFPASNNVAEYEALDNGLRIAIELGVRRLDARGDSQLVIDQVMKNSHCRDPKMEAYCDEVRRLEDKFFGLELNHIARRYNETADGLAKIASGRTTVPPDVFSRDMHQPSVKIDDTPEPEAPSAQPKAPSAHPEGVCGSARGTLGPRGARHWTSRRSRAGPRLIEIGRPRTCNISAEESYPSTKPRLGG

SEQ ID NO: 52816 - protein, 85 aa, Zea mays
  Coding DNA Sequence Number=SeqID_11037
  Gene Ontology: Mol. function=kinase activity; Cellular component =ornithine carbamoyltransferase complex; Biological process=amino acid metabolic process
  Homolog annotation: Hit_ID=Q6QP54; Match level="QueryCoverage=79%, HitCoverage=23%, E-value=3e-13, Identity=65%"; Hit description =Putative kinase
MEPGGGTAVGAVESLLTSSCFRKGAESRRRHRVGRCGGSSEAEVESVFHGRGRAPGSGEAEVAGRGRGGVRALGSGEAEFVVFWG

SEQ ID NO: 52817 - protein, 696 aa, Zea mays
  Coding DNA Sequence Number=SeqID_11038
  Gene Ontology: Mol. function=protein serine/threonine kinase activity; Cellular component=membrane; Biological process=protein amino acid phosphorylation
  Homolog annotation: Hit_ID=Q69MP3; Match level="QueryCoverage=95%, HitCoverage=71%, E-value=1e-178, Identity=52%"; Hit description =Putative receptor kinase 5
  Pfam annotation: Domain name=B_lectin; Domain location=79-205; Score =112.0; E_value=1.8e-30; Accession=PF01453.15; Description=D-mannose binding lectin
  Pfam annotation: Domain name=PAN_1; Domain location=372-458; Score =8.2; E_value=0.024; Accession=PF00024.16; Description=PAN domain
  Pfam annotation: Domain name=PAN_2; Domain location=366-440; Score =89.9; E_value=7.5e-24; Accession=PF08276.2; Description=PAN-like domain
  Pfam annotation: Domain name=Pkinase; Domain location=556-692; Score=- 103.3; E_value=0.021; Accession=PF00069.15; Description=Protein kinase domain
  Pfam annotation: Domain name=Pkinase_Tyr; Domain location=556-685; Score=-102.8; E_value=3.6e-06; Accession=PF07714.7; Description =Protein tyrosine kinase
  Pfam annotation: Domain name=S_locus_glycop; Domain location=218-345; Score=75.4; E_value=1.8e-19; Accession=PF00954.11; Description=S -locus glycoprotein family
  Pfam module annotation: Pfam domain module=B_lectin::PAN_1::PAN _2::Pkinase::Pkinase_Tyr::S_locus_glycop; Domain location=79-205::372- 458::366-440::556-692::556-685::218-345
MEWSRPACIPVTAAAVVLLLLLLPRFCSPAGDKLTPGESLLPGETIVSDGGAFALGFFAPSNATPGRQYVGIWYNNIPVQTVVWVANRDAPVTVGDARSGNSSSSSSSAPSLALANGSASTDLVLSDAGGGRVVWTTNTTSSGTGSTAVLLNSGNFVLRSPNGTTLWQSFDHPTDTFIPDMKVGLRYRTHDGARIVSWRGPGDPSPGTFSYGMDPRTSLQMLMWNGTRTYWRSSAWTGYMTVSRYHATTGTVIYVAVVDSEDEIYMTFHVNDGAPPTRYVVTGAGRFQLLSWNRDASAWTTLESWPSRSCSPYGSCGAYGYCDNTLAVATCRCLDGFEPASPAEWSGGVFSRGCRRRSQQQALAPCGGEDDGDAFLDMPNMKVPDRFVLLGTNVSSGDECAAECRRNCSCVAYAYANLRRSSAKGDTARCLVWTADLVDAQMVGALWGVTAETLHLRVPAGFTGRKTRNKIVKIVLPVLASISLLSCIFLVWFCKTRDKTSSSESDKKLVPGSVQTSSDLAERNPTEDLEFASIRSFEKELPSIQLSDIVAATKNFSRECMVGRGGFGKVYKGTLLGGREVAVKRLSRDSEQGTEEFKNEATLISKLQHRNLVRLLGCCTEGAERLLVYEYLANKGLDAILFGTLTRLLSSELTELAEAVCNGGMLYYRRVHRMRRQREEVAAGLADEAGDNQGGG

SEQ ID NO: 52818 - protein, 267 aa, Zea mays
  Coding DNA Sequence Number=SeqID_11039
  Gene Ontology: Mol. function=nucleic acid binding
  Homolog annotation: Hit_ID=Q69MN8; Match level="QueryCoverage=61%, HitCoverage=60%, E-value=2e-60, Identity=73%"; Hit description =Putative MADP-1 protein
  Pfam annotation: Domain name=RRM_1; Domain location=56-127; Score =79.5; E_value=1e-20; Accession=PF00076.12; Description=RNA recognition motif. (a.k.a. RRM, RBD, or
  Pfam annotation: Domain name=zf-CCHC; Domain location=149-166; Score =28.2; E_value=2.2e-05; Accession=PF00098.13; Description=Zinc knuckle
  Pfam module annotation: Pfam domain module=RRM_1::zf-CCHC; Domain location=56-127::149-166
MSRRRRGGSDSDGEDNSFLYRYPLPSAAASAGVSAGGSGKPRGGGSGGLAPSKSTVYVSNLDFSLTNSDIHLLFSRFGRVARVTVLKDRESRRSRGVAFVLFVLREDAAAAAAEMHGKVLNGRTLSASIADDNGRAAEFIRRRVYRDKSRCYECGEEGHLSYECPRNQLGPRERPAPSKKSRRGGGSGGGTGGRGRGRGGEADWHSDDDEDAAAAAAFEDDRWASVVDTRGEEEKSAGKEEGKKKGKAARKEKRKGYFSDESDEDED

SEQ ID NO: 52819 - protein, 40 aa, Zea mays
  Coding DNA Sequence Number=SeqID_11040
MGVAAFNKIGGHLFYTATALNPARMLDQGTTSLPLCERKN

SEQ ID NO: 52820 - protein, 84 aa, Zea mays
  Coding DNA Sequence Number=SeqID_11041
  Gene Ontology: Mol. function=arginine decarboxylase activity; Biological process=spermidine biosynthetic process
  Homolog annotation: Hit_ID=Q6ZA98; Match level="QueryCoverage=97%, HitCoverage=39%, E-value=1e-09, Identity=44%"; Hit description =Arginine decarboxylase-like protein
MFLGGAYQEALGGLHNLFGGPSVRKDGATAAALARAFGAMPYLVFDPEAAVMSGGESSDSERSAAGAAEEEDDEEWEFMRGLTV

SEQ ID NO: 52821 - protein, 105 aa, Zea mays
  Coding DNA Sequence Number=SeqID_11042
MVLLNSRIGSRRKNVRKRKVAEEDIGDDFLSDSSEGAGSPTYDESGDSGGDDEDGDPSGPSSAARPPTHNGPGQDEQPAALRPSSKRQKKLSIKGLYMLEKVKYI

SEQ ID NO: 52822 - protein, 484 aa, Zea mays
  Coding DNA Sequence Number=SeqID_11043
  Gene Ontology: Mol. function=histamine receptor activity; Cellular component=integral to membrane; Biological process=G-protein coupled receptor protein signaling pathway
  Homolog annotation: Hit_ID=Q5VRQ2; Match level="QueryCoverage=95%, HitCoverage=92%, E-value=1e-159, Identity=62%"; Hit description =Putative hydroxymuconic semialdehyde hydrolase
  Pfam annotation: Domain name=Abhydrolase_1; Domain location=236-478; Score=46.3; E_value=1e-10; Accession=PF00561.10; Description =alphabeta hydrolase fold
MGGAAAGGGGCPGGEWGAARAKVASVLGVAGCALNCAVSFVVFSALDVLDVVLCLVYKLVDYAAEAEWKSCYCAAASGPRAAQLPLAAAPPAAGGPKVVRLSASSAKLQLEDVSDTLYVRPSLLADATRAGNGSGSGVAPALTVSPAIAELIRGKMDRAPRPPRQAPCWSDCDCKVCHAWSGSPASSSHLYVHVQAPAMAVETGGRGVHPRLHLVVRVLDGDGVPGVQPLGAVPGTGMFAVDLLGFGRSPKPAESLYTLREHVEMIERSVLRRYRIGSFHVVAHSLGSVLALALAVKYPAAVRSLTLLAPPYFPVPESESESAAQYVMRRVAPRRVWPPIAFGASMACWYEHVSRTICLTICRHHRVWDRLFRIFTRNRVRTFLIEAFMCHTHNAAWHTLHNIICGSAGRMGAYLDAVDRGLSCKVAFFHGRDDELLPVECTLAAGARVPRARVTVYDRKDHITIVVGQERLFAAELEAIWRAD

SEQ ID NO: 52823 - protein, 178 aa, Zea mays
  Coding DNA Sequence Number=SeqID_11044
  Gene Ontology: Mol. function=DNA binding; Cellular component =chromatin; Biological process=DNA integration
  Homolog annotation: Hit_ID=Q2QRH1; Match level="QueryCoverage=98%, HitCoverage=38%, E-value=1e-60, Identity=53%"; Hit description =Retrotransposon protein, putative, Ty1-copia subclass
  Pfam annotation: Domain name=RVT_2; Domain location=11-170; Score =163.2; E_value=6.8e-46; Accession=PF07727.4; Description=Reverse transcriptase (RNA-dependent
EALQDPDWVNAMHEELNNFTRNEVWTLEKPPQDARIIGTKLSKALYGLKQAPRAWYERLRDFLIEKGFKIGTVDTTLFTKKHNGDIFICQVYVDDIIFGSTNDYHCKEFGELMSKEFEMSMIGELTYFLGFQVKQMKDGNFLSQEKYTKDLLKRFNMEKCKPIKTPMPTNGHLDLDEG

SEQ ID NO: 52824 - protein, 231 aa, Zea mays
  Coding DNA Sequence Number=SeqID_11045
MESEIAKLKKAIACLTSMVDDTSSEVCAICQDACNPMPLIEVQDMNVALLTIQELVSDLENSTIDYRLRLDPPLSTEDEGAMENLWGFFERFGVMQQGGPMTFTNLLNMGDDQQQNAHVGEPLVFAQSHGEQHSASQPEKPHQCVKQFHFSVEEDKVLVSCWLNIQSKVIGHDTLVASGLVPVDYDATGNGASTPTNRPLGLLFKHVVLSSFHVVIEEKVEVITRTAKNKR

SEQ ID NO: 52825 - protein, 350 aa, Zea mays
  Coding DNA Sequence Number=SeqID_11046
  Gene Ontology: Mol. function=protein serine/threonine kinase activity; Cellular component=membrane; Biological process=protein amino acid phosphorylation
  Homolog annotation: Hit_ID=Q8LN36; Match level="QueryCoverage=82%, HitCoverage=63%, E-value=1e-101, Identity=60%"; Hit description =Putative receptor-like protein kinase
  Pfam annotation: Domain name=Pkinase; Domain location=90-323; Score =27.9; E_value=3.2e-10; Accession=PF00069.15; Description=Protein kinase domain
  Pfam annotation: Domain name=Pkinase_Tyr; Domain location=90-319; Score=25.7; E_value=4.8e-14; Accession=PF07714.7; Description =Protein tyrosine kinase
  Pfam module annotation: Pfam domain module=Pkinase::Pkinase_Tyr; Domain location=90-323::90-319
MPPLPPPANKDAEEAAARWRPASFEQPPIQAIKAEQKAPLILAEHFANSTSGESTASDQGGSDAEVPEAARRGWGRRYTRREMEEATGGLAAANMVGEGGYGVVFRGVLRDGTAVAIKNLHNNRGQAEKDFRMEVQTIGRVRHKNLVSLLGYCSEGACRLAYLHEGLEPKIVHRDIKSSNILLDRQWSAKVSDFGLAKLLCSERSYVTTRVVGTFGYVAPEYAETGMLNERSDVYSFGVLAMEVMTGRTPVDYTRPADEIAAALLSSGEPGGVAERMVADRRVEEVLDPRLPEPPPSKALKRAVLAALRNSSSRGICLLGSRIATNANTAGDGWEAGQQSGTGTGHWEGC

SEQ ID NO: 52826 - protein, 86 aa, Zea mays
  Coding DNA Sequence Number=SeqID_11047
MISGSFILLNRELQGRTANEYVEAGTMGIEFTIGGDDSATRHPWTQAKAEQAVYQGRCKGGEEPSNHLNMVDNKVIACGQGCPTQQ

SEQ ID NO: 52827 - protein, 140 aa, Zea mays
  Coding DNA Sequence Number=SeqID_11048
  Homolog annotation: Hit_ID=Q9SF35; Match level="QueryCoverage=29%, HitCoverage=29%, E-value=1e-15, Identity=90%"; Hit description=40S ribosomal protein S23-1
  Pfam annotation: Domain name=Ribosomal_S12; Domain location=5-115; Score=25.6; E_value=6.4e-07; Accession=PF00164.15; Description =Ribosomal protein S12
MAQNIAILLLVLNVIKKRSATCSVMAIEKIKSARNKSSQGSDIETKQPNSTIRKCARVQLVKNGKKIAAFVPNDGCLNYIEENEGHCGAARFFPYDNCVDMRSTGTNKGETVRRTYSCYMNSTGVLHGWILFVAFLENGK

SEQ ID NO: 52828 - protein, 201 aa, Zea mays
  Coding DNA Sequence Number=SeqID_11049
MWRSARYDFLQSKEEVMLGISVPLREQRCRPSKKAVGRGDESEAVEGLVTVVVAEVVERLVAAVKQVKGFEAGGGGGKKLGRAVGHNVISDSCQMDIRDFNPSADARTVSLHLAQARRRPRAAAARGLLAPPKPLLATARPAPTRPTPPEHEPVAASVTVHDAAGATPMQPTPAPASAPAPDATDARPDPVGARFTSSTSG

SEQ ID NO: 52829 - protein, 59 aa, Zea mays
  Coding DNA Sequence Number=SeqID_11050
MADNLEVIRPVYCHAIFEGANPNLGGTIPILNPVCHQVIDRVFHYVDDGYSRAATVYNC

SEQ ID NO: 52830 - protein, 443 aa, Zea mays
  Coding DNA Sequence Number=SeqID_11051
  Gene Ontology: Mol. function=transferase activity; Biological process= paclitaxel biosynthetic process
  Homolog annotation: Hit_ID=Q8S7Z4; Match level="QueryCoverage=93%, HitCoverage=96%, E-value=6e-58, Identity=37%"; Hit description =Putative 10-deacetylbaccatin III-10-O-acetyl transferase
  Pfam annotation: Domain name=Transferase; Domain location=17-430; Score=94.7; E_value=2.8e-25; Accession=PF02458.6; Description =Transferase family
MHGEASAQRNEWTAGTVVITKASPVVVRPSELELGRTPTPTLPAGDYTTVPLSSFDRRVPPMPATSLLVFERTINEPIETIKRALSRVLAHYRPMAGRLDGAGGIACTDEGVTFVGAAASCALKEATTTALQEMDLAVCYPGLLCRDADPLLLVQVTEFACGGFVVGVTSNHVAADGLGMAQFLQALGELARGTWPPSCIPVRSWDESLPVSSAIPAAKGSMEHHEPQHLATLDIVIPSDLISRIKADGCCSVLDAVMAVLWRCRTRATMSPGDAESPAPLKFACNMRAHAGAPAGYYGNCIRVQVVPATAVVVASSGIGHLVGLIRRAKEKVPDLLSTPGSGAAADHQGHQAAPPTSSLWYETFTVTDWRNLGLDTVDFGSGPPERVLLRHDRRAMVPGCVVCPPRRARRHGCDGVVVSSKFVKPQHVDALLAELAALATSG

SEQ ID NO: 52831 - protein, 71 aa, Zea mays
  Coding DNA Sequence Number=SeqID_11052
MVTSGLMVGESEPGCGLCPSLSLKDFHHQGWGGECAELSCSVPGLQTRVASEPLAAPAPATAAGRVLPPAR

SEQ ID NO: 52832 - protein, 202 aa, Zea mays
  Coding DNA Sequence Number=SeqID_11053
  Homolog annotation: Hit_ID=Q6Z1P7; Match level="QueryCoverage=50%, HitCoverage=24%, E-value=4e-42, Identity=77%"; Hit description =Carboxyl-terminal peptidase-like
  Pfam annotation: Domain name=DUF239; Domain location=2-130; Score =84.5; E_value=3.2e-22; Accession=PF03080.5; Description=Arabidopsis proteins of unknown function
MKVSLELYGESRPRLFTYWTSDTYEATGCYNTLCPWFVQMSSRIAIGASISPVSSAGGAQYNMTLLVWKDPKLGNWWLSYGDQLVGYWPAQLFTLINSNNTISSPDVGCGHPSVASQVEVGLLWLEGRGDKWIGRWEGVVAGAEEVKEGLAIGEEYGWKTIRPPNNPVRPWTNANAVARHRWLHHRSFGGLDGVGSIACADE

SEQ ID NO: 52833 - protein, 248 aa, Zea mays
  Coding DNA Sequence Number=SeqID_11054
  Gene Ontology: Mol. function=Rab GTPase activator activity; Cellular component=intracellular; Biological process=regulation of Rab GTPase activity
  Homolog annotation: Hit_ID=Q84Z87; Match level="QueryCoverage=81%, HitCoverage=23%, E-value=1e-24, Identity=40%"; Hit description =Putative microtubule-associated protein
MEAGRVGLGTRSGSGERSLRENKREAAVADWELRLDEGNPCPTPDNPGKSLLVVSCTWRTVLVSLHCTCPNNGTALKESDIKSLSYKRSLKQSLSQRLGLSRTESNPSPVKVVSVNNDTENSVRRCLLNSYLHKVVQSSEVIGKFEQDKFPIVSIHKEIVLSFERSSQLKIKADNENLIVTPPSVAKFSPHINSPVKHNDESSAERTDACCSGKNSLVLYTARAGNEHENCHDNDSEDKYYFKFMCRR

SEQ ID NO: 52834 - protein, 443 aa, Zea mays
  Coding DNA Sequence Number=SeqID_11055
  Gene Ontology: Mol. function=unfolded protein binding; Cellular component=prefoldin complex; Biological process=protein folding
  Pfam annotation: Domain name=Prefoldin; Domain location=28-126; Score= 17.2; E_value=0.0013; Accession=PF02996.8; Description=Prefoldin subunit
MAAPRKGTATPLGTVFSPEETKRAVARVAESVAGRRAELARLQGFAADNAALVSLVNRLPDELSHDIMVLLGEGYYAERSAKQTTNILHRRGQELEAQVEAMKATIADLEAEAKFFEFTATEASEGLVEIREEYDEDLETNSSRSEASVATVVMSDKDREHARIMARLDELEREEKDAGSACEDDNDGDDDDGDAGTSDDGEENKESGNALSDVNEDYSSGFGASFSGSGGNDRSHGNIKSALKKPGGDEMLIGISHKPSSHTSHLAFPGQTSATNSDVRVHTKAVTFEDDKYVVSSSKSPPLLLDSIQSDPVLKNSSDPALSRDRKIISSGRKAFTGSIIEHDDNVSTIEPSVASSLAKPGTCASSRPVSRFKMQKGGRITGRPSIALVSHCTQSLSANKQSVMTWSVAADERREVSRAAAGGVSSRSLGGAVEHQIVSLTG

SEQ ID NO: 52835 - protein, 291 aa, Zea mays
  Coding DNA Sequence Number=SeqID_11056
MTMVPTTRNLLHHDGVKSSRGRSCYHPGQYYVGIAAQLEDQSSNPSTRFPRPLATMVVDDDEAAAAGTRSSSSPGAAAAAGNDDEEGDCWLQLGLAAASSSASSSSSGDNNITAPDPGPAPPPPVEEGLYLLAYDNKRNASARPPPLFPLPLRSYHVDQSYGGDRGRYRPAAEASGSAMSAPLAPPPPFIRCSGGAAIRVVSPPRRTEAPGGLWLTLRAAPNQIREPVLPQIAKSYLRINSINRILKPYALFGVACIEHRPTTRNTHDNNSCEPEYLTIKGLFGSEWNEGD

SEQ ID NO: 52836 - protein, 525 aa, Zea mays
  Coding DNA Sequence Number=SeqID_11057
  Gene Ontology: Mol. function=transferase activity, transferring nitrogenous groups; Cellular component=endoplasmic reticulum; Biological process=biosynthetic process
  Homolog annotation: Hit_ID=Q8RYL0; Match level="QueryCoverage=91%, HitCoverage=90%, E-value=0.0, Identity=82%"; Hit description =Putative serine palmitoyltransferase
  Pfam annotation: Domain name=Aminotran_1_2; Domain location=116-485; Score=195.8; E_value=1e-55; Accession=PF00155.11; Description =Aminotransferase class I and II
  Subcellular localization annotation: CTP_CleavageSite=45; ConfidenceScore=5.37e-01
MGEGSPYVTRAHHASSATASYFAFGPAPRLLPQDPRRPQAPATSRATRRSAWDSRIFYTRRLYLRIQVSLLTYNLNFHDRTALARPIASAPDAWFDVVERYSNDCNKTLHRTTATTKCLNLGSYNYLGFAAADEYCTPRVIESLKKYSASTCSVRVDGGNTKLHTELEELVARFVGKPAAILFGMGYVTNSAIIPALVGKGSLIISDSLNHNSIVNGARGSGATVRVFQHNNPAHLEEVLREQIAGGQPRTHRPWKKIIVIVEGIYSMEGELCKLPEVISVCKKYKGLIYLTYEQAYTYLDEAHSIGAVGKTGRGVCELLGVDPADVDIMMGTFTKSFGSCGGYIAASNEIIHHLKHTCPAHIYATSMSPPAVQQVISAIKVILGEDGTNRGAKKLAQIRENSNFFRSELQKMGFEVLGDNDSPVMPIMLYNPAKIPAFSRECLRQAVAVVTVAFPATPLLLARARICISASHSREDLIKGLEVIELNLMPTLQVISKVGDLVGIKYFPVEQEKTTAVENLKKIQ

SEQ ID NO: 52837 - protein, 197 aa, Zea mays
  Coding DNA Sequence Number=SeqID_11058
  Subcellular localization annotation: CTP_CleavageSite=38; ConfidenceScore=5.23e-01
MAAFSPGRRPSPPLRLAGHFPNRFPSPAVDDGFLPRPVASTASLPSWQLPQLLPQLGGLHCPTQPPHAADPLTIGATALPRPHFPWSADSAHSHAPLPRHNRLHDFHFAWDSTQSMKIISEHVRCVRPSPLCTSTRVCQSRSSSPESVDDRDTLDIPTTTPRKTRTTRVTESKDDCKASQRAVRSSGVQFYGLYDLW

SEQ ID NO: 52838 - protein, 105 aa, Zea mays
  Coding DNA Sequence Number=SeqID_11059
  Homolog annotation: Hit_ID=Q7XIK7; Match level="QueryCoverage=51%, HitCoverage=4%, E-value=4e-09, Identity=63%"; Hit description =Putative guanine nucleotide-exchange protein GEP2
MAADVGVVMISAWFVSFQIASKGATAEGAVITKALGSAGRVLDGPQAELVPGAAATRLAVETKHVKLVESALNCLHASVLKLAQSTTFSVNWPLAHEQTGCFMLY

SEQ ID NO: 52839 - protein, 84 aa, Zea mays
  Coding DNA Sequence Number=SeqID_11060
  Subcellular localization annotation: CTP_CleavageSite=14; ConfidenceScore=5.05e-01
MPLPAPSSPPSTPSCAMPPASAPAIRTGPLAHDVEQIATVLFQKKQGGTKENNIVRLWRCHGDSEGPEQDGAASVMKVVKSGVT

SEQ ID NO: 52840 - protein, 253 aa, Zea mays
  Coding DNA Sequence Number=SeqID_11061
  Gene Ontology: Mol. function=oxidoreductase activity; Cellular component=mitochondrion; Biological process=metabolic process
  Homolog annotation: Hit_ID=Q942W0; Match level="QueryCoverage=99%, HitCoverage=100%, E-value=7e-69, Identity=55%"; Hit description =Putative tropinone reductase homolog
  Pfam annotation: Domain name=KR; Domain location=20-185; Score=-60.6; E_value=0.00076; Accession=PF08659.1; Description=KR domain
  Pfam annotation: Domain name=NAD_binding_4; Domain location=23-205; Score=-85.3; E_value=0.0042; Accession=PF07993.2; Description=Male sterility protein
  Pfam annotation: Domain name=adh_short; Domain location=19-168; Score= 32.2; E_value=4.2e-08; Accession=PF00106.15; Description=short chain dehydrogenase
  Pfam module annotation: Pfam domain module=KR::NAD_binding_4::adh _short; Domain location=20-185::23-205::19-168
MAAAAGIRSREERWSLAGKTALVTGGSKGIGRAIVEELAGFGVRVHTCARTAADLDERLRAWAADARLPGRVTASVCDVSARGDREALVAAARAELGPRLDILVNNAGQSTFRAATETAAGDYARLMATNLESCFHLAQLAHPLLLAAGAGAGAGAAVLTRSLAAEWAGDGVRVNCVAPGGVQTDMFSSVALEMDPDPETSLRMMEAELARVPLRRFGETEEIASLVAFLCMPASSYITGQVICADGGRTIAA

SEQ ID NO: 52841 - protein, 369 aa, Zea mays
  Coding DNA Sequence Number=SeqID_11062
MALRALDNTKPAAVEERPKKVAKVGVPAAAAKAAASPGSGGKKKKGNDENSAPRATAAAAEQAVEYISSEELEAAASPKAKAAGLVADLDSKDWVRTCEALNDARRLAIHHPALLNPILELPGFIRVADPSVGREKVVLAVVKTMKSPRSAVLKTSIMACADIFSSFGNLLASVSDDAFDKLLLQLLLKASQDKRFVCEEAEKATRAMAASMPPLPLLKKLKAYVHHANLRVRAKAAVAISHCAARMVRHATPRHAQEGRNSCSSVCPFQRLRFSFVAGAQDIGAMKEFGMSALLQLAVELLNDRLPEAREAARGVVASTHAAFVKEAAASGQEDDAAASWESLCALSLPPISAQAVAKIAAAAAASSQ

SEQ ID NO: 52842 - protein, 472 aa, Zea mays
  Coding DNA Sequence Number=SeqID_11063
  Gene Ontology: Mol. function=acyltransferase activity; Cellular component=integral to mitochondrial outer membrane; Biological process=metabolic process
  Homolog annotation: Hit_ID=Q1SFZ6; Match level="QueryCoverage=90%, HitCoverage=90%, E-value=1e-105, Identity=52%"; Hit description =Phospholipid/glycerol acyltransferase
  Pfam annotation: Domain name=Acyltransferase; Domain location=118 -265; Score=80.7; E_value=4.5e-21; Accession=PF01553.11; Description =Acyltransferase
MAAGGGAPWAERARVVGTQIRNRFRVAPVDHRSLWLRADGRVATEAVRRWSDRVRALLQRGRSADRNSTSTDTSPEAVAKPSSSVFEILQKESSGILAKKRTLDYSVLLVPFSLNSEDVQVYGVEKLHQALHGRPKGKALLTVSNHVAAMDDPFVIASLLPPSVMLEAQKLRWTLCATDRCFTNPVLSTFFRSVKVLPVSRGDGIYQKGMDMALSKLNSGGWVHIFPEGSRSRDGGKTIAPAKRGVGRLVMDADSLPVVIPFVHTGMQDIMPVGKRIPRAGKRVIVVVGDPINFDDLLIDNCGDTQDIPRGILYDKVTQRIGQRLQELKVEVDRLAAEQEPELQNHNVGDDGYRLWQQVDWEGFGIGSSMLPSEPSAAAQVPSREAEPEPHVEVEQSVSPAPSAATSYNVAVPHWFQRHADPSELMGFASRGLIKHGKFLEEGYREFQQSATTLHTFWVSRANNAAHRWSTA

SEQ ID NO: 52843 - protein, 270 aa, Zea mays
  Coding DNA Sequence Number=SeqID_11064
  Homolog annotation: Hit_ID=O48888; Match level="QueryCoverage=47%, HitCoverage=32%, E-value=5e-61, Identity=95%"; Hit description=ATP sulfurylase
  Pfam annotation: Domain name=ATP-sulfurylase; Domain location=2-266; Score=58.5; E_value=8.5e-18; Accession=PF01747.8; Description=ATP -sulfurylase
MEDVMLGAAPLPVLDMTKKCSRSSAIRIIKRVSRSVKLRLGTGGTTERIISALHTVLSEQGDEDDDLKKCKTSMCHVGKMQKDVDSACSKDSEEATKKFEHIVRLMNEELAHFQEQKTADIGLAFHEFAKGVLNPESTVVAIFPSPMHYAGPTEVQWHAKARINVGANFYIVGRDPAGMSHPTEKMDLYDADHGKKVLSMAPGLERLNILPFKVAAYDTKQKKMDFFDPSRKDDFLFISGTKLGAIRGQQQDARASCSLKYGKRKRFFAT

SEQ ID NO: 52844 - protein, 128 aa, Zea mays
  Coding DNA Sequence Number=SeqID_11065
  Gene Ontology: Mol. function=translation initiation factor activity
  Homolog annotation: Hit_ID=Q5JMI2; Match level="QueryCoverage=94%, HitCoverage=50%, E-value=4e-11, Identity=32%"; Hit description =Eukaryotic translation initiation factor 2B family protein-like
  Pfam annotation: Domain name=DUF567; Domain location=2-120; Score= -30.7; E_value=0.024; Accession=PF04525.3; Description=Protein of unknown function (DUF567)
MPALLCMQSFCMFRRWEACRCLDDDGEDARPWFRVHKTWKHGCGAGAAADVVTMHGGGRTYEIEGSSRKSDYRIRGADGAIMAAVGRKRTASGVVLGDDVLTLTVGSGTDHLLALSLVVVCGIMNRRL

SEQ ID NO: 52845 - protein, 169 aa, Zea mays
  Coding DNA Sequence Number=SeqID_11066
  Subcellular localization annotation: CTP_CleavageSite=51; ConfidenceScore=5.02e-01
MGLGRWGNLLTAGDVVVPVTGQVCHRRPIRGRCHPQQPWRSCLRPRLTQVRALLVSLLSFLSDHPLRDHLITVVSAFASALTAPISRDHEGLHLAASSTCSSSPPTAPTTRSTTSCALACDALRTLDAALPGLLAEVLGHLSALAGQAILPPPARLRRTPCRVPQEARL

SEQ ID NO: 52846 - protein, 523 aa, Zea mays
  Coding DNA Sequence Number=SeqID_11067
  Gene Ontology: Mol. function=oxidoreductase activity; Cellular component=integral to membrane; Biological process=electron transport
  Homolog annotation: Hit_ID=Q84S04; Match level="QueryCoverage=95%, HitCoverage=96%, E-value=0.0, Identity=74%"; Hit description =Putative cytochrome P450
  Pfam annotation: Domain name=p450; Domain location=43-512; Score =249.0; E_value=1e-71; Accession=PF00067.12; Description=Cytochrome P450
MEDWLFYSLTTLLCLLCSLILRARTPGKKARNADSSSPLPPLPPGPTPLPVLGPLLFLARRDFDIEPVLRRIARDHGKVFTFAPLGRARPGIFVADRGAAHRALVQRGAAFASRPPSTASSAVLTSGGRNVSSSPYGATWRALRRNLASGVLNPARLRAFSPARRWVLGVLARRVRADGRHGEAPVAVMEPFQYAMFCLLVHMCFGGDRLGDDARVRDIEATQRELLGSFLSFQVFSFLPWVTKLVFRRRWEKLVSLRRRQEELFVPLIQARREAGGDGDSYVDSLVKLTIPEDGGRPLTDGEIVSLCSEFLSAGTDTTATALQWILANLVKNPAMQDRLRDEVSSAGAGADGEVLEEELQAMPYLKAVVLEALRRHPPGHYVLPHAVHEDTTLDGYRVPAGAPVNFAVGDIGMDEEVWRAPAEFRPERFLPGGEGDDVDLTGSKEIKMMPFGAGRRVCPGMALALLHLEYFVANLVREFDWRQADGEEVDLTEKLEFTVVMKRPLRARAVPLRPPPPAVAAA

SEQ ID NO: 52847 - protein, 89 aa, Zea mays
  Coding DNA Sequence Number=SeqID_11068
  Gene Ontology: Mol. function=oxidoreductase activity; Biological process=electron transport
  Homolog annotation: Hit_ID=Q6Z351; Match level="QueryCoverage=91%, HitCoverage=7%, E-value=4e-23, Identity=58%"; Hit description =Putative aldehyde oxidase-like protein
MLRACSVYEEYTTNNDGLMISNSTWDYKIPSVDIIPKQFNAEVLNTGYHKNHVLSSKGSYPSGEGGVCGQQSSGRSPLEFQMDVPAPMK

SEQ ID NO: 52848 - protein, 56 aa, Zea mays
  Coding DNA Sequence Number=SeqID_11069
MTAVSGWDDESVLLDVMVAEATLACESHRKRQASTCSNDDGTGSNTKYGDTVDRCT

SEQ ID NO: 52849 - protein, 426 aa, Zea mays
  Coding DNA Sequence Number=SeqID_11070
  Subcellular localization annotation: CTP_CleavageSite=37; ConfidenceScore=5.09e-01
MQPRYSVSHPRARPLHGARLPPPPRRRPHVVALAQPDAAAHASISVVHLPTHCSSSASPSPALGAAAATRPRQAAVGTRVAAMRTTASVSHAHAASLPVATAIGDGSRSENESAVKKRDYNTVIKGQGDAGQDLETMWVGREWDGREIQAGKGKQVKKKGGARTRDVVHLPTGRLLGAVVVGIFAVAGDGSAPPSSHQPLSPHEKAQAKAKAKPPPPSSPLLSSPFLSTLWQPKARPRSCARRMPSRSMSRLSVESASGSGGGGCREAEPVLCAPRPRRAQQQLVHVHPRGADLILGPPPFLLNESSEEGRCSWAAFGGGSPPARAGNPLVHDPSFLLSQRHPAADPPLELGFFDHLIRTSSYVHRPTPTTSYTSTSSSGSSSKSSFGPSSFAPAVRIQGFDVAACRSSHSGGGGAGGRVLSAARA

SEQ ID NO: 52850 - protein, 183 aa, Zea mays
  Coding DNA Sequence Number=SeqID_11071
  Gene Ontology: Mol. function=DNA binding; Cellular component =mitochondrion; Biological process=DNA integration
  Homolog annotation: Hit_ID=UPI00004C1731; Match level="QueryCoverage =95%, HitCoverage=12%, E-value=1e-93, Identity=92%"; Hit description =UPI00004C1731 related cluster
  Pfam annotation: Domain name=rve; Domain location=2-149; Score=95.7; E_value=1.4e-25; Accession=PF00665.16; Description=Integrase core domain
MADATRIKAPGGFSHLLVAIDKFSKWIEVRPLTSIRSKQAVAFFTNIIHRFGVPNSIITDNGTQFIGKKFLDFCDDHHIRVDWAAVAHPMTNGQVERANGMILQGLKPRIYNNLNKFGKRWMKELPSVVWSLRTMPSRATGFSPFFLVYGAEAVLPTDLEYGSPRTRAYDDQSNQTSREDSLD

SEQ ID NO: 52851 - protein, 139 aa, Zea mays
  Coding DNA Sequence Number=SeqID_11072
MRSALHGTATWVELSLARGAALAEAFLPRGLRVTEAEIPPHGDLVAPRILVGPAILRRHKYCAADPPCVVSGAPLRVVRGESAPNLFALISAANNVLRIRIWGAAPWVAGAVGGTPLCGVSVPSVGGAKVADRLLTVDA

SEQ ID NO: 52852 - protein, 438 aa, Zea mays
  Coding DNA Sequence Number=SeqID_11073
  Gene Ontology: Mol. function=nucleic acid binding; Cellular component= beta-galactosidase complex; Biological process=DNA integration
  Homolog annotation: Hit_ID=Q7XBC6; Match level="QueryCoverage=99%, HitCoverage=27%, E-value=0.0, Identity=70%"; Hit description =Putative copia-type pol polyprotein
  Pfam annotation: Domain name=RVT_2; Domain location=1-255; Score =515.0; E_value=8.3e-152; Accession=PF07727.4; Description=Reverse transcriptase (RNA-dependent
MQEELNNFKRNEVWTLVPHPKQNVVGTKWVFRNKQDEHGVVTRNKARLVAKGYAQVADLDFEETFAPVARLESIRILLAYAAHHSFRLYQMDVKSAFLNGPIKEEVYVEQPPGFEDERYPDHVCKLSKALYGLKQAPRAWYECLRDFLIANAFKVGKADPTLFTKTCDGDLFVCQIYVDDIIFGSTNQKSCEEFSRVMTQKFEMSMMGELNYFLGFQVKQLKDGTFISQTKYTQDLLKRVGMKDAKPAKTPMGTDGHTDLNKGVATPCFEIWYPKGSNFDLIGYSDSNYAGCKVDRKSTSGTCQFLGRSLVSWNSKKQTSVALSTAEAEYIAVGQCCAQLLWMRQTLPDFGYNLSKVPLLCDNGSAIRIAENPIEHSRIKHIDIQHHFLRDHQQKGDIEVFHVSTENQLADIFTKPLDEKTFCRLRSELNVLDSRNLD

SEQ ID NO: 52853 - protein, 87 aa, Zea mays
  Coding DNA Sequence Number=SeqID_11074
MDQMVRDEEVDDLGDLDSTLPEASLPEASGVDLAPPSDPGKGPSLTLAPTGDGEDPAPAPTPTGEDALEWLSRLRKTPRPRPGLRSG

SEQ ID NO: 52854 - protein, 128 aa, Zea mays
  Coding DNA Sequence Number=SeqID_11075
MAGEPGNQREATMGAGAQAARDRAGGKKSARIGRRPWPWARQADAVGEEQTREQPYESSSTSMRGQREQACQGLGPGARCWELGQARLEKGKAKRTPWEQGRRGSKDAEARHGELGMTHSVGRKKSAR

SEQ ID NO: 52855 - protein, 187 aa, Zea mays
  Coding DNA Sequence Number=SeqID_11076
MKRDLRPSLGDDFSRSCFFVERAGLSQGHGGKSLELDAGHGDQGRDEQRRSAELHKQRSMASKLGNQREAAMGAGVQAARDRARGKKSVRVGRRPRPWAQQADGVGEEQTREQPSESSSASMRGQREQARRGPRPGVRCWEIDRARLEKGKAKRMPWEQGRRGSKDVGARHGELGMTHSAGRKKSAR

SEQ ID NO: 52856 - protein, 122 aa, Zea mays
  Coding DNA Sequence Number=SeqID_11077
MMVTALPKLPATTGTPRKRRMASVLEAILESGKTLPPSSAEVSGSKTEDVSEMITARTSTHAEAGPSETALENIVKESIPEKPLAPAPKAPSRSDLNFIIRHGSGNNYQQSKSPKRNIMLKS

SEQ ID NO: 52857 - protein, 272 aa, Zea mays
  Coding DNA Sequence Number=SeqID_11078
  Subcellular localization annotation: CTP_CleavageSite=40; ConfidenceScore=5.22e-01
LHLHQHARDPARTCPKNVKAAAPRPASLPGGVRPPLGPLRSPAACGPPLGTLLGPSPAAPGLPTRPTPPGLPPRRRAAHAQPPAAALGARPRLARSATVPGSPTRPTSRGLARPIPRPRRPRPPLTPARGRRSPAPTRPPAASPFPSPTPAASLAPRPSPGPAAAIPPAPARRFEYQARPRPARPLLAGSTAPGPVQPPFPPFGRPFPSRPRPTPSCRQWGSVYAARSAKVDLSLGEECGGYEIDGSGYDYGAGEDEAMEGDFQEFQDYDEF

SEQ ID NO: 52858 - protein, 131 aa, Zea mays
  Coding DNA Sequence Number=SeqID_11079
  Homolog annotation: Hit_ID=Q9LX04; Match level="QueryCoverage=43%, HitCoverage=9%, E-value=4e-22, Identity=86%"; Hit description =Putative Bplo
MNVSTDVARLNPQGSFHYGSINVSQVYKLRSEPPVIINGKKRTTKSGISYSPPDTPLRRGSDLGAIHVQRGFDLGADLPFMFSARAAERRGIDGGVGVAGGIKLPDLAADVVVLLAKARVATFSVIRKRHG

SEQ ID NO: 52859 - protein, 94 aa, Zea mays
  Coding DNA Sequence Number=SeqID_11080
MEPYDTQMGLMASRAFSGVQNICTRTPKKKSYKDLLVILTRDHCFDAKDGKETKKQEPGLFNNVIESLRRGRCYEKESLYRFCVYARLEKLALY

SEQ ID NO: 52860 - protein, 122 aa, Zea mays
  Coding DNA Sequence Number=SeqID_11081
MARGNQIAEKGCGKHKVTQFGSCTLTPKTGKASVKDEDVNETALMHVSLESIGCGLIEEFLACECDRSTLSGMWARSPGGLCLKSVALGKDIKVLSLAFVVNLNGREGFAFVSEVENCHTRF

SEQ ID NO: 52861 - protein, 135 aa, Zea mays
  Coding DNA Sequence Number=SeqID_11082
  Subcellular localization annotation: CTP_CleavageSite=57; ConfidenceScore=5.18e-01
MAEGAKIWVPSMGAAAAACGSSARGGRRQGGRSATRHGQQREGGRDGRDGSLELGFLLAAVWEDCCAREKKTGRREGHHGREQRYPCPWRSLYAQGNSRGKGSSAMDAGGARLGMEHGEGAGFHGEEGRPTMGGR

SEQ ID NO: 52862 - protein, 300 aa, Zea mays
  Coding DNA Sequence Number=SeqID_11083
MPVLNKRDPISSTDLKINDTEPLVEPVSYALITTVLYAIDDTCSFSVERMYQTTPSRLFHDLWTSCCLQPHDVQTQPTAPFSILSHLPTNRRSPLSPKGTPTILRLQDRPNLAILARTRQPEASKVTAEGRTDLDVKRRVNRTEDNWDNGHRWTCGGAQNHPGELSRRCLSPFRPQNPIDDFMAGECSLRVTATTDGFPGVNRPHGLEKWRGRKGRCSSSNNGTSAPDAQQRRRGGSCSHPLESAPPFRATATDLWSAGGLRARGSEMRAPPADAAFSYEDEEAYCWRGTHAIVRACGGE

SEQ ID NO: 52863 - protein, 330 aa, Zea mays
  Coding DNA Sequence Number=SeqID_11084
  Subcellular localization annotation: CTP_CleavageSite=10; ConfidenceScore=5.44e-01
MAPPVAWSVRALGRARRRPLRGQGRVSLPRSRPSPSPWVGQGGDRRLRPGLSPSPGVGRGGVRRLPGPSLSPSPRVGRGGVRRLPGPSPSPSPGVGRGGASYGARGRTWLLSASLCRVAQQSERRRRCCPLVRPSVVVVIWPRLLLGEDWASGEPKEGKFIRHQQTEMNPPNPPLVGIDQVVATQMMVIQQMANMVNEMKNQIRQERQEIQQDRLEIRQEIRQARLERQQQQRPLPPPPPPAPPSYINIYIYIYITTIFNQVITCERQMPLSWGSHGSGEDFFFPAWAPESGESAVFVESDRNFGIQLASGSIYKSAGLILVDAIGSLAA

SEQ ID NO: 52864 - protein, 118 aa, Zea mays
  Coding DNA Sequence Number=SeqID_11085
  Subcellular localization annotation: CTP_CleavageSite=75; ConfidenceScore=5.41e-01
MPVAPTRPPPSRTSPAHAGFRPAVVPLSNYYALKNKTTTDRLGAKTPWTTVHILVFVVVSFSIIRLRDRDCSVASGSRVSSISLREQMEYQRQQAEYQKKDEYCSNLQAHNQAMLSLS

SEQ ID NO: 52865 - protein, 73 aa, Zea mays
  Coding DNA Sequence Number=SeqID_11086
MALASPLRRTTSTLPGAPSPHANWCNEIHEEHRINKGHVTTNPGDRSSTHGAAWYGDSREFPILGLIEMGRLC

SEQ ID NO: 52866 - protein, 127 aa, Zea mays
  Coding DNA Sequence Number=SeqID_11087
MPALHASSVGYEGLLLPSSLPFTTKAVREKQSERRAASTALGISPAPRLYVCPLGSPQHLAGGGIGVGHKVKHHRGNSSQPWTLAVILIATNFFPQFWTLDESATEDPGVQEVETVEQELVESKLCP

SEQ ID NO: 52867 - protein, 97 aa, Zea mays
  Coding DNA Sequence Number=SeqID_11088
MEKRMVEMFQYMQILGAASGFAPPPSLFPAVDPPQFHTPLGTIGGIKQPSRIVQPIAEPVKPSTSLRYFVHVILCLLVLLILYEITWSELVDVGNAL

SEQ ID NO: 52868 - protein, 38 aa, Zea mays
  Coding DNA Sequence Number=SeqID_11089
MGRLEPRAEWESRLVGKCSGGEAGNMDDFEEFEEYDEF

SEQ ID NO: 52869 - protein, 114 aa, Zea mays
  Coding DNA Sequence Number=SeqID_11090
MAGIAEQRGRTAMMAAAHILPTPSTRVPSIMVGAIKGGSREATRGWKESVLGSARPRDTRVGMGQQREGAIRGGRREATRGWKEPVLGSSPSPAGYARGHGAAAGFLLGDVRME

SEQ ID NO: 52870 - protein, 150 aa, Zea mays
  Coding DNA Sequence Number=SeqID_11091
  Subcellular localization annotation: CTP_CleavageSite=34; ConfidenceScore=5.11e-01
MTRTPSGNSDVKRQPEMHFVTRRPYTASNGSCIVGSPVSNQEGVRNLSPSWEEPFKGRAGSSQTLSSRNSPERLASNSGHLNMCAIAERPSPRLPTGGDDEAIKAKELGAWRQAALVVWSAATTPLHQRRRPPQHEHHGNEALAPALLRG

SEQ ID NO: 52871 - protein, 131 aa, Zea mays
  Coding DNA Sequence Number=SeqID_11092
TIALLVSNLREGVDGVMVLVRAQVVSQEEHLLDVPNQFHQAMDLGACRGATCALAFVQIRLGYELRDVIGLSEDVTNDALEGLEDDFGVATEAAFNLLLLKDISMVPLSHGAILGFPFLRLRDYQGTFGSQ

SEQ ID NO: 52872 - protein, 120 aa, Zea mays
  Coding DNA Sequence Number=SeqID_11093
  Gene Ontology: Mol. function=carboxyl- and carbamoyltransferase activity; Cellular component=ornithine carbamoyltransferase complex; Biological process=amino acid metabolic process
  Homolog annotation: Hit_ID=Q8SA97; Match level="QueryCoverage=94%, HitCoverage=24%, E-value=1e-36, Identity=63%"; Hit description =Ornithine carbamoyltransferase
MAPPVDVAGLRPRLGDVEAPPKPRSSMSSVAEVESEPWGRAERSLSSSGAEPESEPWVGRSGVRRLLGLSPSPSPGSGGAEFAVFRDLARLYADGGYQLRIRSLEGTPNYGPRQEHLDWN

SEQ ID NO: 52873 - protein, 140 aa, Zea mays
  Coding DNA Sequence Number=SeqID_11094
MDALGFEYLDYEKLNEEAKGLKRKRVITPTTADEGPQQAENSGGPLDTTLLEIDRLIANVVPGKNTEGAIAVEISAPKEKELKKALWKTKVLIFDTWAANSSVDEEILGCICGRAEAKIVSTLSKAMLMKADELKLTLTL

SEQ ID NO: 52874 - protein, 81 aa, Zea mays
  Coding DNA Sequence Number=SeqID_11095
  Subcellular localization annotation: CTP_CleavageSite=42; ConfidenceScore=5.10e-01
MEMKKVACAVLAAAASATVVLAAEAPAPAPTSASSAAFPAVGAVLGASVLSFFAYYLHFIFMAIDFFLYSDFQNRGLYWRG

SEQ ID NO: 52875 - protein, 83 aa, Zea mays
  Coding DNA Sequence Number=SeqID_11096
MGITAAREHQRALHTARRANSGAGQLRRTIGRDGVTVAELQLRKDRSGERGPGNPERGRAHRRVSRAANGEAKLTEAKDGARR

SEQ ID NO: 52876 - protein, 44 aa, Zea mays
  Coding DNA Sequence Number=SeqID_11097
MALNFFLVSSLLLACWAPGDFPCLIRVVYGVVNYFTTPASRLMK

SEQ ID NO: 52877 - protein, 243 aa, Zea mays
  Coding DNA Sequence Number=SeqID_11098
MTPPELQHNSEMESYAEALVGNMDGGGRWSGEDETGRGSSTGSRGGRTNGQGSLMNHIGFRRPNFEARRGGYNRFGRGHRNNHREGMGSKNVAGSSGNNFVTGRLASCHGFHGTVTERDRIFTPLAVGDLAPRSTLASRFTPGRTQIALLGKKYRVVDNLRPLFSPAIVSRRGQSHWHHRRPLLSGQATCLAALPRRENEEEIEVEEARATPPPPPEEPQAGNCFYFDISGAEPDSQVIGVVC

SEQ ID NO: 52878 - protein, 84 aa, Zea mays
  Coding DNA Sequence Number=SeqID_11099
MHQGSLCKGYVVYPWPFTSIVKIGSVQPRLEWDHNSWKNFDYFMMMVNNVGYNSKLWYFLLEECSGGDAGNMEDFEEFQDYDEF

SEQ ID NO: 52879 - protein, 181 aa, Zea mays
  Coding DNA Sequence Number=SeqID_11100
MEERGRSSLLEEEEGRRWASLAGVLLETGVREGEEGLLLLGAELKKGKVQGGSTMGRCCEGEGRSVHGRCRGALERGWSRGEKGGRPWMEPVHGKAATNSSNGEKTSQHHGSTGNESAAALCALELGEGGIHGSFCPCAREAREEGAMERCWTSPRREEQGGGAATAPCACEHREVTVCVG

SEQ ID NO: 52880 - protein, 877 aa, Zea mays
  Coding DNA Sequence Number=SeqID_11101
  Gene Ontology: Cellular component=nucleus; Biological process =regulation of transcription, DNA-dependent
  Homolog annotation: Hit_ID=Q2R940; Match level="QueryCoverage=95%, HitCoverage=94%, E-value=0.0, Identity=52%"; Hit description=SEU3A protein, putative, expressed
  Pfam annotation: Domain name=LIM_bind; Domain location=319-717; Score= -145.9; E_value=0.00027; Accession=PF01803.7; Description=LIM-domain binding protein
  Subcellular localization annotation: CTP_CleavageSite=53; ConfidenceScore=5.41e-01
MGPGQQVGASLLRTSSSLLGGGAGAGAGGQPGMGMGVGVLPSQSPFSSLVSPRTQYGGVGGGNGLLAGASSVASMLSRQQSYGNGGTGVMPGSGAGLPIGGLQHRGGLDGVGDLVGTGGPDSMAFSSSGPGSLGNQLGVDSLQQQQQLDAPQDSQNQQEHQQQMSMTYNQQHMMSQTQQQQQPAVKLENGGVLGGVKLEQQMGQPDQSVSAQMLRSSSGGVKLEPQLQALRSLGAIKMEHQSSDPSVLLQQQQHMLQLSKQNPQAAATQLSLLQQQQRFLQLQQQQQQQQILKNLPLQRNQLQQQQQQQQQQQQQQLLRQQSLNMRTGKSAAYEPGTCAKRLTHYMYHQQNRPQDNNIEYWRNFVNEYFAPSAKKRWMFGIVRYAIGSQGEVLVETTVEVLPRLCQIKYASGTLEELLYVDMPRESQNSSGQIVLDYTKAIQESVFEQLRVVREGHLRIVFNQDLKIASWEFCARRHEELIPRRSIIPQVSQLGAVVQKYQSSVQSSASLSSQDLQNNCNSFVACARQLAKALEVPLVNDLGYTKRYVRCLQIAEVVNCMKDLIDHSRQTGSGPIESLHKFPRRGNSGVSSVQAQQQSEEQKPVPQNSNQSGQNSAPATGMQVSASGNGDATSNNSLNFAPSTSAPSSSVVGLLQGSVNCRQDHPTSSGNGLYNGGNSGPVAKANSTNSMQSNAPASFPLPAPSASNGNMMPAPQHSSQMNSPTMSSNLPPMQTPASRPQEPEPIESQSSVQRILQDLMMQSHINGVGPVGSDMRRANTITPGMNGVNSLVGNPMTNNPGINGMGFAAMGGLGQQMRTAMGNNALAMNGRTVMNHSAHDLTQLAHQQQQRDLGNQLLGGLRAANSFNNLQYDWKPAQ

SEQ ID NO: 52881 - protein, 166 aa, Zea mays
  Coding DNA Sequence Number=SeqID_11102
MTGPLLSLGGRGDSLMHVEAGRGIVEEKGLLCGCYCSLETLIRRDVVARRGQHRHGSLIACECPCNFTYLPSVSRTLEPRIWKYGAEASIIMFIRTWRTTQENSAITSVEWDALDQVIRKARERLPYLDGASREASLLEYREVPQVELSVKLIGRRDSYASFFLNL

SEQ ID NO: 52882 - protein, 450 aa, Zea mays
  Coding DNA Sequence Number=SeqID_11103
  Gene Ontology: Mol. function=DNA binding; Cellular component=nucleus; Biological process=RNA-dependent DNA replication
  Homolog annotation: Hit_ID=Q6EQL9; Match level="QueryCoverage=78%, HitCoverage=82%, E-value=3e-89, Identity=47%"; Hit description =Ribosomal protein-like
  Subcellular localization annotation: CTP_CleavageSite=18; ConfidenceScore=5.16e-01
MDPTNQRSSGAGRRSSVAATMGRGGACVHGQQHVPAPTSLRSPSLPELQQAQSAMPPNPSWNFYPPNGFLNLINQPYMPMSSQPLGENFHFVGLTQNFNTSPPPPPSAKRTKKASRLAKETIQIGGDGDAATEESKAVNKRYWAHDEEVRLASSWLNCSHDPIHGNDKKGETFWKEIAEYFNKHAPADRQRDVNQLKIHWTRLKTVTNNFNGCWSAVSKMHTSGYSDDQLMDEAQKMYANGSNGKPFTLVHWWKALRNEPKFCAQISQMIKEKGQSHTIDITKDKDQLPLQRPIGRDAAKAQRNGKRKAEEVLDGIARLGDSINKIIEVQHDRKQERKKVAETQLEISRLQLKAAQEQKEQDTSQLSNQGKINREKALQKMELKLFGDSENMMDVKSFIENSLKPARERLAPSFRAVNFDTKTEYDMIQNYMVLQDVFNKLRIGKVGYVH

SEQ ID NO: 52883 - protein, 194 aa, Zea mays
  Coding DNA Sequence Number=SeqID_11104
MALADQSRPLRCSRRRTQGPVGADDEALDRDVQRSSAGRRAQREQVAALVQVWLYSGALLPLAPAFISFLGQPSDDWYAIAMSNNVDAQARHSRAELQAEAAGLALHTWERFQTSTALAAIHAWVTPSQDSVPALPDRRSLLPSWAHVHSHSTASTVHTGRQAGRLWLSRARNRNSRTEHNNRQASIRAAELSP

SEQ ID NO: 52884 - protein, 172 aa, Zea mays
  Coding DNA Sequence Number=SeqID_11105
  Gene Ontology: Mol. function=protein disulfide oxidoreductase activity; Biological process=cell redox homeostasis
  Homolog annotation: Hit_ID=Q2HVR5; Match level="QueryCoverage=91%, HitCoverage=37%, E-value=2e-46, Identity=56%"; Hit description =Glutaredoxin
  Pfam annotation: Domain name=Glutaredoxin; Domain location=5-73; Score=48.0; E_value=3.2e-11; Accession=PF00462.14; Description =Glutaredoxin
ERKAVVYFTSLRGVRKTFVDCCAARSNLRSYGVRLDERDVSMHAVFKAELTELLGPRFAAAALPRVFIDWRYLGGAEDVHFLHEAGELRRALEGCEAAPSQKLGYIEACAACGDIRFVPCETCYGSCKIFVEDDDLDDRYNDVGEFRRCPDCNENGLVRYSDDPHNNYVPST

SEQ ID NO: 52885 - protein, 39 aa, Zea mays
  Coding DNA Sequence Number=SeqID_11106
MARLRVSGNSGACTQVTAGGGGVDPYVEAWAKHVAAHYG

SEQ ID NO: 52886 - protein, 163 aa, Zea mays
  Coding DNA Sequence Number=SeqID_11107
  Gene Ontology: Mol. function=oxidoreductase activity
  Homolog annotation: Hit_ID=Q6L469; Match level="QueryCoverage=67%, HitCoverage=44%, E-value=2e-17, Identity=45%"; Hit description=RNA recognition motif containing protein, putative
MSRRRVNRGSDGTNEVGCSGRSYQSCQYNTTPQEALTVAQDIVKTMLAKGYVLSKDALAKARAFDESRGLTAAAAAKAAELSKRIGLTDRVSAGVGAMRSVDETYRVTETTKTVATATGRTAAKVVNGIVTSSYFSAGAMMLSDALTRAAKAAADLAAHGRQS

SEQ ID NO: 52887 - protein, 46 aa, Zea mays
  Coding DNA Sequence Number=SeqID_11108
MGTRTARLGGRGPAPGVQQRSNQTKPAIKFEPGLIRFEILINLPAV

SEQ ID NO: 52888 - protein, 144 aa, Zea mays
  Coding DNA Sequence Number=SeqID_11109
MHSVAHSRTVEHIRRSAVNSGTATNSKARMWPASREEQGRGEGGEGGEWLAARFNTPLMRTEEERYLLEETVAAINGDGARWKKRSAQVGERRQVTAQREWEGRSHGGVTTAREHEYAAGVAGQWAQMAVTAVRVWGMGFTEVR

SEQ ID NO: 52889 - protein, 201 aa, Zea mays
  Coding DNA Sequence Number=SeqID_11110
  Subcellular localization annotation: CTP_CleavageSite=28; ConfidenceScore=5.35e-01
MPRPPPARPPGGEAQRPSPSLPTQPLLHAAAHGTKLNRQSPWPSSPMASPPTMVAQVVASPDPARSCVVALSPCFLRASAPPALLELLPRRSSQVATPMAAAPLSLISATPRLLCSSTCSSPHVLDANPPIPLPSSHGCPSSLLLLARDQLGALSSFEAGNSALVVVEQHVVGSVGFLGSPVAVSSNPGETSLSLHALCLM

SEQ ID NO: 52890 - protein, 156 aa, Zea mays
  Coding DNA Sequence Number=SeqID_11111
MAEFQMCTVHLFQKIASCLNSSYFQLVVTFLYEALGHATFIFTIELKMPYDLPHISVIMSQTQSKVCFSVPSSLEASSFSDEEAEGLGGYEASCAKDEEVMGSQRRRPHAWGWGCGQAAAAAWMTWVRGSAVLYRESGLSGGSWDGDWVIGEGIMN

SEQ ID NO: 52891 - protein, 201 aa, Zea mays
  Coding DNA Sequence Number=SeqID_11112
MATQNGADMDGKASRPEQRRTSVLRAAGQDVTSWYRIQFGHVWFLPVYKEFSCACVPLRRVRALTISSSPRQVMAGISEMEQCLAEKFDGTIKLSDTTLKEHPKRMTRLDEVTNKLVSIEKKQDEQDKSMGCIQAKFDISMKSLAQMQQKQSKESGMMGHPSATVRMPRDGLMGARPPPIGAPLNGSSVGPSIPNQILILF

SEQ ID NO: 52892 - protein, 110 aa, Zea mays
  Coding DNA Sequence Number=SeqID_11113
MGAGQGQGQASTHGVVDGGEGTMHSEWERSPIEGREGRMSGAGHAHGRGLMMAGAAMDSAMMVGADGGFLGLRDQERGKGRMSEAGAGQNRAPHHCGRLRYLLKNSRDYI

SEQ ID NO: 52893 - protein, 105 aa, Zea mays
  Coding DNA Sequence Number=SeqID_11114
MQEQEGVEDGLSSEQSRRKPRAEVAAPWMLEQGQVTGRSRDEGDGPTIDEGGSAQQSAVQLQQVDEGGGAQQSSSSKQMRAATLRAVQQANEGGDTQLQLGQKTV

SEQ ID NO: 52894 - protein, 307 aa, Zea mays
  Coding DNA Sequence Number=SeqID_11115
  Gene Ontology: Mol. function=metalloendopeptidase activity; Cellular component=extracellular space; Biological process=proteolysis
  Homolog annotation: Hit_ID=Q7XIH2; Match level="QueryCoverage=90%, HitCoverage=27%, E-value=1e-129, Identity=80%"; Hit description =Putative insulin degrading enzyme
MATPPSLMPDSCGMLLQAICETGFHYRDKSPPINYVVNISSNMQIFPPKDWLIASSVPSKFSPDAIQNVLNELTPETVRIFWESKKFEGKTKLAEPWYGTSYSVEVVPPSIIQKWVGKAPEEDLHLPKRNIFIPSDLSLRSVEEKVSFPAMLRKTQFSRLWYKPDTMFFTPKAYIKMDFHCPLSQSSPESAVLTDVFTRLLMDYLNDYAYDAQVAGLYYVVKPNDTGFQVTMVGFNDKMRTLLETVIGKIAEFEVKADRFSVIKEPLRVGTGFTLKYPIFFERSVRSPVFQLCKKRVYVQDCGPKPS

SEQ ID NO: 52895 - protein, 257 aa, Zea mays
  Coding DNA Sequence Number=SeqID_11116
  Homolog annotation: Hit_ID=Q8LID8; Match level="QueryCoverage=44%, HitCoverage=53%, E-value=2e-07, Identity=37%"; Hit description=Cyst nematode resistance protein-like protein
MAMARRDFSFHGRHFHVRRWQLPLNRDLDELKYHVCICLEGIRLHAWKESIAKRTVATSCDMNYVEEQSLQRGTPGPSTFGHGPRTLRVRPSGVPLPAGRGLTFRTIVHLDLMEGPMGRDGCTVPREVEWRLGVMDSESTRSVDGPTKLPAPFALALQKRDFTYAFTALSPSWFGHRLQPRTKERLSIPHNTPPANFDSISNRFEAKLIHKNHKRDFNGMVIYIMWNLWKELNQRIFENKSLAAEQVAERTEECLEI

SEQ ID NO: 52896 - protein, 366 aa, Zea mays
  Coding DNA Sequence Number=SeqID_11117
MERRCQRERRCSGHGCVEGAAQRELNRGSRRGRRRGSCRGSCAEIGGHGCSGQIWPSGRRANQQRDGRPFDGQQTDEREPTEGRWRPGARASRKMTAGRASQQRRKVTAGRARASRKVMDGRAREPAEERAASRGRWRRRPAEVAALRELKKEELVGFFNDHVKLQALAKKVRYFCEARNPSPASTLSVRRFAVSHTHFLHRHRALAQFHTHPRSRLCLVPALPPPPVMYPRGPDGGRDASSRPMLATPAGNDTREEDEITTAEAHVEKDAARMDAALLMRTTPKMDEFHTGGDLDSSGSGSGISGPSASKRQLQRRGSWRQRVSSLYYTFIHVELVGSQRNPFFSHEISGEDDTGDRDLGFSKWA

SEQ ID NO: 52897 - protein, 312 aa, Zea mays
  Coding DNA Sequence Number=SeqID_11118
  Gene Ontology: Mol. function=nucleic acid binding; Cellular component= intracellular; Biological process=response to abscisic acid stimulus
  Homolog annotation: Hit_ID=Q7XIH5; Match level="QueryCoverage=99%, HitCoverage=99%, E-value=1e-139, Identity=77%"; Hit description =Putative arsenite inducible RNA associated protein
  Pfam annotation: Domain name=zf-AN1; Domain location=123-167; Score =9.5; E_value=0.0049; Accession=PF01428.7; Description=AN1-like Zinc finger
  Pfam annotation: Domain name=zf-C2H2; Domain location=246-269; Score =11.1; E_value=0.65; Accession=PF00096.16; Description=Zinc finger, C2H2 type
  Pfam annotation: Domain name=zf-C2H2; Domain location=283-306; Score =22.2; E_value=0.0019; Accession=PF00096.16; Description=Zinc finger, C2H2 type
  Pfam module annotation: Pfam domain module=zf-AN1::zf-C2H2::zf-C2H2; Domain location=123-167::246-269::283-306
MGTPEFPNLGKHCSVGDCNQIDFLPFTCDRCDHFLDYVLLLSLIPIYLMELSIDNVFCLDHRSYTSHQCPNANMKDVTVLICPLCAKGVRLNPSEDPNITWDTHVNTDCDPSNYQKVMKKKKCPVPGCRETLTFSNTIRCKDCTREHCLKHRFGPDHKCPGPRKVDSGFPFVSMLRRSQKAETRSNSSNNNGSSWWSSSLVNAATNFKSSAEAGMQKLSTVTSQAFQKAKDGIAPNSSSSSGDLVEQCVHCPARFSTVGALIEHVEKSHQINSQPSHGRVTIDVCPKCSKAFRDPVLLVEHVEKEHGGTSRV

SEQ ID NO: 52898 - protein, 201 aa, Zea mays
  Coding DNA Sequence Number=SeqID_11119
MASQDIWMDKTSATAYIHVQFLFLWQGLDEFTHQRLITLFGSDWASDLVEMPSQLFHGSLLLGLISRATFEYRVGWHRRLVESTISSMLILLKEGITKMCIKFNTNIQRKRLERILQSLEHTRIGAASGAPDTIRCSGCSPPRTSRSRVFSTLIRYNSPDCPFYTYTKQGSGRIKIAVKLWDFSLEQTNNIVSTFSDSPLS

SEQ ID NO: 52899 - protein, 132 aa, Zea mays
  Coding DNA Sequence Number=SeqID_11120
MTGWRWRRIGPPDPIFPRLDPVAVRREAVAGCGCRGLVGWGSARTAGFVVRQFLLLGGDADGAVVVLWAVTGFFRWSRCGGKRSGLGYWLGQEHMAGAESGVLGLVFLKTGSIPFFLNERQSSCYYVKKDLL

SEQ ID NO: 52900 - protein, 368 aa, Zea mays
  Coding DNA Sequence Number=SeqID_11121
  Homolog annotation: Hit_ID=Q7XII4; Match level="QueryCoverage=69%, HitCoverage=82%, E-value=7e-46, Identity=48%"; Hit description =Remorin-like protein
  Pfam annotation: Domain name=Remorin_C; Domain location=254-366; Score=137.1; E_value=4.8e-38; Accession=PF03763.4; Description =Remorin, C-terminal region
MHNHRRVALIQSCVNLLGYDISAHCTAATGSTGMVATNDTCPLHIDNENNLTRAPATILPTTHHHHHHRTPGGAKPFDQTAASTSSSGGGVERQDRWLQPVAENEEEEEEFRDIHALSPPPSQPSSYRRARGGEPWGSAAGGSRHTSVRSVGSDTAPSEPFPTMTREFSAMVAAAASAAADSRDAGSDVVGRAEEEEEEELEETNPLAIVPDSNPIPSPRRGPPPAAPGADAAALVAADGHGSREGGGVSVGQVRKEEVESKIAAWQVAEVAKVNNRFKREEVVINGWEGDQVEKASAWLKKYERKLEEKRAKAMEKAQNEVAKARRKAEEKRASAEAKRGTKVARVLELANFMRAVGRAPSTKRSFF

SEQ ID NO: 52901 - protein, 301 aa, Zea mays
  Coding DNA Sequence Number=SeqID_11122
  Homolog annotation: Hit_ID=Q9FGZ0; Match level="QueryCoverage=73%, HitCoverage=82%, E-value=7e-37, Identity=41%"; Hit description =Arabidopsis thaliana genomic DNA, chromosome 5, TAC clone:K6M13
MPDAPDVTGRLAAHPHRDRLDGWLDRTGWSGACIALPHRLDAGCSDETTTMDSDSDDLLLPNLLPSTTTAPAPSSPSREQLHHFQIPSLPSPITVRALPSRGLSFQLWPSASTLLRVLPATPCLLPRPPALGSPLSVLELGSGTGAAGLALAAALPARTVLSDLPDALPNLRHNVELNEHLLGSAGGAASVVPLRWGDASAMADVAVAQTASPFDLVVASDVVYYEELVDPLIETLRFFVKGEVAFVMAHMRRWKRTDKKFFGRARKLFDVEVVHEDPPLEGWRHGPVVYRFTAKKQHGKK

SEQ ID NO: 52902 - protein, 228 aa, Zea mays
  Coding DNA Sequence Number=SeqID_11123
  Homolog annotation: Hit_ID=Q2JV66; Match level="QueryCoverage=31%, HitCoverage=52%, E-value=2e-08, Identity=42%"; Hit description =Chaperon-like protein RbcX
  Pfam annotation: Domain name=RcbX; Domain location=75-160; Score= -48.7; E_value=0.0032; Accession=PF02341.6; Description=RbcX protein
  Subcellular localization annotation: CTP_CleavageSite=58; ConfidenceScore=5.71e-01
MAVAQAATVVAAAAACRGISPSGTTGVFRWRPRRRALARARPARRGSRATGRGRGLVVVAEFGGTYEDGFEDVHKNIINYFTYKATHTVLHQLYEMNPPAYTWLYSYISVNDPLDGDYFLRLLAKERQDLAERVMITRLHLYGKWIKIPQSTDEARLFVEISPRMILPIDSIKVPVAFGTRVNFHAEYVEFTVVELHLPYNANLGRHMLYRASSPQDAGAQQRHHHPL

SEQ ID NO: 52903 - protein, 299 aa, Zea mays
  Coding DNA Sequence Number=SeqID_11124
  Gene Ontology: Mol. function=DNA binding; Biological process =regulation of transcription
  Homolog annotation: Hit_ID=Q4H2B3; Match level="QueryCoverage=55%, HitCoverage=62%, E-value=2e-28, Identity=41%"; Hit description =NbPCL1 protein
  Pfam annotation: Domain name=Myb_DNA-binding; Domain location=89-139; Score=45.9; E_value=1.3e-10; Accession=PF00249.21; Description=Myb -like DNA-binding domain
MREEEEPSWFARGEEQEQQLPRPDELMPLTQTLITPDLAVAFDITTHGAGGAGPVPDINGGGASSAAGSSGGGGGGGGDEPARTLKRPRLVWTPQLHKRFVDAVAQLGIKNAVPKTIMQLMSVDGLTRENVASHLQKYRLYLKRMQGLGGGGGGGSHSSGSGSATDAATEHLFATGPVPFLPPAHRAPAADTYPPFSPMGSGAAHHHHRAPQIGHFHHPAARPLAHYAAAAGPGFDHGFLSRVAPPGMHHHRMASAAAGMGMGMIAPSSFADEMDRGAGGSGGGGGRRELTLFPTSGDH

SEQ ID NO: 52904 - protein, 56 aa, Zea mays
  Coding DNA Sequence Number=SeqID_11125
MAKHLRTSPQQHRHPNITLHQTQYIQFTITSTHPEFKFTYTSKIGLHPHIQNLSTP

SEQ ID NO: 52905 - protein, 65 aa, Zea mays
  Coding DNA Sequence Number=SeqID_11126
  Homolog annotation: Hit_ID=Q8LM09; Match level="QueryCoverage=92%, HitCoverage=10%, E-value=8e-08, Identity=54%"; Hit description =Putative CPD photolyase
MEVLLGSKDGFLTKRIKSYSTGQSVPTKPHALQCLSPLIAGSNAVAECLLTNCKSNELKGKTDKH

SEQ ID NO: 52906 - protein, 783 aa, Zea mays
  Coding DNA Sequence Number=SeqID_11127
  Homolog annotation: Hit_ID=Q84Z28; Match level="QueryCoverage=84%, HitCoverage=43%, E-value=3e-59, Identity=50%"; Hit description =Abnormal spindle-like protein
  Pfam annotation: Domain name=Arm; Domain location=706-751; Score =20.5; E_value=0.0059; Accession=PF00514.13; Description =Armadillobeta-catenin-like repeat
  Pfam annotation: Domain name=IQ; Domain location=272-292; Score=15.5; E_value=0.19; Accession=PF00612.17; Description=IQ calmodulin-binding motif
  Pfam annotation: Domain name=IQ; Domain location=531-551; Score=3.2; E_value=18; Accession=PF00612.17; Description=IQ calmodulin-binding motif
  Pfam annotation: Domain name=IQ; Domain location=576-596; Score=24.6; E_value=0.00036; Accession=PF00612.17; Description=IQ calmodulin -binding motif
  Pfam annotation: Domain name=IQ; Domain location=619-639; Score=23.3; E_value=0.00089; Accession=PF00612.17; Description=IQ calmodulin -binding motif
  Pfam annotation: Domain name=IQ; Domain location=642-662; Score=25.1; E_value=0.00026; Accession=PF00612.17; Description=IQ calmodulin -binding motif
  Pfam module annotation: Pfam domain module=Arm::IQ::IQ::IQ::IQ::IQ; Domain location=706-751::272-292::531-551::576-596::619-639::642-662
MWGFTKVIHFFVIIRHVAVRAREEEQDSLELAVRACRGVCRGATQVPVGFRVGIGWRRPEAVVIATFFILSVENPHAWVSVNWLRDDGREAVGAEELVGSVAANWPAMMAICSKIGMTVESSSQLDRRALNCFINYYLNIDISPFKETPTGCRKELFTCHQLDTISDIAGWPSSEMGKVLSDVLQAVDIPASGILADGVLFDERSTILLLAFLSSHLTNDERLDQLKNLINMRLYKSADTKIAARRISRGKIDIKYHPSQTDKNDGACTNQEWAATIIQTQARSLIAKNKYCERKKAIFILQGALRAWSAIISNRNRSCLSIAASIPWQAQGAFPYKFLMISGLVFPSYIVRVHFFSGNNRYFIFIMERHRFVQMRKSAIMIQLAVRIWIRGRKKFKNSDSFKSCEFLEGKTPPKISSIAPSPQEHCSGGDKTIASPTACKHCEHVLTVRASAAAPILYFDGMDSLDSTTPLQFSGNQSNFITSTTQLCKSEHDCRSCVVEKSNSVSVSKLVSADDIQCSSSICFPVCKELVAAQTIQSAYRRFLNNRNRITGAIKIQSHWRCYSRWWRKVLQTRKRAVIVIQTRFRGWVARQDAIRTRNSICNIQRWWRKVLFLKLRKQAALVIQAHFRGWIARQVAFRTRKSITIIQSYVKAYLVRKASKQEVAHIRSRLQKSSSQVDDSSQLSRFSRQLASLSTYVEELREYSKKCCEKLVAAGAVDILLKQIYLLNRGIADQEVLKQVFLTLRNIARYSNLRQVLASTAESVEIIFQELLSLAVVGAAL

SEQ ID NO: 52907 - protein, 91 aa, Zea mays
  Coding DNA Sequence Number=SeqID_11128
MQWYRTFGLRSHDEAELASDFLMGSHSLEVSALGGFLRCVIVASTFLASEGIMVGRPCYRLGDRGHQLLRCTFAKRSVTAAPFAIEATLAS

SEQ ID NO: 52908 - protein, 419 aa, Zea mays
  Coding DNA Sequence Number=SeqID_11129
  Gene Ontology: Mol. function=nucleoside-triphosphatase activity; Cellular component=membrane; Biological process=cell division
  Homolog annotation: Hit_ID=Q6F2W7; Match level="QueryCoverage=91%, HitCoverage=77%, E-value=1e-137, Identity=62%"; Hit description =Putative ATPase
  Pfam annotation: Domain name=AAA; Domain location=172-382; Score =45.2; E_value=2.3e-10; Accession=PF00004.19; Description=ATPase family associated with various cellular activities (AAA)
RHGLSENHLFDAARAYVATRIDPRAMRRLCLARSRTKEPDGSGRWNTLLCMEPGGSTVDVFGGVEFTWNCVETGGRRQEGQGRRRAAPRVLGSELGRRAHRDDVGALQLRDRALRIFMNEGRSWHGINHPPPATFDTLAMDPVLKQSVVDDLDRFLKRRDYYRRIGKAWKRGYLLYGPPGTGKSSLVAAMANYLRFNLYDLDLSEVRLNSALQKLLIHMPNKSVLVIEDIDCCFDNAAASRNGLDMDPNYSSGSGSGSYSSDENWAQPRLAPPKVRGITLSGLLNFIDGLWSTCGEEHIIVFTTNYKDRLDSALLRPGRMDMHVYMGYCGWEAFKTLARNYFLVDDHKMFPEIQELLSAVEVTPAEVSEMLLRSENGDVALGILAEFLREKRRRGRKETKEEKDATEDKDEEEVAEKAA

SEQ ID NO: 52909 - protein, 127 aa, Zea mays
  Coding DNA Sequence Number=SeqID_11130
  Gene Ontology: Mol. function=deoxyribodipyrimidine photo-lyase activity; Biological process=DNA repair
  Homolog annotation: Hit_ID=Q8LM09; Match level="QueryCoverage=53%, HitCoverage=12%, E-value=6e-30, Identity=84%"; Hit description =Putative CPD photolyase
MGKFTGKILPKGLVWKLKSPSGLKGIREEISSFPPQPPPILKGISGSQSSPDGDPNGYVGCMWSICGLHDQGWKERPVFGKIRYMNYAGCKRKFDVDAYISYVKRLVPRAKKRKTEEGESTVKESNV

SEQ ID NO: 52910 - protein, 150 aa, Zea mays
  Coding DNA Sequence Number=SeqID_11131
MEEFSTGNEGSEPPLPSLAVSLPTPCYGETCYDGVAHRQWARQWSRRVTAPVARAHRGASRLAAATRPMVGASIVRLWWRPVMVCHGAGCGDGSWLAVDVHGRDARDVHGGSWPDDVLEDFLGEILGDDDARERRSPDGGVAFSSSVIHG

SEQ ID NO: 52911 - protein, 489 aa, Zea mays
  Coding DNA Sequence Number=SeqID_11132
  Gene Ontology: Mol. function=oxidoreductase activity; Cellular component=integral to membrane; Biological process=electron transport
  Homolog annotation: Hit_ID=Q7EZ52; Match level="QueryCoverage=95%, HitCoverage=95%, E-value=0.0, Identity=72%"; Hit description =Putative taxane 14b-hydroxylase
  Pfam annotation: Domain name=p450; Domain location=36-485; Score =153.5; E_value=5.4e-43; Accession=PF00067.12; Description=Cytochrome P450
MDSSLVLALIAVALPVLLHLLKRGKTPWRPAAAKLPPGSLGLPVIGQSIGLLRAMRANTAERWILDRIHRYGPVSKLSLFGRPTVLVAGSAANRFIFFSSALAMQQPRSVQRILGDKSILELTGADHKRIRGALVEFLKPDMLRLYVGKIDGEVRRHLDECWAGRCTVTVMPHMKRLTFDIISLLLFGLERSPLQDALAGDFARVMDGIWAVPVNLPFTAFSRSLRASARARRLIAGIARETRAKLERGEASRSSDLIACLLSLTDHSGARLLSEEEIVDNSMVALVAGHDTSSILMTFMVRHLANDPDTLAAMVQAATGGDAEHDEIAKNKGDGQTLDWEDLAKMKYTWRVALETLRLVPPIFGNFRRAMQDIEFDGYLIPKGWQVFWAASVTHMDTGIFHEPAKFDPSRFENQSAASAPPCSFVAFGGGPRICVGMEFARIETLVTMHYLVRRFRWKLCCKNDTFARDPMPSPLHGLPIELEQKASP

SEQ ID NO: 52912 - protein, 55 aa, Zea mays
  Coding DNA Sequence Number=SeqID_11133
MALSAEVGTRWVQRRRTCDLQRFTKRHYLCMEKGFVRVLYKLAPWQLVPETIYTQ

SEQ ID NO: 52913 - protein, 262 aa, Zea mays
  Coding DNA Sequence Number=SeqID_11134
MGVKLDRSLVAVVRSAGNSSLLQGQGCLFQLAFGKLKWDGNKFPGLGRQCKQVQDQDSESWNCTRFSRLIRVSRPNVLIPFESGLAVDRMEWRFLEWKGLTILKGHTSAMARGRARLQLQEGSAGCRQQPIYNSRGAHVPGGRKLTPRDPAPDPVSSSQSLLREEPKMLLLRASTPFAYAKVDKVDAEEARHLRAQFLIHKVLEKKSPRPSALARARPRIGVRLKKLRLAVRALRARACRALQRHLGNLRRLVGRGGVQGSP

SEQ ID NO: 52914 - protein, 576 aa, Zea mays
  Coding DNA Sequence Number=SeqID_11135
  Gene Ontology: Mol. function=ATPase activity, coupled to transmembrane movement of substances; Cellular component=integral to membrane; Biological process=transport
  Homolog annotation: Hit_ID=Q9LJX0; Match level="QueryCoverage=96%, HitCoverage=97%, E-value=0.0, Identity=55%"; Hit description =Multidrug resistance protein 11
  Pfam annotation: Domain name=ABC_tran; Domain location=100-284; Score= 220.7; E_value=3.3e-63; Accession=PF00005.17; Description=ABC transporter
MAKGLGIGCTYGIACMSWALVFWSLGQSFSNLGAFSKGKIAGYKLLEVIRQRPTIVQDTADGRCLDEVHGNIEFKEVAFSYPSRPDVMIFRDFSLFFPAGKTAAVVGGSGSGKSTVVALIERFYDPNQGQVLLDNVDIKTLQLKWLRDQIGLVNQEPALFATTILENILYGKPDATMAEVEAAATSANAHSFIALLPNGYNTHVGDRGLQLSGGQKQRIAIARAMLKNPKLLLLDEATSALDAGSESIVQEALDRLMVGRTTVVVAHRLSTIRCVDMIAVIQQGQVVETGTHDELLAKGSSGAYAALIRFQETARNRACPSTRKSRSSRLSNSLSTRSLSLRSGSLRNLSYSYSTGADGRIEMVSNADNDRKYPAPRGYFFKLLKLNAPEWPYTILGAVGSVLSGFIGPTFAIVMSNMIEVFYYRNPSKMESKTREYVFIYIGTGLYAVVAYLVQHYFFSIMGENLTTRVRRMMLAVILRNDVGWFDQEENNSNLVAARLSTDAADVKSAIAERISVILQNMTSLLVSFVVGFIIEWRVALLILVTFPLLVLANFAQSDEEGEGPKDAVHGALVHG

SEQ ID NO: 52915 - protein, 316 aa, Zea mays
  Coding DNA Sequence Number=SeqID_11136
  Homolog annotation: Hit_ID=Q5VR11; Match level="QueryCoverage=21%, HitCoverage=20%, E-value=3e-27, Identity=91%"; Hit description =Putative TGACG-motif binding factor
  Pfam annotation: Domain name=bZIP_1; Domain location=147-211; Score =36.2; E_value=1.1e-07; Accession=PF00170.11; Description=bZIP transcription factor
  Pfam annotation: Domain name=bZIP_2; Domain location=147-201; Score =35.5; E_value=1.9e-07; Accession=PF07716.5; Description=Basic region leucine zipper
  Pfam module annotation: Pfam domain module=bZIP_1::bZIP_2; Domain location=147-211::147-201
MPLPPQPRSTVLGMAPRAGRSSAERGSAEAAEGSGEKEMSSAREEEKKIDAEMRRRRSSRRRRAPRARSPPAASAPPAPLATTSRKEGRRATRRYGGVPEMGGASASASSGAGADERPKGEDGKQGQVAAGAQPPAGGKKRGRTAGDKEQNRLKRLLRNHVSAQQARERKKAYLTELEAKAKGLELRNAELEQRVSTLQNENNTLRQVIDVSGKEFKFTWASGRGELCDIYEERQSGEDGNGLLLECGSTWRKVHVNPIAWAVPTKHEGDASEEASLADETLASEVVLTRKRKIGSSLSVEPNHLSDELEPKLEDA

SEQ ID NO: 52916 - protein, 138 aa, Zea mays
  Coding DNA Sequence Number=SeqID_11137
MDILGNITDTSVADPYGHFTWWLLPLMEPYSPTTTLLMTSPWEMHDRLEGVVGKEKGKMRAKGKGGGRLLFPCGRARQSPELVSPAADLLSLLVAPQPGEGTALGRLPPGERAGGVRPLHPPGVPATGSGAAGTQVRR

SEQ ID NO: 52917 - protein, 98 aa, Zea mays
  Coding DNA Sequence Number=SeqID_11138
MADGGVAMVDVTPQVKENRKCELHSEPEDTPIFVRILIQDCNLADEEYVLVPEQGAAQEVAPDPAPEPAPEDLPATALEGKPRFMHNLFVGVSRQGGP

SEQ ID NO: 52918 - protein, 166 aa, Zea mays
  Coding DNA Sequence Number=SeqID_11139
  Subcellular localization annotation: CTP_CleavageSite=35; ConfidenceScore=5.31e-01
HDPDSEGSVDKSRAHALFLPYPLFSPISPRHQNATASRVRGFSPPSSTGRFLSDWTEVWGAGAPPGPVGHGWNLAWAHRAADDLEFLVVAASSPCAADRAERHSIPGKNLTNAFAMLSYSFSSVLSEGRELGALMAECRRWRRRVESPRRPELGDAAELMRGPLIF

SEQ ID NO: 52919 - protein, 40 aa, Zea mays
  Coding DNA Sequence Number=SeqID_11140
MVHLTLSKVRAAKSEVTGLSGVAPDCPMQQDDKAPQRSTA

SEQ ID NO: 52920 - protein, 369 aa, Zea mays
  Coding DNA Sequence Number=SeqID_11141
  Homolog annotation: Hit_ID=Q6Z1K3; Match level="QueryCoverage=45%, HitCoverage=34%, E-value=5e-12, Identity=28%"; Hit description=Zinc knuckle domain containing protein-like
MAREEAVLRKALLVIIVGTRPEVLGVEVIDEVARHFHVEAGAMSIHQALLEDIILFLSDEDAASRVFNEGRIFRGPQFDLVFKRWTRCANASAATLSTLVNVEIKGIPAHAWSRGAAEHLLRDSCLISKLHLPTVLKTDFSSFGLRTWCVDLKNFHREMILLISESGLAAREKRCLSYKVNLMAIPVEASGSTVDSSSLIDDNLPGASSRGEEESLMESEVSVKGMEGEATKVLPPDPYPISGGLVLSDDFNEDPREILLSPEKSALQTEDMVQGDINLVGRALQVPEKAGVLDFQVVVGLEDVISGDGSLGQAAIDSPQQSVGLLESMGSVSPHGRVAVSGDGPLGQASSDSPQHLAGSLESDGPVSP

SEQ ID NO: 52921 - protein, 109 aa, Zea mays
  Coding DNA Sequence Number=SeqID_11142
MPGAAVSDPIEGRRPSSSFFVCSGSIIDDLELFNDADIAISSPQGPVMSSPPCSSSLPLVALGGNIANKDNDWKFMVLCDFWEEEGRRDVPSEMQMYSQLGLNEEDKAK

SEQ ID NO: 52922 - protein, 91 aa, Zea mays
  Coding DNA Sequence Number=SeqID_11143
MESTCFDPGSWPGDVLGNILGESLGEETARENLHGMVTQEAFNCNEGVSHLICGKNAGLSSSSLKLHLQKAHKKISSGKTGSVDSAHCHPH

SEQ ID NO: 52923 - protein, 183 aa, Zea mays
  Coding DNA Sequence Number=SeqID_11144
  Gene Ontology: Cellular component=chloroplast thylakoid membrane
  Homolog annotation: Hit_ID=Q6K8R1; Match level="QueryCoverage=89%, HitCoverage=68%, E-value=2e-69, Identity=78%"; Hit description =Putative glycine-rich protein
MTKALLRKEKQPLSMKSLPLMESLKKAMADAKKPRSIQDLLKEQVAKLREQASGGGGGNGNRRGGSGGSGGPDDESFKEALDEVVQVILATVAFILVYIHIIRGEELYRLARDYTRYLVTGKRTARLKRSMQKWHNFSESFMQKEGSEEDQYEKPTWWQQPQKLVHLMEELCRGNWRPHAQES

SEQ ID NO: 52924 - protein, 146 aa, Zea mays
  Coding DNA Sequence Number=SeqID_11145
MGKSKKGGGSSHHSGDKRKHEPTPPSEDFGNSEYSEEEFSSESEGSPAPASPLASSDDSDNSQGIAAEVWTYIRAVERAGLEGSDESEYSSDKENSSDSSEEDSGGDGGDGDDDGGDGDGGGDSGKGGDGSDGSKGSSKGSNKASG

SEQ ID NO: 52925 - protein, 185 aa, Zea mays
  Coding DNA Sequence Number=SeqID_11146
MERTKGNRANRHTDELDKGEWSVEHGTVQGLGWGMRTVRPERADGEHEFRRGSTDGSEQVLEECVRETEREFVVGAWTRSARCSVRGSWRGKARRTTGGRSARSAGAARGAVGRPGAGGSRLRDSARSSGGGGLSGDAGLSCGFLAARVGEKGGREEREVAVVASGEGRGHLGGKGRALMGLGGP

SEQ ID NO: 52926 - protein, 174 aa, Zea mays
  Coding DNA Sequence Number=SeqID_11147
MEAWLIRPRDHAGIRLLGFVLEVPYVAPLSWIRDASPGHKWRKVSQVRASLDPISSGGSALMARAIPLYRMRAGSSPPDTVLPLGDMDVARFQEFCRSQRKESFGLQRWLQLVLSDDAYRRLALRSCIPRCCRSSAAALFLTHTAVRAVYIRSGHGQAAAAAIRSQVIKRAAAT

SEQ ID NO: 52927 - protein, 51 aa, Zea mays
  Coding DNA Sequence Number=SeqID_11148
MDEVAKAFEIAMLRGEIRILSAHSTNKTKNLESQEEPTILLLLDAEAQALA

SEQ ID NO: 52928 - protein, 176 aa, Zea mays
  Coding DNA Sequence Number=SeqID_11149
  Gene Ontology: Mol. function=kinase activity
  Homolog annotation: Hit_ID=Q6QP54; Match level="QueryCoverage=68%, HitCoverage=35%, E-value=4e-17, Identity=55%"; Hit description =Putative kinase
MGQRETEREGGKKLEGDRHKRGNPRPSCLSRAQVGRKERIQGNDGASYDVVGPSPGLGEVEAPPRSRSSLSSKAEVESEPLGRARRRPSAEARAESEPWGRAKRSLSSSRAKPESEPEPWGRAERCSSSSGVEPDSEPWGRAERSSSSSRAEPESEPWGRAERSSLSSGAEPESEP

SEQ ID NO: 52929 - protein, 94 aa, Zea mays
  Coding DNA Sequence Number=SeqID_11150
  Gene Ontology: Mol. function=transporter activity; Cellular component= membrane; Biological process=oligopeptide transport
  Homolog annotation: Hit_ID=Q6AVV6; Match level="QueryCoverage=64%, HitCoverage=10%, E-value=4e-09, Identity=82%"; Hit description =Nitrate transporter, putative
MVISAIVEDWRRAIALSQTTLCTTITDLRSRPCPACGWYRSHAPEAVGGLQPHQPDRVLLQALLDRDNGPGRERIRSRAMRCCNMATHGFRFQQ

SEQ ID NO: 52930 - protein, 53 aa, Zea mays
  Coding DNA Sequence Number=SeqID_11151
MAGRERAAQGRKGKGEPGMELTPARKREMGWTFKEPGAAGRSGEFADILDRDL

SEQ ID NO: 52931 - protein, 216 aa, Zea mays
  Coding DNA Sequence Number=SeqID_11152
  Homolog annotation: Hit_ID=UPI0000DA43ED; Match level="QueryCoverage =69%, HitCoverage=26%, E-value=1e-07, Identity=28%"; Hit description =PREDICTED: similar to keratinocytes proline-rich protein
CMWARYLGRFCHTERSSSSSGAEPESEPWGRAERSSLSSGAEPESEPWGRAERSSSSSGAEPESEPWGRAERSSSSSGAEPESEPWGQAERSFLWPLRPDLAAVSLTLSSGTAVGAAQAALSSCQAGQWSGETTFALNAPAIRLVGVATWPRLLLGEDWASGEPKACPLLEGVLGQDLCADGGYQLRLGVLRQGKGFEELSEGEGQATACGPRYHD

SEQ ID NO: 52932 - protein, 63 aa, Zea mays
  Coding DNA Sequence Number=SeqID_11153
MARVACTLCGKRLDGGVSVLSVGVNLIWAKCYICRVIGDPQLSIIDLDRRNFADMKTWSLTYT

SEQ ID NO: 52933 - protein, 284 aa, Zea mays
  Coding DNA Sequence Number=SeqID_11154
  Subcellular localization annotation: CTP_CleavageSite=52; ConfidenceScore=5.45e-01
MAPPATWSVRALGRARQRLLRGRGRVCLPRSRSSPSPWVGRGGDRRLRPGPSLSPGVGRAGVRRLPGPRPSPSPGVGRGGVRRLPGPRPSSSPGVGEAEFVVFQGRGRVRALGSGEAEFVVFRGRGRVRALGSSEAELPMAPEAGLGCCQPHSVEWHSSQSGAGGAVLLSGRSLGGIPNYGPRQGVGFKGVGHEALLPGIMACPVGRGDDVVARIRHEDIMHQIPDEGSQGPNQFPFIGDEIKALKYDGREPFNVVDGHLELGGEGDKNTQRPLHGMPTVDVSN

SEQ ID NO: 52934 - protein, 135 aa, Zea mays
  Coding DNA Sequence Number=SeqID_11155
  Gene Ontology: Mol. function=RNA-directed DNA polymerase activity; Cellular component=intracellular; Biological process=RNA-dependent DNA replication
  Homolog annotation: Hit_ID=UPI00004C1733; Match level="QueryCoverage =80%, HitCoverage=8%, E-value=4e-29, Identity=61%"; Hit description =UPI00004C1733 related cluster
MSGPTGTIIVGTTTQLAYESNVECCDFVEGALQYRNTHTKQWLHRFDEKKRKANDEEIGKLLMAGFIKEVYHPKWLANMLLVKKKNVKCRMCVVYTRLNKVHPKDSFLLPRIHQVVDSTFRCEVLSFIDAYSEYH

SEQ ID NO: 52935 - protein, 134 aa, Zea mays
  Coding DNA Sequence Number=SeqID_11156
  Gene Ontology: Mol. function=porin activity; Cellular component =integral to membrane; Biological process=transport
  Homolog annotation: Hit_ID=Q10LH9; Match level="QueryCoverage=83%, HitCoverage=13%, E-value=2e-49, Identity=88%"; Hit description =Nucleoporin interacting component, putative, expressed
MELLMEILLWDGGIQLLLGPSGMGEGELKKYMMDWRSRQQFLLEAAHRCQEAGLYDKDVEIHKRVGAFAMALQTINKCLSDAVSAMAWSMLDGESRAAALIHSGNEILETTRNSSEARLFSSPILALVECWLFC

SEQ ID NO: 52936 - protein, 83 aa, Zea mays
  Coding DNA Sequence Number=SeqID_11157
MTRHNFFSSESDSCGGAKRVGSEKIFSSNGGGTDENQRKTQKEKDLVGAAKTLRSLRAPDSVRCARLESGQQAALGNSSAAYG

SEQ ID NO: 52937 - protein, 140 aa, Zea mays
  Coding DNA Sequence Number=SeqID_11158
MRVRGSLSVEGEERRRIGSRSALYMEGEADRGEWLVAVGSTSSSAPSGEVSSKHGGDDYGIVGGPNGNGVAPATKSTVVETTIERPTVEDLEPLAHRTLSGAHRTVRCSHLTVGSATRHAQIARPAVGSPDSPVHHRTVR

SEQ ID NO: 52938 - protein, 247 aa, Zea mays
  Coding DNA Sequence Number=SeqID_11159
MEGSWDCATKSRARGGCRGQGQGRTVRHATVDAYAQLIMPASSSPSPSPLEIVTCSALEDPWSPMMAIAGDKFTVVQRVPRDVSDGLLGKFADTSAFGFDYDRSALWSPLVLRPEAMLLAQCPAGRRGRRRLRWRQRRRNRRKYYAFKESILLPYRLSMINDDGKLRTLCNVYTLGKAWKTLGEVFAECSTRQKELDKLYIGNGFFAEYFLSGTRQRLCRVSLDTQQRKAAVTTIGNGDGAVAECSR

SEQ ID NO: 52939 - protein, 82 aa, Zea mays
  Coding DNA Sequence Number=SeqID_11160
MASSAVAIAFSGPPHRPHTVASDQQPGGPLYFDTTGLMGALQQMSLQGNKIDDFTHFCWTFPLKHKSKFSYTIKCFQANNGT

SEQ ID NO: 52940 - protein, 145 aa, Zea mays
  Coding DNA Sequence Number=SeqID_11161
DPEGDGVRAAPEQEGVRPPWQAQGRTGLNPSSRKEEERLGEAATQENGGDHGKRDSVVGETEQGMGELEADPGKARGRSSDWRSKGSKQRVRHPWKQGSEPGEQEHRAGGTEAELGAQRTMAREDGAQAQGDVRPSDNREELEWR

SEQ ID NO: 52941 - protein, 66 aa, Zea mays
  Coding DNA Sequence Number=SeqID_11162
MEQNLEPPFPLHGGTSRFEIMAMDDGVVWDAATLGIFLYYFNGRCITPDTLDWGDELYDAESNYFL

SEQ ID NO: 52942 - protein, 86 aa, Zea mays
  Coding DNA Sequence Number=SeqID_11163
  Subcellular localization annotation: CTP_CleavageSite=37; ConfidenceScore=5.08e-01
MACGCPGAWALLLRAQFTMTVGRQILAVHPSWSRGCRARACHARLVLTNTSCSLWLGPYYFVKNHLDRDPLPPLLVIPRGGGQSYC

SEQ ID NO: 52943 - protein, 166 aa, Zea mays
  Coding DNA Sequence Number=SeqID_11164
MEAAAFREAQRIKELEEYQSKDNIELKIVLAAIDQVEKTMDEVVLKICNYICDKLVPEPGVEETFGRKPKETLKTSGSMSFTFFHDEIVLDERDEYQLRNMKHLFFALINMLLDSFEILNFPIEVILWRRVDNFSLLCLCLMEKCFFILVLIYGSKDRTMRFFGST

SEQ ID NO: 52944 - protein, 829 aa, Zea mays
  Coding DNA Sequence Number=SeqID_11165
  Gene Ontology: Mol. function=translation initiation factor activity; Cellular component=cytoplasm; Biological process=stem cell maintenance
  Homolog annotation: Hit_ID=Q69VD5; Match level="QueryCoverage=99%, HitCoverage=82%, E-value=0.0, Identity=89%"; Hit description=ZLL/PNH homologous protein
  Pfam annotation: Domain name=DUF1785; Domain location=106-191; Score =78.2; E_value=2.5e-20; Accession=PF08699.1; Description=Domain of unknown function (DUF1785)
  Pfam annotation: Domain name=PAZ; Domain location=192-329; Score =175.4; E_value=1.4e-49; Accession=PF02170.12; Description=PAZ domain
  Pfam annotation: Domain name=Piwi; Domain location=471-792; Score =545.4; E_value=5.9e-161; Accession=PF02171.8; Description=Piwi domain
  Pfam module annotation: Pfam domain module=DUF1785::PAZ::Piwi; Domain location=106-191::192-329::471-792
MAELVRLYRSSDLGMRLPAYDGRKNLYTAGTLPFDAREFVVRLTDEDDGTGVPPREREYRVAIKFAARADLHHLRQFIAGRQADAPQEALQVLDIVLRELANQRYVSIGRSFYSPDIRKPQRLGDGLQSWCGFYQSIRPTQMGLSLNIGELCGLGNISCPHACDSFLFCPVAAAYMAMLTADMSSTAFIEPLPVIEFVAQILGKDVISRPLADANRIKIKKALRGVKVEVTHRGNVRRKYRISGLTTQPTHELIFPIDEQMNMKSVVEYFKEMYGFTIQHPHLPCLQVGNQKKANYLPMEACKIVEGQRYTKRLNEKQITSLLKIILYFQTVHQNGYEQDPYAKEFGINISEKLTYVEARVLPAPWLKYHDTGKEKECLPQVGQWNMVNKKVINGCKVSHWACINFSRSVPEATARGFCQELAQMCQISGMEFNSEPVMPIYSARPDQVVKALKSVYNIALNKLKGKELELLLAILPDNNGPLYGDIKRICETDLGLISQCCLTKHVFKISKQYLANVSLKINVKMGGRNTVLLDAISWSIPLVSDIPTIIFGADVTHPETGEDSSPSIAAVVASQDWPEVTKYAGLVCAQAHRQELIQDLYKTWHDPQRGTVTGGMIRELLISFRKATGQKPLRIIFYRDGVSEGQFYQVLLYELDAIRKACASLEPNYQPPVTFVVVQKRHHTRLFTNNHKDRSSMDKSGNILPGTVVDSKICHPTEFDFYLCSHAGIQGTSRPAHYHVLWDENNFTADEMQTLTNNLCYTYARCTRSVSVVPPAYYAHLAAFRARFYMEPEMSENQTSKSSNGTNGGLVKPLPAVKEKVKRVMFYC

SEQ ID NO: 52945 - protein, 230 aa, Zea mays
  Coding DNA Sequence Number=SeqID_11166
  Gene Ontology: Mol. function=nucleic acid binding; Cellular component= intracellular; Biological process=DNA integration
  Homolog annotation: Hit_ID=Q8H6I0; Match level="QueryCoverage=99%, HitCoverage=13%, E-value=1e-104, Identity=80%"; Hit description =Putative gag-pol polyprotein
MKKVVYYETDSSSPSTLGSESASATSKCHERKKYSKMPLRYPRISKCTPLLFVPLGKPPVFYGEDYSMWSDKMRHHLTSLHKSIWDIVEYGAQVPNEGDKDYDSEEVDQIRHFNSQATTILLASLSREEYNKVQGLKSAKEIWDVLKTTHEGDEVTKITKRETIEGELGRFMLNQGEEPQAMYNRLKTLVNQVRNLGSTKWDDHEMVKIILRSLVFLNPTQVQLIRGDPR

SEQ ID NO: 52946 - protein, 898 aa, Zea mays
  Coding DNA Sequence Number=SeqID_11167
  Gene Ontology: Mol. function=electron carrier activity; Biological process=electron transport
  Homolog annotation: Hit_ID=O22943; Match level="QueryCoverage=86%, HitCoverage=100%, E-value=0.0, Identity=57%"; Hit description =Expressed protein
  Pfam annotation: Domain name=DUF288; Domain location=485-807; Score= -175.4; E_value=0.0034; Accession=PF03385.8; Description=Protein of unknown function, DUF288
MDDDDGRARWRRSCGAEKKEWWEEGDVRVVSAPCSSSGEAGGGVDGRWLCDRDAPPHRDTDPPPSSTLSVGARQAHRPQLRPTTPNLAPPPPPPPESQPIQTHHARSPLLVPQIRPARREMLVQDRASPHAAAAGQKPSSSPRGAPGADRRHPRPFAKNLDFATWASEHSSKLLLLLLAIASAAAVFLLRGAAPDAAALLCLDRSARSRSGAPAKLPYPDVAWSKVPPLAIAAGSPFASFRAERWIVVAVSSPPTAALAALARVKGWQLLAVGDSHTPAGWELKGAVFLSLELQAQLGYRSVDFLPYGSHVRKTAGYLFAIQHGAKVIFDADDRAEVPGNDLGKHFDVDLGSGVTNHPVLLQYSHADPNRTVVNPYVHFGQRSVWPRGLPLDKVGEVAHEVFYTEVFSGRQFIQQGLSDGLPDVDAVFYFTRKPPTSAFDLRFDSEAPKVALPQGMMAPVNSFNTLFQSPAFWGLMMPVSVSSMAADVIRGYWAQRILWEIGGYVAFYPPTIYRKDYIQAYPFAEEKDLHVNVGRLIKFLNEWRSNKRTLFEKILDLSYAMAEEGFWTEQDVRLTAAWLQDLLAVGYRQPRLMSLEIDRQRATIGEGDMKEFVPKKLPSVHLGVDEIGTVNYEIGNLIKWRKNFGNVVMIMHVSGPVDRTALEWRLLYGRIFKTVIILAEQSNAELAVERCTLSHAYKYLPKVFERYSGADGFVFLQDHMVLNYWNLMQADKEKLWITNKIAHSWVTVPLETNKEEWFVKQGDMVKQVIGSSPVHFQTNYKESMGEDKIIFCGSELFYVPRRFVEDFGDLVGLVGNLDLHHKIAVPMFFLAMDSTQNFDSDALAGTVFRPQLPANATFSSIYTAQAPAVFPVKVMNEIDFIKVIRLMSIGDPLLMELV

SEQ ID NO: 52947 - protein, 223 aa, Zea mays
  Coding DNA Sequence Number=SeqID_11168
  Gene Ontology: Mol. function=hydrolase activity, hydrolyzing O -glycosyl compounds; Biological process=carbohydrate metabolic process
  Homolog annotation: Hit_ID=Q5H7P5; Match level="QueryCoverage=91%, HitCoverage=21%, E-value=6e-86, Identity=73%"; Hit description =Mannosylglycoprotein endo-beta-mannosidase (EC 3.2.1.152) (Endo-beta- mannosidase) ...
  Homolog annotation: Hit description=[Contains: Mannosylglycoprotein endo-beta-mannosidase 31 kDa subunit; Mannosylglycoprotein endo-beta- mannosidase 28 kDa subunit; Mannosylglycoprotein endo-beta -mannosidase 42 kDa subunit]
  Pfam annotation: Domain name=Glyco_hydro_2_N; Domain location=65-166; Score=-30.2; E_value=0.0003; Accession=PF02837.8; Description =Glycosyl hydrolases family 2, sugar binding domain
MSVAVGKRVLDTGWLAARSTEVALTGVQLTTTHPPAADPAPAAPWMSAAVPGTVLGTLLKNKLIPDPFYGLNNQAIIDIADAGREYYTFWFFTTFQCALSGNQHATLNFRGINYSAEMYLNGHKEVLPKGMFRRHNIDITDILHPDGNNLLAVLVHPPDHPGKIPPQGGQGGDHEIGKDVATQYVEGWDWMCPIRDRNTGIWDEVSISISGTKDQTVQLILKA

SEQ ID NO: 52948 - protein, 339 aa, Zea mays
  Coding DNA Sequence Number=SeqID_11169
  Gene Ontology: Mol. function=histone-lysine N-methyltransferase activity; Cellular component=nucleus; Biological process=chromatin modification
  Homolog annotation: Hit_ID=Q6ZCF6; Match level="QueryCoverage=98%, HitCoverage=84%, E-value=7e-95, Identity=62%"; Hit description=SET -domain transcriptional regulator-like protein
  Subcellular localization annotation: CTP_CleavageSite=49; ConfidenceScore=5.79e-01
MSFAWPTSRDEVAVSWPPATSARVRCSSPSLPSSSTRRPSPPSAHTAPPASAPSPPPPRFPAFPAAPLPSAPRPAPPLRTRTSSVPRSPTAAALALAAAAPTEAIQEPLLFLLSAYSLPESTMRSMLSLSSAPPPPPGAQDAAGLHAAVAALAPPHMLPQGLSPDLTAALLAKDRGNSFAIMEPYRHGMSLELLKARAYAVYPRASLFNHDCLPNACHFDYPDRPGPGNTDIVVRALHDIPEGREVCISYFAANWRYADRQRRLLEDYGFRCECDRCQVESQWKDDDDNNGDDGDDTMEEEGEDDVGDRGDDGIEEEEGDGATNGGDDDFPHAYFFVSG

SEQ ID NO: 52949 - protein, 452 aa, Zea mays
  Coding DNA Sequence Number=SeqID_11170
  Gene Ontology: Mol. function=transporter activity; Cellular component= integral to membrane; Biological process=transport
  Homolog annotation: Hit_ID=Q6ATP9; Match level="QueryCoverage=87%, HitCoverage=98%, E-value=1e-143, Identity=61%"; Hit description =Expressed protein
  Pfam annotation: Domain name=MFS_1; Domain location=65-385; Score =126.4; E_value=8.1e-35; Accession=PF07690.6; Description=Major Facilitator Superfamily
  Pfam annotation: Domain name=PMP22_Claudin; Domain location=110-282; Score=-49.5; E_value=0.018; Accession=PF00822.11; Description=PMP -22EMPMP20Claudin family
  Pfam module annotation: Pfam domain module=MFS_1::PMP22_Claudin; Domain location=65-385::110-282
MRHRARSSPTSPLTPSSSARITVTEIPTLSASIDRRGPHGPWKMAGFEITLTNKILGFSVSLILINLASIMERADENLLPAVYKEVSAAFNAGPADLGYLTFVMNFLKSIASPLAGILALHYDRPIVLAIGTVFWALSTGAVGVSQRFGQVAFWRAVNGLGLAIVIPALQSFIADSYKDGTRGAGFGLLSLIGAVGGIGGSILATIMAGKDYWGFPGWRVAFMMVALVSLIIGILVYLYATDPRRIPGNRLLDEDEYESSAALNSLFAIGCASGAFIGGVIADHLSKYFPDSARVMCAQFSAFMGIPFSWILLTVIPQSVDYWYAFAVTLFFMGITISWCATSANNPMFAEVVPPKHRTMIYAFDRAFEGSFASLAAPAVGLITEKIYGYDTKTVNLANGSAEGAYALSRGLLTMMIVPFGVCVLFYSPLYLVFKHDRENAKFASFKEQELV

SEQ ID NO: 52950 - protein, 95 aa, Zea mays
  Coding DNA Sequence Number=SeqID_11171
MALALMVRTIQTTRVNTNYIPPPRQAPVYPVVVDEVPVDLHHLHVENGVILEDSSEQILATPTPLSESLAFADGASSSATNTSSPTPCSRRRRSR

SEQ ID NO: 52951 - protein, 110 aa, Zea mays
  Coding DNA Sequence Number=SeqID_11172
  Gene Ontology: Mol. function=nutrient reservoir activity
  Homolog annotation: Hit_ID=P04702; Match level="QueryCoverage=99%, HitCoverage=90%, E-value=4e-30, Identity=47%"; Hit description=Zein -alpha M6 precursor
  Subcellular localization annotation: CTP_CleavageSite=28; ConfidenceScore=5.09e-01
MATKIFSLLMLLALSTCVANATIFPQCSQAPIASLLPPFLPSMIDSQQQLLPFSQLAIVYSQQQQLLPFNQLAALNPTAYLQHQILLPFSQLAAPSRASFLTQQQLLPFY

SEQ ID NO: 52952 - protein, 144 aa, Zea mays
  Coding DNA Sequence Number=SeqID_11173
  Gene Ontology: Mol. function=RNA-directed DNA polymerase activity; Cellular component=riboflavin synthase complex; Biological process =RNA-dependent DNA replication
  Homolog annotation: Hit_ID=UPI00004C1732; Match level="QueryCoverage =98%, HitCoverage=11%, E-value=5e-66, Identity=72%"; Hit description =UPI00004C1732 related cluster
MKQSLRRFDEEKRRAIGEEVHKLMATGFIKEVFHPGWLANPVLVKKKGATYQRCMNHVFGEHIDRTVEAYVDDIVVKTRKASDLLSDLEVTFGCLRAKGVKLNPEKCVFGVPQGMLLGFIVSERGIEANPEKIAAITNMGPIKH

SEQ ID NO: 52953 - protein, 192 aa, Zea mays
  Coding DNA Sequence Number=SeqID_11174
MDALGCEYLDYDRLDEEAGGIKKRVVSIQKRQAMISIKKDKKKKLPKRPKVSGETEIPKMILKPSVSKKRKTAESNRSEEEKSSPPKHTVGTPSTSSIGVIEILEIMTEPLPFTMLSPLGSELTSLLQPKEKDAREVAETKSKRDPSMPGGGNIQKKLTHDDCDESRPRYSPPIIQKRIAPSTADEAAEAPP

SEQ ID NO: 52954 - protein, 164 aa, Zea mays
  Coding DNA Sequence Number=SeqID_11175
MAKQTGVIIPMDSAQVMSPMPTGITALWVGGHPARLISFLPLAFQTTATIVAASESRPPPSAARRPHPSPARRPDPGARPPPAPAPGALSAAPSPPLERRRPRSAARRPPPPPPPERRLPLEQRPLPAPAPGVSPAARRSPPEHRPPPVPVAPLAATNAAAPDR

SEQ ID NO: 52955 - protein, 103 aa, Zea mays
  Coding DNA Sequence Number=SeqID_11176
MAPHHGGEGAAGGRLGGVGGRRRVPLDGGVPDPGGLRPHRQALAGLCSHEREEGWCSFWGSEIFISGESRTHLRLSLPCGALILMQAGKKKASPLCKGGWFGY

SEQ ID NO: 52956 - protein, 80 aa, Zea mays
  Coding DNA Sequence Number=SeqID_11177
  Subcellular localization annotation: CTP_CleavageSite=51; ConfidenceScore=5.03e-01
MASITKRIMVGRCGAQTWLARLLRSVSRVRLGQKRGSDSDVGRAVVAAVCLAQVFFNKNRLKTFDNQSSTYKENDQKANK

SEQ ID NO: 52957 - protein, 77 aa, Zea mays
  Coding DNA Sequence Number=SeqID_11178
  Subcellular localization annotation: CTP_CleavageSite=60; ConfidenceScore=5.18e-01
MLDLPSTPCATTAPHLLDSPLPPPPPRPAPPIPLIPGPVAPTPRQPPSCLSCPLYGAFLSVSTGPAGWPQAPGRNHI

SEQ ID NO: 52958 - protein, 176 aa, Zea mays
  Coding DNA Sequence Number=SeqID_11179
MASYSSFSPSSSSSSSSFPYFEHDTDREPTLEWDPQAAYEKEAPLHWDAEEWDFVMESEDENFLTDGEDLGLLFGEDREENDDDLFPSDGADESSVGEEDDVSSEEELKEEPLFVSFSDDDDNAGNGTGDTYGSTGGDENDDDEEDDDTTTTSDDDEAETSPHPSATRAARYKGKR

SEQ ID NO: 52959 - protein, 202 aa, Zea mays
  Coding DNA Sequence Number=SeqID_11180
MGHFPNLLQDVWHALGTYVCPLYDTRRVPEPPWAYYYITCVHIRVMDAGDRGFMTLSAYVASYHESLMPLSTYVSSVSNAARRALWSLSHTYRQLLHDTRYRHLPQCLREESQTSVVPSEAGEDRINTLVGVVAGLNTDLDSATLDLSRVHGELEEAHARIATLEAQLKGRNPPEAQVPAMAVFSPRKRIHYGKPGSITRLL

SEQ ID NO: 52960 - protein, 39 aa, Zea mays
  Coding DNA Sequence Number=SeqID_11181
MDLDPLPILRCIHASLALKNLHNSMNVQPFNDPTSPLAE

SEQ ID NO: 52961 - protein, 252 aa, Zea mays
  Coding DNA Sequence Number=SeqID_11182
  Gene Ontology: Mol. function=kinase activity; Cellular component =fibrinogen complex; Biological process=protein polymerization
  Homolog annotation: Hit_ID=Q6QP54; Match level="QueryCoverage=68%, HitCoverage=42%, E-value=1e-14, Identity=37%"; Hit description =Putative kinase
MARRWPGATVADLRGCTEDGGVRLTAAKSSLGRHRKLRLAQPQGSDSTSTPEDGPRLARPQGSDSTSTSEDGLRLARPQGSDSTSTPEDGLRLARPQGSDSTSTSEDGLRLARPQGSDSTSTPEDSLRLARPQGSDSTSTSEDGLRLARPQGSDSASTSEESPPRPTSGSDRPRHRGAIITLPLASSGYGEQDRRPIWLAPVKQVMMAPRVLHDDGGYQPLTEARRRQQGSDSPDSCASAWLKHSSDGHEIT

SEQ ID NO: 52962 - protein, 48 aa, Zea mays
  Coding DNA Sequence Number=SeqID_11183
MARRWPGATVADLRGCTEDGGFCLSVAISTAKAKFQSILDEYEYKIET

SEQ ID NO: 52963 - protein, 66 aa, Zea mays
  Coding DNA Sequence Number=SeqID_11184
MQRWMNDIDKDSATTVMRTLGLCEGSGKAGDLQRSSPSDQTAGASSPALRTMGAISAALAKATGRG

SEQ ID NO: 52964 - protein, 172 aa, Zea mays
  Coding DNA Sequence Number=SeqID_11185
MIKNHSTDLSDRLEKKIIEIDLTYVASSMRSHTTSPATPTAYLIDGLPCSNLAAGAAKSPANLPGVCGKTGAGEQDYKTHQLPPPTTVCSQEKAQGSTSSLHASPQQDCRRVAGVGPCSPGPVVSEAQKKDQYSKLFCNPIPDTQLAVLAAIFGWAVEEGLETRPSLPLDVL

SEQ ID NO: 52965 - protein, 745 aa, Zea mays
  Coding DNA Sequence Number=SeqID_11186
  Gene Ontology: Mol. function=RNA-directed DNA polymerase activity; Cellular component=intracellular; Biological process=RNA-dependent DNA replication
  Homolog annotation: Hit_ID=UPI00004C1731; Match level="QueryCoverage =94%, HitCoverage=52%, E-value=0.0, Identity=83%"; Hit description =UPI00004C1731 related cluster
  Pfam annotation: Domain name=RnaseH; Domain location=312-439; Score =12.1; E_value=4.3e-06; Accession=PF00075.14; Description=RNase H
  Pfam annotation: Domain name=rve; Domain location=441-616; Score =89.8; E_value=8.6e-24; Accession=PF00665.16; Description=Integrase core domain
  Pfam module annotation: Pfam domain module=RnaseH::rve; Domain location=312-439::441-616
MPFGLRNAGATYQRCMNHVFGEHIGRTVEAYVDDIVVKTRKASDLLSDLEVTFRCFKAKGVKLNPEKCVFGVPRGMLLGFIVSERGIEANPEKIAAITNMGPIKDLKGVQRVMGCLAALSRFISCLGERGLPLYRLLRKAECFTWTPEAEEALRNLKALLTNAPILVPPAAGEALLIYVAATTQVVSTAIVVERQEEGHALPVQRPVYFISKVLSKTKIRYPQVQKLLYAVILTRRKLRRYFESHPVTVVSSFPLGEIIQCREASGRITKWAVEIMGEAISFAPRKAIKSQVLADFVAEWVDTQLPTAPIQPELWTMFFDGSLMKTGAGAGLLFISPLGKHLCYVLRLHFPASNNVAEYEALVNGLRIAIELGVRRLDARGDSQLVIDQVMKNSHCHDPKMEAYCDEVRRLEDKFYGLELNHIAGRYNETADELVKIASGRTMVPPDVFSRDLHQPSVKIDDTPEPEAPSAQPEKAPGGYTHLLVTIDKLSKWIEVRPLNSIRSEQAVAFFTNIIHCFGVPNSIITDNGTQFTGRKFLDFCEDHHIRVDWATVAHPMLNGQVERANGMILQGLKPRIYNDLNKFGKRWMKELPSVVWSLRTTPSRATGFTPFFLVYGAEAILPTDLEYGSPRTRAYADQSNQVNREDSLDQLEEARDKALLHSARYQQSLRRYHARGVRSRDLQVGDLVLRLRQDARGRHKLTPPWEGPFVIAKVLKPGTYKLANSQGEVYSNAWNIQQLRRFYP

SEQ ID NO: 52966 - protein, 448 aa, Zea mays
  Coding DNA Sequence Number=SeqID_11187
  Homolog annotation: Hit_ID=Q6QP54; Match level="QueryCoverage=18%, HitCoverage=29%, E-value=5e-17, Identity=61%"; Hit description =Putative kinase
MDSFSFLKYLRGGVLTGAHRAPAAATTIAASACEYGDDASSFFDLEFAVPGDESATSDVEEERVELSFAAGDEGVVAPVAAVAPAAEAEPEAAPPPSLPRPATRFRVLLLKLRKPKGGLAAADAAGTSAAPVASRFLVKLRVDDATPLASLFTRDNSSRASDAVADRPATAAAAAAEPQQQEQEVAASITAEERRFAKEVVLRYLSKIRPLYVKVSRRYGERLRFGGAASEGEEETDAEADPSPSQAPPPSVPAGVVACGVRAPRASVPAGLKQACKRLGKSRSASSAVAVAPSPAAAALSGPQPQRRDDSLLQVQDGIQSAIAHCKRSFNACNGTGTGPPQRCNSSPYASFPVAVTCDSERASPAVPESAWGRVMMAPPVDVAGLRPRLGDVEAPPRSSLSSVAVVESEPLGRARRRLSAEARAESEPWGRAKRSSLSSGAEPKSEP

SEQ ID NO: 52967 - protein, 248 aa, Zea mays
  Coding DNA Sequence Number=SeqID_11188
  Gene Ontology: Mol. function=3-methyl-2-oxobutanoate hydroxymethyltran sferase activity; Cellular component=membrane fraction; Biological process=pantothenate biosynthetic process
  Homolog annotation: Hit_ID=Q9AWZ8; Match level="QueryCoverage=97%, HitCoverage=71%, E-value=1e-109, Identity=78%"; Hit description =Putative 3-methyl-2-oxobutanoate hydroxymethyltransferase
  Pfam annotation: Domain name=Pantoate_transf; Domain location=1-202; Score=227.8; E_value=2.3e-65; Accession=PF02548.6; Description =Ketopantoate hydroxymethyltransferase
MVVHGHDTTLPITLDIMLEHCRAVARGAPRPLLVGDLPFGCYESSAAQAVDSAVRVLKEGGMDAIKLEGGAPSRITAAKAIVEAGIAVMGHVGLTPQAISVLGGFRPQGKTVDSAIKVVETALALQEAGCFSVVLECVPAPVAAAATSALKIPTIGIGAGPFCSGQVTPKFCKQFGNVGDVINKALSEYKQEVEAQAFPGPSHTPYKITPTDVDGFADALQKMGLSDAADAAAAAAENREKGGEPKGE

SEQ ID NO: 52968 - protein, 564 aa, Zea mays
  Coding DNA Sequence Number=SeqID_11189
  Homolog annotation: Hit_ID=Q9LHJ0; Match level="QueryCoverage=79%, HitCoverage=58%, E-value=1e-47, Identity=32%"; Hit description =Arabidopsis thaliana genomic DNA, chromosome 3, P1 clone: MMP21
MLPNGEAPSGSMPPVPAADANTSNSDDTRFDASQYAFFGNNVLEEIELGGFEDDNSSNAAFAGLDDLERPLSSQGIALEAEDSSFSDLDDLANTFSKLRRDVNLPKHIGVNNLGTSFSRESSAAADWAPEFESPLWSDQHVLVANQGPNGNGWWSPQHHSSLLADSRLHRTSSSPQQQEQHNHDAPILGPRPSPLHRTSSYPQKEPQYNPAEVIPNAPYMSNYLPGGPPNSVPRQPHQMNMPSFNEFQMHMSAQSETPFSQFPRGGTPPEPLFGGNRGHMISTGFSTNSSGQRDHLLNNGQFHGETASIMPNLLPNHLQRPNTFMPPQLLTVRQQHGMLPIQQSSKQSSRTQTHMFGPQHPPQMMNRFDNFGMPEFSDPRARSSMHHGRQGQHFPLHGSEFGIMKMGNGRSRFRSKYMSTEELENILRIQHAATHINDPYIDDYYHQACLASRYVDARSKHRFCPTLIRDPSSCTRSKDEPHAYLKVDALGRLPFSSVRRPRPLLDVEPASATDDDTVISKPLDQEPLLAARITIEDGLSLLLDIDDIDRLLQFSPAARWWFRT

SEQ ID NO: 52969 - protein, 480 aa, Zea mays
  Coding DNA Sequence Number=SeqID_11190
MAVQHREIMAKSVSRRLPSMHEDWAIINIHPLPEHEVLFPVVRDVVREYLVEHRRVGVRAIQRSHLGQANGFVGDSWTVQCEIIQQNMLGGQAQDEDPIPPAPEDGQQLPWFSLVWVNPCPRLGLTSISRAEPVGGDLPVHQDANAQGDWDQWIENIQPNQQIPQPIQPDLQPIQPDELQLSNQHSGLSSDSSFGAVQVAPLQNGHIVEDGPVLPGDGLAFNVAPFNGPQEVDGPTLQMDLLPTIADLPHQAQDGDPNNNQFQNLEMNFMFTQEWQPNPVFQMFMERKRSAQFSRLWAMYFAPAESTGLLVEIPKNGHPFFSRICYNLKPSDALLEPGLKSLSFAIPKECPKDKFLDDVLSENPKKTDSCDAPAPIIVESELRRSKRLKESRVGFRQGACPKRNCLMCQHNFDGPPSLSSKVIRNLGTRFCNLSDDDLSERSLKKKKSVAGSVGQKRTGRKDMDDERNEDSTDEDKQDKL

SEQ ID NO: 52970 - protein, 172 aa, Zea mays
  Coding DNA Sequence Number=SeqID_11191
MPSGGTGVTEVPGRLSPPERANGLGSGVVQWTGCRGGAARPPEGDHGQGEECSPALAEEEGCPAELEEVVEGEDAMDPRELGFEGGWALEALSGPEVRHTVEVWSRAGGGAPVPAKNPGGQERDSAQAKPRRASVCAWLPPESIPEGWTWVVEHDLGEKWPDDGRSVPARNP

SEQ ID NO: 52971 - protein, 172 aa, Zea mays
  Coding DNA Sequence Number=SeqID_11192
MPSGGTGVTEVPGRLSPPERANGLGSGAVQWTGYRGGAARPPEGDHGQGEECSPALAEEEGCPAELEEVVEGEDAMDPRELGFEGGWALEALSGLEACHTMEAWSRAGGGAPVPAKNPGGQERDSTQAKPRRASVCAWLPPESIPEGWTWVVEHDLGEKWPDDGRSISARNP

SEQ ID NO: 52972 - protein, 111 aa, Zea mays
  Coding DNA Sequence Number=SeqID_11193
MVKPQGEQSDPERRYGRGSMAHRRVPPRAWFMGGSPVMTMARGKAGPDFYTEAESAFKESMAENLADAIARDPWRVWRCSAARHAVRYEEDATDIPGPRHREAYKWDRPSV

SEQ ID NO: 52973 - protein, 270 aa, Zea mays
  Coding DNA Sequence Number=SeqID_11194
  Gene Ontology: Mol. function=sequence-specific DNA binding; Cellular component=endoplasmic reticulum; Biological process=lipid biosynthetic process
  Homolog annotation: Hit_ID=Q6EUN0; Match level="QueryCoverage=90%, HitCoverage=92%, E-value=3e-90, Identity=59%"; Hit description=ASC1 -like protein 1
  Pfam annotation: Domain name=LAG1; Domain location=107-267; Score =188.8; E_value=1.3e-53; Accession=PF03798.6; Description=Longevity -assurance protein (LAG1)
MAALLELFLGSSPTPVDWEAEVYPAYGDFAVLPLLVAFFPAVRFLLDRLVFEICAGVGLGKVLARKFIFGKGHDKLSETDDSRKKINKFKESAWKFVFFLSGELLSLSVTYNEPWFKNTRYFWIGPGDQIWPDQKIKFARVGTVVLALHDASDIFLEIGKMAKYSSCEWLAVMAFLLFVASWILLRLVMFPFWILRSTSYEVLLTLDREKHRFYGPIYYYVFNCLLFSLLVLHIYWWVLIWRMLVKQIQSKGRVGDDVRSDSEGEDEHED

SEQ ID NO: 52974 - protein, 157 aa, Zea mays
  Coding DNA Sequence Number=SeqID_11195
MKPKPKLEAPMQKTPKKSNRMTSIMYVLFGATSIKESSHVEPIPPKRDDVVDAVAAMSQKPAGIEVNVSEKKTTPEGDEDNEDGEAERLKNKKGTPLLEGVEHVFCHAANKKFTIKQIGEVQSYAEGIGYPTRATMFGGNKEDQLYCCLYNMEIDAC

SEQ ID NO: 52975 - protein, 73 aa, Zea mays
  Coding DNA Sequence Number=SeqID_11196
MGVQVKGTARRALTNAAIALEASKAEKTWGQTQDAGRRPGRSREQEIEHVGDEEDVEAGRARGRVGQIEAGGS

SEQ ID NO: 52976 - protein, 107 aa, Zea mays
  Coding DNA Sequence Number=SeqID_11197
MSMIRRPSTETLAMADVDWARYDDRAFHDDDQDTPPEHLRAFEAFVETVVPLDMVLAFGREQSTRARRPGHGREDDVKEKLKLWAKAVAAKARRQYITKQDNDDQNA

SEQ ID NO: 52977 - protein, 123 aa, Zea mays
  Coding DNA Sequence Number=SeqID_11198
MTLHSSTDELDRRGFVDVWQRAKKRHLKMLDGDLKRRLNSRADAIKKKAVKSSSTLLEVTTVGSPPGSVMPGVASGDLRQSVVVSEVATAILQPSKSKAAMLHSRWSHLPRSWGVTSSTCQWV

SEQ ID NO: 52978 - protein, 125 aa, Zea mays
  Coding DNA Sequence Number=SeqID_11199
  Gene Ontology: Mol. function=DNA binding; Cellular component =mitochondrion; Biological process=DNA integration
  Homolog annotation: Hit_ID=UPI00004C1733; Match level="QueryCoverage =88%, HitCoverage=9%, E-value=9e-57, Identity=86%"; Hit description =UPI00004C1733 related cluster
  Pfam annotation: Domain name=rve; Domain location=2-118; Score=40.0; E_value=8e-09; Accession=PF00665.16; Description=Integrase core domain
MQHLEPSSETLSDKKAPGGFSHLLVAIDKFSKWIEAVAFFTNIIHRFGVPNSIITDNGTQFTGKKFLDFCEDHHIRVDWAAVAHPMTNGQVERANGMILQGLKPRIYNDLNKFGKWWMKELPSVV

SEQ ID NO: 52979 - protein, 106 aa, Zea mays
  Coding DNA Sequence Number=SeqID_11200
  Gene Ontology: Mol. function=kinase activity
  Homolog annotation: Hit_ID=Q6QP54; Match level="QueryCoverage=85%, HitCoverage=30%, E-value=8e-16, Identity=53%"; Hit description =Putative kinase
MDRRVNCRRMPQPRWVGARRSAKGGEEVEGRQASKGKPAAFVFVPRPGRGNDGASCDVVGPSPGLGEVEAPPRSRSSLSSKAEVESEPLGRARRRPSAEVRSESEP

SEQ ID NO: 52980 - protein, 184 aa, Zea mays
  Coding DNA Sequence Number=SeqID_11201
  Homolog annotation: Hit_ID=Q6QP51; Match level="QueryCoverage=83%, HitCoverage=64%, E-value=2e-33, Identity=58%"; Hit description =Putative growth-regulating factor 1
MAPRKGSTATPEQLGPEPITDQGFEGWPLGRVRQLPQSTRAPHPLLIRGSKAGPSEGFDSRPKACKVRDDFGYVRYMAEARATLPRGRHRALGPYRMGPGPANHLQVKTSSTKGRNLASPEPGPRAGTVVPGRIHASPEGLLRAVGRTLGSPKAQLRQASSRSNLGQVALPTDRIAGAFNAKTV

SEQ ID NO: 52981 - protein, 112 aa, Zea mays
  Coding DNA Sequence Number=SeqID_11202
MRYFLPVHDVWKSRATVAAAQRTTMDSGERFRPSQWPHLRSDGESAKRPRYGSAPGESGSPVSPSSEFMGGIFFCWMRLNEQGRVRRRHGSVGIGPIARARAQQPRPNRPGG

SEQ ID NO: 52982 - protein, 417 aa, Zea mays
  Coding DNA Sequence Number=SeqID_11203
MASTRGSHAQAPHQPQAQPNLELELESALGMRKNHVKVHRLTLAPAKCTSEVSLQVINKEEEKILHKEEFQRRIELASSGGVRDLHHVHGVEPDMEVDKGVAMEVAPKEEGSMAHETSKQAAKEPEQVKPQEEIIPRSNEAVVQAMALLQKAFGGVENAKTEQKATGSVTQEQLKKNTQEGIQIKMSNGKDVAESSAQGASKANMNSEVIMSIRWCCLKSGYGVEIEDNSPHSAPMDMDNKEDNSDAHGGSSKKIDKMDERNNTTGRKHNLLGTEQGHGAPWSVNDTSKTTNRLAAAESQIVVKEIHAVTNLSQEVVMEEIAQEDEEDMEDDFASKIRQLIDPETVESEDMVLPIEGALRFEKLAAIPEASPPSRRSKRRGEVASPDQHSQKRAEMLKARRNLDFPTKGVYSELYRG

SEQ ID NO: 52983 - protein, 74 aa, Zea mays
  Coding DNA Sequence Number=SeqID_11204
MARHPCYLLPLVIPPALLLLSSQQQPSAPIPQQPHWPTPCSGNEADAPAAPCPGARRWLSFTVPCRRGAVALPP

SEQ ID NO: 52984 - protein, 74 aa, Zea mays
  Coding DNA Sequence Number=SeqID_11205
MVRHPCYLLLWSFAPALLLLSSQQQPSAPIPQQPHWPTPCSGNEADAPAAPCPGARRWLSFTIPCRRGEVALPP

SEQ ID NO: 52985 - protein, 94 aa, Zea mays
  Coding DNA Sequence Number=SeqID_11206
MASTCGSHAQAPHQPQAQPNLEPELVHVDKANLDTISVNNCTNGLHKEGLVDDAEQIAGNKIDEAEAGAHDNKKLRRGDGTRKLNPKYYGANWL

SEQ ID NO: 52986 - protein, 117 aa, Zea mays
  Coding DNA Sequence Number=SeqID_11207
MAKSKLGLEPWSSELRRLGRSDGEKEGGRLKVRRPGGEEELLLAYTIGAEERKGAMGGREPSSLRAGEEGPLLRVGEGARERRKWRLGELEGWEWKISKFARERGPIYRHVVGLGFS

SEQ ID NO: 52987 - protein, 113 aa, Zea mays
  Coding DNA Sequence Number=SeqID_11208
MGPRRMFPRIAGIQGGYPYHQFGKRMIEALVISCHGTNIAMESPSLWSGKRAAKFTPVGVGLGHQCAQMGQLRRVTPPRGNPVPLACALEVGEDPIAIDFKCAAEIRLLHTDS

SEQ ID NO: 52988 - protein, 65 aa, Zea mays
  Coding DNA Sequence Number=SeqID_11209
MKATYVSPSCAVTLELFTTRLAEPEDVCLPALYLSAGSVKISLCPGVLAKACSALELFAALSIEL

SEQ ID NO: 52989 - protein, 81 aa, Zea mays
  Coding DNA Sequence Number=SeqID_11210
  Homolog annotation: Hit_ID=Q6Y2W8; Match level="QueryCoverage=75%, HitCoverage=8%, E-value=5e-07, Identity=53%"; Hit description=GCK -like kinase MIK
MAAELKTTGVELWLPPLVAVGGGSFRSPAQLQAGPPLDEMSIPYIPRNLLHAIEYLHSEGLVWNRGPQADLLERAHKILFT

SEQ ID NO: 52990 - protein, 203 aa, Zea mays
  Coding DNA Sequence Number=SeqID_11211
  Homolog annotation: Hit_ID=Q5ZC88; Match level="QueryCoverage=35%, HitCoverage=9%, E-value=3e-25, Identity=73%"; Hit description=CUL1
  Pfam annotation: Domain name=Cullin; Domain location=1-180; Score= -72.7; E_value=0.0012; Accession=PF00888.12; Description=Cullin family
MIDKEHEGEQIDRAVLKNVLDIFVEIGLGQMECYENDFEDFLLKDTTEYYFVKAQSWIFEDSCQNYMIKVEDLCMMYRLFSKISHGWASQPELVNLKILNISGKFYFCIILKRVVIPLQCTGTQLVEKYRKTGNVSVEIAGPHKLRWHTGAGEVSGPTHCSCGSGTETDFGLFGLSHSSPVTPRLRTLPTTRDENGQKRSVEG

SEQ ID NO: 52991 - protein, 221 aa, Zea mays
  Coding DNA Sequence Number=SeqID_11212
  Homolog annotation: Hit_ID=Q6ZI62; Match level="QueryCoverage=23%, HitCoverage=12%, E-value=1e-10, Identity=76%"; Hit description =Glycosyl transferase-like protein
  Subcellular localization annotation: CTP_CleavageSite=42; ConfidenceScore=5.26e-01
MENLCRLHGWMTGAGGRRCTGTGPERRGARTSGRRTRSSSPTADSAWHCSSFCFRRISDFAKTAWHWTVDHTGSCWGLVVGVVGAHTRSTEATNESNSAWHYSSFCFRRISDFTKTAWHWMVDCTGSRWGLVVGAESGRTTESNPFAARAVRIHLRKVRDSQAKACGIPYEKKKKRKRAQQATKPSTSLSTAAAGSGRATTAAAAAAPAQAGGSSAAPSST

SEQ ID NO: 52992 - protein, 161 aa, Zea mays
  Coding DNA Sequence Number=SeqID_11213
MGKSKKGGSSSHHSGDKRKREPTPPSEDFGDSEYLEEEFSSESEGSPVHVSPPASSDDSDDSQGIAAEVWTYIRAIERAGLEGSDESEVSSDEENSSDSSEVGGDGEGDSDDGGDDEGDGDDGGDGEGDGDGNGDGGEGGGKDSSGDGRDGSSKGSNKASG

SEQ ID NO: 52993 - protein, 223 aa, Zea mays
  Coding DNA Sequence Number=SeqID_11214
  Gene Ontology: Mol. function=nucleoside-triphosphatase activity; Cellular component=nucleus; Biological process=regulation of transcription, DNA-dependent
  Homolog annotation: Hit_ID=Q43704; Match level="QueryCoverage=94%, HitCoverage=36%, E-value=1e-101, Identity=87%"; Hit description=DNA replication licensing factor MCM3 homolog
  Pfam annotation: Domain name=MCM; Domain location=2-219; Score=47.2; E_value=2.2e-20; Accession=PF00493.13; Description=MCM235 family
MPWLEAGAIVLADRGVVFIDEFDKMNDQDRVAIHEVMEQKTVTIAKAGIHASLNARCSVIAAANPIYGTYDRSLTPTKNIGLPDSLLSCFDLLFTVLDQMDPEIDRQISEHVARMHRYCTDDGGARSLDKEGYAEEDDGDANAAIFVKYDRMLHGQDRRRGKKSKQDRLTVKFLKKYIHYAKNLIQPRLTDELQEFFGPSDDQAPKILGAGTLPKISGPSDGR

SEQ ID NO: 52994 - protein, 64 aa, Zea mays
  Coding DNA Sequence Number=SeqID_11215
MAWEREWGRDALDLRCLEADGDGGLGELGNGELRPWQSEKANRGILKSLLIWGFEFGADTKILG

SEQ ID NO: 52995 - protein, 47 aa, Zea mays
  Coding DNA Sequence Number=SeqID_11216
MADQGRKNLTMVTQRLTLSTAHGEFAATVMNWRRPDRSPSLIPLFQT

SEQ ID NO: 52996 - protein, 89 aa, Zea mays
  Coding DNA Sequence Number=SeqID_11217
MASVLDAVKESVKTSTPASTEAPSLALAPTLADVDDAYVRAESGDLAIDLHGLADANGEQDTGMGRGAVAWAGSVSVGTDGDICRRMDA

SEQ ID NO: 52997 - protein, 174 aa, Zea mays
  Coding DNA Sequence Number=SeqID_11218
MDALGFEYPDYERLDEGAGGVKKKRVLSILKRQAQRFVEKDEKKRITKNPKLTPKPSPSKKRRTVPSSHGEEGPSLPKHSAETPSITSISVIEIPERFERSCPTVADEGPQQAENNGGLLETTLLEIDRLIANVAPKKNTEGTIAAETSASKGKRTEEVSLEDKSIDLRNLGGQ

SEQ ID NO: 52998 - protein, 128 aa, Zea mays
  Coding DNA Sequence Number=SeqID_11219
MGKSKKGGSSSHHSGDKRKREPTPPSEDFSDSEYSEEEFSFESEGSPTSPKGSPQRYGPTSGPSSVSGSNETEVSLDEENSSDSSEEGGGGGDGEGDGDDGNSGKGGGDGGEGGGSKGSSKGSNKAND

SEQ ID NO: 52999 - protein, 93 aa, Zea mays
  Coding DNA Sequence Number=SeqID_11220
MSGNMVTDLVGTSMATAWWQPGSVEHCMPRRGKSWPRRADGKRKRPSSLPSKDFGDSEYSEEASSEYDKSPAPASPMASFEESDDSMGMSTAA

SEQ ID NO: 53000 - protein, 144 aa, Zea mays
  Coding DNA Sequence Number=SeqID_11221
MANYKCTFGLKKSKGTSVMRMPSLREQENHSHFRPKYLGKTCDFWKFLKQKRSSTYPIKDLKSQKGEEILGTYYALWTSTNGYNYVAFILIHLHSLDYNLTDEEYVLIQEPEAQQEEARELAPELVAEESPAAPTIEGKPRFYA

SEQ ID NO: 53001 - protein, 45 aa, Zea mays
  Coding DNA Sequence Number=SeqID_11222
MARPCKHAAAGYSNGGAASLAMMGLGLGAGTDQDGEGKDRMNAIF

SEQ ID NO: 53002 - protein, 281 aa, Zea mays
  Coding DNA Sequence Number=SeqID_11223
  Homolog annotation: Hit_ID=Q1S060; Match level="QueryCoverage=84%, HitCoverage=91%, E-value=2e-42, Identity=39%"; Hit description =Arabidopsis conserved protein
  Pfam annotation: Domain name=DUF241; Domain location=48-247; Score =95.1; E_value=2.1e-25; Accession=PF03087.5; Description=Arabidopsis protein of unknown function
MAAQTIHHARSNSFPLPSRPNPLVSELDEHLNRLRDSEATSTSSSISHKLNGLQDLYDCVDKLLRLPFSQQELAQEENKGPVDELLDGPLRLFDLCNTAKDILLQTKGSIQDIQSVMRRRPCGEVKLVGEVRKYFTSRKVVQKTIHKALKTVKGVETKCIFSSSNDHETKAMVSLLREAEAVTSSMFEYLFTLISGPMDDQSVAAGLMSQKMSKSENVEMPRQLKELELCVQDLEDGLECLFRARGIEPVVTSFKVNAPEKSKIGIVSVGIYIVVLKPKTR

SEQ ID NO: 53003 - protein, 787 aa, Zea mays
  Coding DNA Sequence Number=SeqID_11224
  Gene Ontology: Mol. function=DNA topoisomerase (ATP-hydrolyzing) activity; Cellular component=chromosome; Biological process=DNA topological change
  Homolog annotation: Hit_ID=Q6Z3H8; Match level="QueryCoverage=80%, HitCoverage=67%, E-value=1e-100, Identity=35%"; Hit description =Putative bzip-related transcription factor
  Pfam annotation: Domain name=DUF630; Domain location=1-60; Score =101.5; E_value=2.5e-27; Accession=PF04783.3; Description=Protein of unknown function (DUF630)
  Pfam annotation: Domain name=DUF632; Domain location=371-678; Score =425.6; E_value=6.9e-125; Accession=PF04782.3; Description=Protein of unknown function (DUF632)
  Pfam annotation: Domain name=Extensin_2; Domain location=40-391; Score=-140.3; E_value=0.081; Accession=PF04554.4; Description =Extensin-like region
  Pfam module annotation: Pfam domain module=DUF630::DUF632::Extensin _2; Domain location=1-60::371-678::40-391
MGCSSSKLDDPPAVALCRERCSFLDEAIQQRFILAEAHVAYTASLKLFGQSLNNFVDNDFGTSSGALPPSPPSPNKLKSKAVDPVQVGSSSPKKDVISHHHSHSHSGSHLHFDSGSDEDDSAGSLHHSDHSSPLHHDGGGPHIEYLHQNYPNYGAYETGSFPGGYMHMNFMKKQPTPSIVYEQRPVNPEIVYMGESSSLSSSYNNNNPSSSSYPYPGYQNYGGFSNYASYSAPGYQSSLQPSSMAGGSSLKPPPPPPSPPRTSAWDFLNPFESYENYNHPYTPSRDLREVREAEGIPDLEDENYQHEVVKEVDGDKKFVDSGGYSKSPAEEAAKGVVNSEAEASLYQSRPSVGVENDRVEYEVHVVDKKVVSDETAEERGKGSKGPPRNVFEVIREIQVQFVKASESGSEIAKLLEVGTLPYHRKHASKMLQVVTPSLSLVSSQRSTSKTDSSANNTDPAFLDLNEELAKKQRNLSSTLQKLYLWEKKLYNEVKAEEKMRVAYDRKCRKLKRLDERGAEANKVDSTRNIIRSLSTKIRISIQVVDKISVTINKIRDEELWPLLNELIEGLNRMWKCMLECHHSQCQLEHELISWTIRFSSWIGAQKGYVRALNNWLLKCLHYEPEVTDDGIAPFSPSRVGAPPIFVICNQWSQVMDTISEREVVDSMRIFAMSIFQLWEQDKSEMHQRMMANKDLERKARNLDREDQKLHKEIQAMDKKIVLVSGDGNSLSVAGHVYQSDTSNASLQGSLQRIFDAMERFSSESSKAYEELLERVKERIAQDHERIT

SEQ ID NO: 53004 - protein, 485 aa, Zea mays
  Coding DNA Sequence Number=SeqID_11225
  Gene Ontology: Mol. function=protein kinase activity; Cellular component=chloroplast; Biological process=protein amino acid phosphorylation
  Homolog annotation: Hit_ID=Q10S67; Match level="QueryCoverage=98%, HitCoverage=96%, E-value=0.0, Identity=71%"; Hit description=Protein kinase family protein, putative, expressed
  Pfam annotation: Domain name=Pkinase; Domain location=81-300; Score= -36.2; E_value=2.1e-06; Accession=PF00069.15; Description=Protein kinase domain
  Pfam annotation: Domain name=Pkinase_Tyr; Domain location=81-300; Score=-71.2; E_value=4.2e-08; Accession=PF07714.7; Description =Protein tyrosine kinase
  Pfam module annotation: Pfam domain module=Pkinase::Pkinase_Tyr; Domain location=81-300::81-300
MGCCQSSCLTETHPENDQSRQQQQEHRNHSQAVSGAGPDPAVANGVPSFSEFSLADLKAATNNFSSDNIVSESGEKAPNLVYKGRLQNRKWIAVKKFTKMAWPDSKQFVEEACGVGKLRHRRLANLIGIDYRLILLGENQTIEWAMRLRVATCIAEALDYCSSEGHPLYHDLNAYRVLFDEDGDPRLSCFGLMKNSRDGKSYSTNLAYTPPEYLRNGRVTPESVIYSFGTVLVDLLSGKHIPPSHALDMIRGKNIVLLMDSHLEGKFSMEEATVVVGLASQCLQYEPRERPSMKDLVATLAPLHTKPDVPSYVMLGISKYEEAPPTPQRPLSPMGEACSRLDLTAIHQILVMNHYKDDEGTNELSFQEWTQQMRDMLEARKRGDYAFRDKDFKTAIDCYSQFIDVGTMVSPTVFARRSLCYLFCDQPDAALADAMQAQIVNPEWPTAFYMQSVALAKLDMHKDAADMLNEAAGLEEKKQRVVKGS

SEQ ID NO: 53005 - protein, 183 aa, Zea mays
  Coding DNA Sequence Number=SeqID_11226
MENSNSLYDRNGEGDNPLDDPNIKKVRFKELEISPEDVMVVDSTPTPTLSRKDLILGKSSLELNEVGGDHFVDGGFSLIEGDVKKSVANGIPFIDFSEREHQLLVKEMSTSVVLKLLGRNIGFVALQDILYGIWRPSKTFQLMDIENGYFLTKFQSPNDYENNSFTRVMAYFGAIFNSTTLDC

SEQ ID NO: 53006 - protein, 52 aa, Zea mays
  Coding DNA Sequence Number=SeqID_11227
MDVSKPKEFKGMRLARDVDNFLWGMEQYYVLVIDTIPMPYVPTCVADSLKLM

SEQ ID NO: 53007 - protein, 398 aa, Zea mays
  Coding DNA Sequence Number=SeqID_11228
  Gene Ontology: Cellular component=integral to membrane
  Homolog annotation: Hit_ID=Q9AR56; Match level="QueryCoverage=93%, HitCoverage=92%, E-value=1e-115, Identity=54%"; Hit description =Putative membrane protein
  Pfam annotation: Domain name=Cytochrom_B561; Domain location=172-373; Score=-83.3; E_value=0.075; Accession=PF03188.6; Description =Cytochrome b561
  Pfam annotation: Domain name=DUF568; Domain location=87-213; Score =176.9; E_value=5.2e-50; Accession=PF04526.4; Description=Protein of unknown function (DUF568)
  Pfam module annotation: Pfam domain module=Cytochrom_B561::DUF568; Domain location=172-373::87-213
MEKTRKIVLFACLLLVSFLASSSAQTCLNHSFSNRQYANCSDLPALNCFLHWTYDEAAGTVEVAFRHTGTTSSRWSAWGINPSGPSMLNTQALVAYVNSSGIPHAFTTSIDSMSPSMQQSALSFQVPSLSAEFENNEMRIFAVMRISESLLATNQVWQEGPVSNDQLMIHPTSGDNMRSTASVNFLTGQSGGTSSGSSRTRRRNVHGVLNTVSWGILMPLGAITARYMKVFKSADPAWFYLHVVCQTSAYAVGVAGWATGIRLGSDSAGVTHNPHRNIGITLFCLGTLQVFALLLRPNKDHKYRLYWNIYHHSVGYAVIILSIINIFDGFDILHPDDHWERIYIGILIFLGVVATLLEGITWYIVLRRKNRGSDTDKRSQSINGANGVNGFGARGQDV

SEQ ID NO: 53008 - protein, 712 aa, Zea mays
  Coding DNA Sequence Number=SeqID_11229
  Gene Ontology: Mol. function=threonine-tRNA ligase activity; Cellular component=soluble fraction; Biological process=tRNA aminoacylation for protein translation
  Homolog annotation: Hit_ID=Q6ER90; Match level="QueryCoverage=68%, HitCoverage=73%, E-value=0.0, Identity=79%"; Hit description =Putative threonyl-tRNA synthetase
  Pfam annotation: Domain name=Glyco_hydro_28; Domain location=402-702; Score=324.0; E_value=2.5e-94; Accession=PF00295.8; Description =Glycosyl hydrolases family 28
  Pfam annotation: Domain name=tRNA-synt_2b; Domain location=194-360; Score=205.9; E_value=9.1e-59; Accession=PF00587.15; Description=tRNA synthetase class II core domain (G, H, P, S and T)
  Pfam annotation: Domain name=tRNA_SAD; Domain location=87-139; Score =94.2; E_value=3.8e-25; Accession=PF07973.4; Description=Threonyl and Alanyl tRNA synthetase s
  Pfam module annotation: Pfam domain module=Glyco_hydro_28::tRNA-synt _2b::tRNA_SAD; Domain location=402-702::194-360::87-139
MAVQKLYPDAKVTIGPWIDNGFYYDFDMEPLSDNDLKRIKKEMDRIIKRNLPLVREEVSRDEAQKRIMAVNEPYKMEILDSIKEDPITIYHIGNEWWDLCAGPHVETTGKINNKAFQLESVAGAYWRGDEKKPMLQRIYGTAWENEEQLKAYLHFKEEAKRRDHRRIGQDLDLFSIQEEAGGGLVFWHPKGAIVRHIIEDSWRKTHIEHGYDLLFTPHVARADLWKISGHLDFYKENMYDQMEIEDELYQLRPMNCPYHILVYKRKLHSYRDFPIRVAELGTVYRYELSGSLHGLFRVRGFTQDDAHIFCLEDQIKDEIRGVLDLTEEILLQFGFSKYEVNLSTRPEKAVGDDDIWEKATVALKDALDDKGWSYQIDEGGGAFYGPKIDLKIEDSLGRKWQCSTIQASFDLSPNFCLSYLTLSILSCIICNSASYLTEHYAGDFPLWLAPIQARVLPVTDTQLGYCNEVVGKLKSNGIRAEVCHGCSNITFQSFTVSAPEESLNTDGIHIGRSDGVYILDSKIETGDDCVSLGDGSNNVKVQGVTCGPGHGISIGSLGKYKNEEPISGVFVTQCTLANTMNGVRIKTWPASQPGSATDIHFEDITMDNVGNPILVDQEYCPWNQCDLSVPSRVQLSKLSFKNIRGTSKTQIAVKLICSSGLPCDEVELADIDLTYNGPEGPAISQCSNVHPALSGVQNPAACSSQPTGEAAP

SEQ ID NO: 53009 - protein, 242 aa, Zea mays
  Coding DNA Sequence Number=SeqID_11230
  Gene Ontology: Mol. function=zinc ion binding
  Homolog annotation: Hit_ID=Q1S1N3; Match level="QueryCoverage=39%, HitCoverage=28%, E-value=4e-17, Identity=48%"; Hit description =Calcineurin-like phosphoesterase family protein, related
  Pfam annotation: Domain name=DUF1723; Domain location=61-110; Score =84.8; E_value=2.7e-22; Accession=PF08330.1; Description=Protein of unknown function (DUF1723)
MAGSLTRLDRHHISVEQMTMSEDRVLECNIRNMHAPPSQLVENYLREAGFSHVATMGRGCKLDPKLISALIKRWRPETHTFHLPCGECTITLEDVSLQLGLPVDGYPVTGSAQSSNWEAVCYELLGAIPEKMEGGGTIWQVMLDYRPLLKIYGFYWTNGRKEKIHGKLYLLTPEERQRQIRVERMDHRPKSDNQMPNWKNQNPHRKNNNRRRKLEKGGIQRVTVDGRHVALNPPGIDIDCRI

SEQ ID NO: 53010 - protein, 213 aa, Zea mays
  Coding DNA Sequence Number=SeqID_11231
MDMCPGRVRQTGKETGYVTHCLQFKTTRADETGVCQVVGATQASTWANRGRQREAQVESSSMGGMPNLETSESVGTPIAETESQTPTARDNALSKSMIQALEKFVGTHTDREAMGRLLNDFGRMGLNYLGASLESPLLSLSICSRPPNGDRSVVEYEAKVLRLSRERIFASLIDKAMIVEEVKRNECEWRDRERDRRFTRAKDTGMCLGRLTH

SEQ ID NO: 53011 - protein, 95 aa, Zea mays
  Coding DNA Sequence Number=SeqID_11232
MADPVTAMVIVVAVGVGNHGRPPGRDTSGGARGRDRRRVVPVLHELHLRVEEEPHALRLQLLKSMRWSSTSLFPSSLPMPKVHIQTILSRLSGIP

SEQ ID NO: 53012 - protein, 87 aa, Zea mays
  Coding DNA Sequence Number=SeqID_11233
MDWMRWEDTQERRIADGPLPDYLSHTPPIKDVCRYVWIGQSILLKTPPITGLVQHHAKTRVKGHRDYDLACYWTGVALMLYALRIQC

SEQ ID NO: 53013 - protein, 250 aa, Zea mays
  Coding DNA Sequence Number=SeqID_11234
  Gene Ontology: Cellular component=endoplasmic reticulum
  Homolog annotation: Hit_ID=Q9LJQ5; Match level="QueryCoverage=66%, HitCoverage=75%, E-value=1e-50, Identity=56%"; Hit description=Seed maturation protein-like
  Pfam annotation: Domain name=Reticulon; Domain location=36-188; Score= 53.5; E_value=6.8e-13; Accession=PF02453.8; Description=Reticulon
MPIYDSSSESDNEITPRGKLFGRQRPMHAILGGGKVADVLLWRNPKVSAALLTGVTTIWFLFEVVEYNFVTLLCHISITAMLAIFIWCISADYFGWKRPTIPQLLSDQAAFSEVVYFFHWRFNQFLQKLLHIAGGNDPVNFFLVIISLYVLSVIGSCFDFVNLLFIGLGKKKKKMVRELKVISDVDGGGIGGLFLVLWAALLTLSSISAILFSCADGVSKEKTDSGDTNFYGGGCTAGCGGAGCGAACGA

SEQ ID NO: 53014 - protein, 686 aa, Zea mays
  Coding DNA Sequence Number=SeqID_11235
  Gene Ontology: Mol. function=protein serine/threonine kinase activity; Cellular component=nucleus; Biological process=protein amino acid phosphorylation
  Homolog annotation: Hit_ID=UPI0000162DEA; Match level="QueryCoverage =94%, HitCoverage=95%, E-value=1e-129, Identity=51%"; Hit description= ATP binding / kinase/ protein kinase/ protein serine/threonine kinase/ protein-tyrosine kinase
  Pfam annotation: Domain name=Pkinase; Domain location=360-632; Score =136.4; E_value=7.6e-38; Accession=PF00069.15; Description=Protein kinase domain
  Pfam annotation: Domain name=Pkinase_Tyr; Domain location=360-632; Score=126.7; E_value=6.3e-35; Accession=PF07714.7; Description =Protein tyrosine kinase
  Pfam module annotation: Pfam domain module=Pkinase::Pkinase_Tyr; Domain location=360-632::360-632
MDAFFLSPSSFSILFLLTIFQLSYARDDFHFTSCAPFDCGNLVNISYPFWTHQYNRPSYCGYGNEGYKLKCRQNQPPVMTLSSQEFYVLHLNRSHGLLTIKRVELNNTCPQPILMNNAFNYTETAENITLFYDCRSRGGPNHRFSCRKGGKETSLMFFKEDENECIGNSEQVEIPIGKKAFDDLIGGISTVNESLVQPFDIRYFAYDPYCKHCKDSGGRCGYNQTETSAFVCYCRDKPHLLKCNQVSNLTATAVFTLTAGRHGSNLAKKLAIGNILPRFSPVPFISSGSFGAAAGGIIISAIAFYFWLRHRRGKEFFKSSYAWSKSFSDRSFMMDPEKVKSLAGVHLFTYKELGEATNNFDSNKELGDGGFGTVYYGKLRDGRAVAIKRLYENNYKRVEQFMNEVWILTKLHHRNLVSLYGCTSRHSRELLLVYEYVSNGTVADHLHGQRAKPGALSWSIRLDIAIETADALSYLHASKTIHRDVKTNNILLDNNFTVKVADFGLSRLFPSNVTHVSTAPQGTPGYVDPEYHQCYQLTEKSDVFSFGVVLVELISSKPAVDITRHRHEINLSNMAINKIQNRALHELVDPSLGFESDYKVRKMITGVAEVAFQCLQNEKEMRPTMARVLEALKGIQNEDYNKAKAEEMDISADDVGLLKSGPLPHSPDSVMTKWHSSSTIQSNSTS

SEQ ID NO: 53015 - protein, 160 aa, Zea mays
  Coding DNA Sequence Number=SeqID_11236
MAEAESFVELGPIKDKFELSKPNGKGNDERNHEEDEEGHSDDGNTIKKKDESKEEVKPIEGKTSRVNSMVLIPKKRNGEERLIFVDINITGQKRSALIDTGASNLFISEMAAKKLGLSIKKSNKKIKTVNSEEAPTVGVVHIVELQIGEWKGKKDIENLP

SEQ ID NO: 53016 - protein, 106 aa, Zea mays
  Coding DNA Sequence Number=SeqID_11237
MVFSKYWNESMITHISWTYKVTIWGQITLKMGDDTISSKGSTESVCEPIELPTGSITRARAKKFKEAILALVAQVWGEALTRFIDRAWECSSSALCNLLQTDFKLS

SEQ ID NO: 53017 - protein, 77 aa, Zea mays
  Coding DNA Sequence Number=SeqID_11238
MKAFSLFGSIFIITTMELIYVVSVQESTRRRINSILPKDVATYPRRHPEAEHTALNVATQDLICHDITSVRETNMSQ

SEQ ID NO: 53018 - protein, 55 aa, Zea mays
  Coding DNA Sequence Number=SeqID_11239
MATASQPAAPTPNGYGGGILAGGDGVHGTARRQISLGHWYVQLKSDPPRVNFCFV

SEQ ID NO: 53019 - protein, 525 aa, Zea mays
  Coding DNA Sequence Number=SeqID_11240
  Gene Ontology: Mol. function=acyltransferase activity; Cellular component=integral to membrane; Biological process=metabolic process
  Homolog annotation: Hit_ID=Q2QZN3; Match level="QueryCoverage=99%, HitCoverage=97%, E-value=1e-166, Identity=58%"; Hit description =Acyltransferase family protein, expressed
  Pfam annotation: Domain name=Acyltransferase; Domain location=315 -436; Score=37.4; E_value=4.9e-08; Accession=PF01553.11; Description =Acyltransferase
  Subcellular localization annotation: CTP_CleavageSite=51; ConfidenceScore=5.50e-01
MAKKRLLLLAHKIFSAMLSLLLHGRRSRPSTTTTDSSSPAVHRGAPPPPTTAAAAGALVVDVDTALLRSGDLFPYFMLVALEAGGFLRGLLLLLLCPLVRLMPRAAAVRAMAAVSFCGLRAARFRAGRAVLPKWLMEDVAAEGFQAVRAAGSRAVCVTAMPRVMVDGFLREYLGVHAVVAREMKVVWGFYTGIMEDARPAEGAEMVKKAAEEQTVVVGYSASMEFLNHPLSRCCKEIFVVSSDEKSRWRPLARDKYPKPMVFHDGRLAFRPTGAGTAAMFAWLPLGVTLGAARLAVALVLPYRYSTPILAATGMSWRLKGSRPALAPPCSGGRGQLFVCNHRTLIDPVYVSVALDRQVRAVSYSLSRLSELISPIGRTVRLTRDRDSDGAVMARLLDRGNLVVVCPEGTTCREPYLLRFSPLFAELSDDVVPVGIAVETSMFYATTAGGLKCFDPLYYMANPRMCYTVQFLDKVDTSAVRSRAAPSTQMANLVQRKMGDALGYGCTMLTRKDKYLMLAGNDGIVR

SEQ ID NO: 53020 - protein, 599 aa, Zea mays
  Coding DNA Sequence Number=SeqID_11241
  Gene Ontology: Mol. function=protein-methionine-S-oxide reductase activity; Cellular component=nucleus; Biological process=regulation of transcription
  Homolog annotation: Hit_ID=Q53MB3; Match level="QueryCoverage=98%, HitCoverage=97%, E-value=1e-113, Identity=40%"; Hit description=GRAS family transcription factor, putative
  Pfam annotation: Domain name=GRAS; Domain location=182-505; Score =229.5; E_value=7.3e-66; Accession=PF03514.5; Description=GRAS family transcription factor
MATTPEDFFIQDLTAQPPASPPVFLDLLQKPSVASNNEVWRHVVPDNDMVLPYISHMLMEDDDDVDDELISDDPTLLQVQQPFAQILSSPSSLGTNTTSNMEGCRRQRPNGSLQQAGLGHGDDEQSALSSAYKGGAKGRPTMTFKEEEPEEKRGSEMFDEMMSRAYETCIKSMERVAVDNSGGGGGGAHDKRNRRTGRSARGSNVVDIGALLTSCVKALADGDHVAARNVLAQVKQHASATGDAAQRMAHCFARGIEARIAGTGSWIWRLRMSVSAHHPSSAVDFLKAYSLYTRACCFLNVTFIFSAMTIVQAMAGNKSSLHIVDYGTRYGFQWAGLLRLLSTSSSKQQAGLPVVKFTAITDPRPAHYPGEQVERIGRRLTKCARELGFPSFKFHAITRKWEDVSAVDLHRNDDDDDDDREVLVVSDLFSFSVLMEESVFFDSPSPRDTVLGNVRRMRPDVFIQSVTNRSYGSSFLSRFREMLFYYMAVFDMLDATVPRESRSRLVLEQVLLGHYVFNDISCEGMDLVQRPEKYRQWQARNRRAGLRQLPLKPSIVKAVEDEVTKHYHRDFMVCQDGQWLLQGWMGRALTAHTAWVADI

SEQ ID NO: 53021 - protein, 977 aa, Zea mays
  Coding DNA Sequence Number=SeqID_11242
  Gene Ontology: Mol. function=microtubule motor activity; Cellular component=microtubule associated complex; Biological process =microtubule-based movement
  Homolog annotation: Hit_ID=Q1RV39; Match level="QueryCoverage=75%, HitCoverage=74%, E-value=0.0, Identity=46%"; Hit description =Calponin-like actin-binding; Kinesin, motor region
  Pfam annotation: Domain name=CH; Domain location=54-172; Score=36.1; E_value=1.2e-07; Accession=PF00307.21; Description=Calponin homology (CH) domain
  Pfam annotation: Domain name=Kinesin; Domain location=461-712; Score =209.0; E_value=1.1e-59; Accession=PF00225.13; Description=Kinesin motor domain
  Pfam module annotation: Pfam domain module=CH::Kinesin; Domain location=54-172::461-712
MASTEQEAAVEAAAVVEEVTRQQGKGCGVAGGGDTVGSWRNIDIAWRKADEAAIRRYEAANWLRRIVGVVCAKDLAEEPSEEEFRIGLRNGIILCNALNKIQPGAVVEVPSDSTAPVDGTALCAYQYFENVRNFLTGMQDLGLTTFEASDLEKGGQGVRVVDCVLAMKSFCDAKHVGKRSPFKYGGIVKPLSGKYVIRKNNEPYMKVMMRSHSAELLRDGISLEQIGLDFSLEPTETTATPDSIRMLVQTVLADKKPEEIPSVVESLLSKVINEYDCRIASQSEVVKDTMEQVKDTMDTNDCNSVLRMDSPFDTNDTKSLSRVDSPQVESTTPSDLDKATENIKMDEDEQNASSLTEDVSTLVPLPVPVPLSNDIVINIPKIVRNFDQEEKQIQDLKSNMSTVKSFMEQLKLLYSEDLKKLGDHLRIISHAASGYRKVVEENRKLYNQIQDLRGNIRVYCRVRPFHPGKEFPSSSVAGIEDRTITVMVPSKHGKDGKKSFTFNSVFGPLATQADVFTDMQPLVRSVLDGFNSGPKILTEEGLGVNYRALNDLFGIQEQRKDTICYEIAVQMMEIYNEQFQMQMWCQSDRPLICLTVHVQGRDLTSGTVLRGCMHLVDLAGSERVDKSEVVGIGLKEAQHINKSLAALGDVIAALAQKSTHVPYRNSKLTQLLQDSLGGQAKTLMFIHIAPEPDAISESISTLKFAERVSTIELGAAKSSKEGGGGGGGEARELKEQIACLRAALARKDGDHESIRSTQSSPDIYRMGTGNASPASRHPIEDGIIENDSALGDLAEHSQFGSSNSLPELGPDATQDLAFYQRSNSEQQWSWSGSVATEDSDDFEVATNCSLELDCVRPSSAPKASGLSNGGGTAVKKIQVKGSKGSDVRGVNPGKRSSPLQKKPSGPSPTLIKKGGGEGRKTPNAISANGMDERLDKDVVQLDHASQMRAFVSSMSPLVNLSILSLYINSNCYNRVIF

SEQ ID NO: 53022 - protein, 530 aa, Zea mays
  Coding DNA Sequence Number=SeqID_11243
  Homolog annotation: Hit_ID=Q6Z4F2; Match level="QueryCoverage=95%, HitCoverage=77%, E-value=1e-154, Identity=58%"; Hit description =Putative nodule-specific protein
  Pfam annotation: Domain name=MFS_1; Domain location=35-515; Score= -12.3; E_value=0.0012; Accession=PF07690.6; Description=Major Facilitator Superfamily
  Pfam annotation: Domain name=Nodulin-like; Domain location=30-288; Score=392.2; E_value=7.9e-115; Accession=PF06813.4; Description =Nodulin-like
  Pfam module annotation: Pfam domain module=MFS_1::Nodulin-like; Domain location=35-515::30-288
MVFAFVAGSRVAAAEALTTARFARQVLSGRWFTLLACLLILSASGATYAFGIYSRALKSALGYDQRAVATLAFFKDLGSNVGVPAGLLSEVAPPWAVLAAGAAMNLAGYLMVYLSLAGRVAAPAPPPLWLMCAYVCVGANSQAFAGTAALVTCVRNFPEARGAVLGLLKGYVGLSSAILAQIYLALYGGGADARSLVLLIAWLPAAVSVVFLGTVRVMPPPNGRTRRSTSRGGVGDVFLCLLYISVALAAYILVMIIVQRQASFSRAAYAASAAGLLVLLFLPLAVVVRQEYRIKHELEGSPSVDAPLPVMVTVVEKSIAMPLVEPAITTSDTPPSSSCLVGIRSFLRHAFSPPAHGEDYSIPQALVSVDMLVLFLAIACGAGGTLTAIDNMGQIGQSLDYPPKSVDAFVSLISVWNYAGRVTAGYGSEALLSRYRFPRPLALTLVLLASCAGHLLIALGVPRALYAASVLIGFCFGAQWPLLYAVISELFGLRRYPTLYNLGAVASPVGAYVLNVRVAGRLYDAEAARC

SEQ ID NO: 53023 - protein, 268 aa, Zea mays
  Coding DNA Sequence Number=SeqID_11244
  Homolog annotation: Hit_ID=Q6QP54; Match level="QueryCoverage=33%, HitCoverage=31%, E-value=3e-16, Identity=55%"; Hit description =Putative kinase
  Subcellular localization annotation: CTP_CleavageSite=46; ConfidenceScore=5.06e-01
MAPPVDVASPRPRLGDVEAPPRSRSSLSSVAEVKSEPLGRARRRPSAEARAESEPWGRAKRSSSSSGAEPESEPWVGRSGVRRLPGLSPKGQRRLRHSDCSATRQSESDRQLGLAKDATANSAPPDPRARTRAKTRKTANSAPPDPRARTRAKTRKTANSASPDPRARTRAKTRKTANSAPPDPRARTRAKTRKTANSAPPDPRARTRAKTRKTANSAPPDPRARTRAKTRKTTKLRLARPQGSDSALASAGRLPPRPTPWLRLGHGN

SEQ ID NO: 53024 - protein, 66 aa, Zea mays
  Coding DNA Sequence Number=SeqID_11245
MGGKFEPNRCSAGGGLRTPAGHKQIIYDDGVRATMASSGSGSGSGSQSPAGQPGARRLGPRSNLVD

SEQ ID NO: 53025 - protein, 684 aa, Zea mays
  Coding DNA Sequence Number=SeqID_11246
  Gene Ontology: Mol. function=transferase activity, transferring hexosyl groups; Cellular component=integral to membrane; Biological process=carbohydrate biosynthetic process
  Homolog annotation: Hit_ID=Q652K2; Match level="QueryCoverage=91%, HitCoverage=91%, E-value=0.0, Identity=84%"; Hit description =Glycosyl transferase family 8 protein-like
  Pfam annotation: Domain name=Glyco_transf_8; Domain location=342-658; Score=405.8; E_value=6.2e-119; Accession=PF01501.10; Description =Glycosyl transferase family 8
  Subcellular localization annotation: CTP_CleavageSite=9; ConfidenceScore=5.28e-01
MPTPKQRLPCSTFGRGGGGRRAACGSAVLPPVVVLVFLFVVAPSLFFVVRNGGRGYGHGHVAVASDPNGKNDDQEPTAMKNLKSFLPKEVFDAITARQQESDTLSLDFFRNHASPSWKTNDLVTEKSMDVDDKAKAEISLPEHDLPTNRSPKDPDEHQADNAAKVARRKLRETRREKRAMDLVHKDDEAHVKQENAAIERSKAVDSAVLGKYSIWRKENENSDSTVRLMRDQIIMARVYSALAKSKNKSDLYQKLQTRIKESQRAVGDASADAGLHHSAPEKIIAMGQVLSKAREEVYNCMAITQKLRAMLQSADEQVRCLKKQSTFLSQLAAKTIPNSIHCLSMRLTIDYYLLLLEERKFPRSENLENPNLYHYALFSDNVLAASVVVNSTIMNAKKPEKHVFHLVTDKLNFGAMNMWFLLNPPGKATIHVENVDEFKWLNSSYCPVLRQLESAAMKEYYFKADRPTSLSAGSSNLKYRNPKYLSMLNHLRFYLPEVYPKVDKILFLDDDIVVQKDLTGLWDVNLNGKVNGAVETCGESFHRFDKYLNFSNPHIARNFDPNACGWAYGMNIFDLKEWKKKDITGIYHKWQNMNEGRVLWKLGTLPPGLLTFYKLTHPLDKSWHVLGLGYNPSVDRSEIDSAAVVHYNGNMKPWLELAMTKYRPYWTRYIKYDHPYIRGCNLRE

SEQ ID NO: 53026 - protein, 324 aa, Zea mays
  Coding DNA Sequence Number=SeqID_11247
  Homolog annotation: Hit_ID=Q652K4; Match level="QueryCoverage=99%, HitCoverage=99%, E-value=3e-79, Identity=52%"; Hit description =Putative LRP1
  Pfam annotation: Domain name=DUF702; Domain location=91-248; Score =265.4; E_value=1.1e-76; Accession=PF05142.3; Description=Domain of unknown function (DUF702)
MAGFPLGGGSHTQSRDAPASSVPPVHPSDAASFLYAARAGAGLQLWQQQQQHPFYNSNIIRFSDDPPGAAPSLTGAASPSSPSRGPRAGGGSGGGGGVSCQDCGNQAKKDCVHQRCRTCCKSRGFACSTHVKSTWVSAAKRRERQQQLAALAASAGDTAAAAGPSRDPTKRPRARLSVATPTTTSSGDQQMVTVAERFPREVSSEALFRCVRLGPVDRAEAEVAYQTTVSIGGHVFKGILHDVGPRSLPAAGGGAAAAAIEYYFRHAADGSPPSTTGAAGEACGAGGVGNVVVSSAVVMDPYPTPGPYTAFLPGAPFFPGHPRQ

SEQ ID NO: 53027 - protein, 110 aa, Zea mays
  Coding DNA Sequence Number=SeqID_11248
  Subcellular localization annotation: CTP_CleavageSite=77; ConfidenceScore=5.32e-01
MADRTTSLSATVQPACCLAQRPGQSPCAPDPMCPIATVHPARRRGLPSRASPSPFARPCREEKLHRRPSPRYYSCLVASALLRALHAACAAPRTAPAPSCDAFLRPRSAS

SEQ ID NO: 53028 - protein, 240 aa, Zea mays
  Coding DNA Sequence Number=SeqID_11249
  Gene Ontology: Mol. function=protein binding; Cellular component =proteasome regulatory particle (sensu Eukaryota); Biological process= proteolysis
  Homolog annotation: Hit_ID=Q8W423; Match level="QueryCoverage=85%, HitCoverage=63%, E-value=1e-71, Identity=67%"; Hit description=26S proteasome regulatory particle non-ATPase subunit12
  Pfam annotation: Domain name=SAC3_GANP; Domain location=3-130; Score =38.4; E_value=2.5e-08; Accession=PF03399.6; Description=SAC3GANP family
MRASACRPANFMMIHESGIIPASPEEYPILGLNLLRLLVQNRIAEFHTELELLPAKALEHPCIKHAVELEQSFMEGAYNRVLSARQAVPHETYVYFIDLLAKTVRDEIAGCSEKGYDSLSVSDAKQMLMFSSDQDLHEYITELSFTEKGEADPNFTKFMKLKGCFTNRCFQLSYEVEEHPEWEIKNGAVFFQKAKESQPCKEIPSLQLINQTLSYARELERIASDVTFSSASDAGDRNDI

SEQ ID NO: 53029 - protein, 174 aa, Zea mays
  Coding DNA Sequence Number=SeqID_11250
  Subcellular localization annotation: CTP_CleavageSite=55; ConfidenceScore=5.31e-01
MAISFVFFASSELQQWRSIVIRASLAKSAEPSSLSVVWSRVYPRSPSLQCPFAVMAGRTTSPDATVQPVCFLAQRPGQSPCASDPMCPIATVCPARRRGLPQPSLAITVRAPVPRREASSSSLAPLLFVSCGQRIPVRAPRGLRSTPHSSRAFVRRVSASSQRVVGVSTTFVYM

SEQ ID NO: 53030 - protein, 445 aa, Zea mays
  Coding DNA Sequence Number=SeqID_11251
MSASGDPLDVLPAAVLADVLGRVADAGDIAACRLASRTLLAASYICPRVRLCAADRARRRREGGGGSPAFRATTANLASLLGPHLRSLSLDTAGGQGSPDDAMWVEEGEFDEADGLHLTCGEAVAAWATTSAGTVLRELDIADYWPQACWRKAEALPLISHYCQNLVKLCLKNAWLSVDRLKKMPNLTYLTLEFIRLDDEDLNQLNECFPCLHTLNLIGVGGLKDPKIHLLQLKACCWEVSNVPRSLVVHAPDLVFLELKCIRPDTLILDTPSLSTLKLTIDKLGATARVDGLLRLSNLRIESLDFSSLFPAFMDNQAIRTLELELPESSSQYELLEAVNPDYLLRRLASFSEVKLGPRFSRELKLCLAQYKDIQFGSCLKKLLIHVPQSGSCFHLMPLFEICAPLCEVTVLFHAESADAVRRQDAMSICMQNFPEIRWQWGTWQ

SEQ ID NO: 53031 - protein, 265 aa, Zea mays
  Coding DNA Sequence Number=SeqID_11252
  Gene Ontology: Mol. function=zinc ion binding; Biological process =regulation of transcription
  Homolog annotation: Hit_ID=Q9FE00; Match level="QueryCoverage=72%, HitCoverage=88%, E-value=9e-35, Identity=44%"; Hit description =Putative DNA-binding protein Dof3
  Pfam annotation: Domain name=zf-Dof; Domain location=72-134; Score =131.5; E_value=2.3e-36; Accession=PF02701.6; Description=Dof domain, zinc finger
MEPGTRPDAGSAHSHLKTRGRGWSGDMTGVMRTDRQPIPTGSEVGQVPDGRPLPAPVATGGGGGGTGTGGGREPEGLPCPRCESANTKFCYYNNYNLSQPRYFCRACRRYWTRGGALRNVPVGGGTRKATPAGRRKRAGPAPATAAPPAPPPPSALHGSLLRPYGGLSFAAPALASPLAAVDPDRRLLDLGGSFTSLIAPGADVGVHFSAEFLVGGLAPAALPRATASVPALPPPPPQQHQQPTTVSQALPEGLFWSMGWPDLSI

SEQ ID NO: 53032 - protein, 261 aa, Zea mays
  Coding DNA Sequence Number=SeqID_11253
  Gene Ontology: Mol. function=cysteine-type peptidase activity; Biological process=proteolysis
  Homolog annotation: Hit_ID=Q2QME9; Match level="QueryCoverage=79%, HitCoverage=36%, E-value=3e-32, Identity=35%"; Hit description=Ulp1 protease family, C-terminal catalytic domain containing protein, expressed
RDFPKLRRWSKGVNIFNNAYIILPIHGKYLEKEWRFLSVAWPCLLNDIRKEAVQVPQQNNAYDCGIFMLYYIEQFIKKAPARFTTDKLGMFNRSWFKPEEASGLRQRIRELLLQEFGSARPDEAASEADVAAKRKEGISAAEWNEEEAGRVVSESDSCSYGAGDEKGTVKADSGSAEAEKEGGLVVTASSQKRSKGTAEEEEEVRGSSMPVPDAVCEITGTKVWIKRVYRRTGWPPGNWCWSSGGSSRDARRAFIEQFSRK

SEQ ID NO: 53033 - protein, 80 aa, Zea mays
  Coding DNA Sequence Number=SeqID_11254
MATLLGYYRVLEVEIEREFVALTGSKIVSMDLVRMAYSPTASHVVISILEDATIRSCGFSTEQTLVLLSQRKTDYVSIDT

SEQ ID NO: 53034 - protein, 95 aa, Zea mays
  Coding DNA Sequence Number=SeqID_11255
  Subcellular localization annotation: CTP_CleavageSite=38; ConfidenceScore=5.24e-01
MQAACNRAKWAHLSDFHRAQHGSPGPRVMQPVRGCYVRATAPPLTPLPRLLDCGTSTATRGNPTHDPAAPAWDRERGIPRKGSFSVKEPGFEPPY

SEQ ID NO: 53035 - protein, 707 aa, Zea mays
  Coding DNA Sequence Number=SeqID_11256
  Gene Ontology: Mol. function=zinc ion binding; Cellular component =cellulose and pectin-containing cell wall
  Homolog annotation: Hit_ID=Q109J5; Match level="QueryCoverage=95%, HitCoverage=93%, E-value=0.0, Identity=82%"; Hit description =Dehydration-responsive protein, putative, expressed
  Pfam annotation: Domain name=DUF248; Domain location=81-693; Score =1069.0; E_value=0; Accession=PF03141.7; Description=Putative methyltransferase
  Pfam annotation: Domain name=Methyltransf_11; Domain location=208 -303; Score=35.6; E_value=1.7e-07; Accession=PF08241.2; Description =Methyltransferase domain
  Pfam annotation: Domain name=Methyltransf_12; Domain location=208 -301; Score=9.6; E_value=0.06; Accession=PF08242.2; Description =Methyltransferase domain
  Pfam module annotation: Pfam domain module=DUF248::Methyltransf _11::Methyltransf_12; Domain location=81-693::208-303::208-301
MVTFPLRDLSPTSLLLLLFLFHPWALKAGSAAFEYGTKFSRSLGWGSDDGEDGSEESIFGTGDADDVKPKSFPVCDDRHSELIPCLDRNLIYQMRLKLDLNLMEHYERHCPPPERRFNCLIPPPHGYKVPIKWPKSRDVVWKANIPHTHLAKEKSDQNWMVEAGEKIKFPGGGTHFHHGADKYISNIANMLNFKDNNINNDGMLRTVLDVGCGVASFGGYLLSSNVIAMSLAPNDVHQNQIQFALERGIPAYLGVLGTKRLPYPSRSFELAHCSRCRIDWLQRDGILLLELDRLLRPGGYFAYSSPEAYAQDEEDLRIWKEMSALVERMCWKIAEKRNQTVIWVKPLDNDCYKRRAHGTKPPLCKSGNDPDSVWGVPMEACITPYPEQMHRDGGTGLAPWPARLTAPPPRLADLYITADTFEKDTEMWQQRVENYWSLLGPKVKPDTIRNIMDMKANFGSFAAALKEKDVWVMNVVPHDGPSTLKIIYDRGLIGSNHDWKSVLVAAMLLKKFCAVPCIVKINMKFSSTIMSLKVSSLKGLFGCDPGKGVWARQLPKPSISDAWWPGTPVWPVFPGQVSVEAGTSCFHIYNSLKSNNAFCRCEAFSTYPRTYDLLHAWAVFSDLDKRGCSAEDLLLEMDRILRPTGFAIVRDKGTVIEFIKKYLHALHWEALTVVDAEPSPESEESEMILIIRKKLWLPKAGPQDSGT

SEQ ID NO: 53036 - protein, 132 aa, Zea mays
  Coding DNA Sequence Number=SeqID_11257
MATTKEFRRAEKYTRAAAGRRASHGDGAELEEQGARGDGGRARQGEATTTTIGNEPELRALENHQTEDDNLETLDLCASFSRLQASTGGEWRSLTARFSVENHLPALAGASLSPKCCIESFNLILMNIHLYT

SEQ ID NO: 53037 - protein, 106 aa, Zea mays
  Coding DNA Sequence Number=SeqID_11258
MASREARRATWKLRAANGSGHGEFGAAVEAPSRRGEEVELGGRLRAEEAAAGDIAMDAQGQRRRWRAARRRRGWRFNEQESGVEASSTEKKLRGGGGVATKEMGRG

SEQ ID NO: 53038 - protein, 32 aa, Zea mays
  Coding DNA Sequence Number=SeqID_11259
MAVIPKHKNSWPNNPRVVGIGNDHEVPMFDDG

SEQ ID NO: 53039 - protein, 594 aa, Zea mays
  Coding DNA Sequence Number=SeqID_11260
  Homolog annotation: Hit_ID=Q8RV35; Match level="QueryCoverage=38%, HitCoverage=71%, E-value=2e-18, Identity=34%"; Hit description =Putative OsNAC protein
MASNDNDRCPTDDKASIALLRRIRAGEHVDFVHGVDVCDAAPEILVANLEPVPGYSSVWYLYCAKKYTNKRGQLSGYRQRAITGGGGASWHPEIGRKNVQGSGGGTFCTFSYARKHKTEERSTRSVVVVNRMGWKMVEYDDLAEADAVSNYVLCKVYRTALPKGKSSLPSSSSSGQNENASSSKPPTAKKRKACGRDHPEAAPASKLIQQQQVEELNVDDYDIDILEMLSGEPVPEPGMQQPTDARTEHDGRFSIVEELKMLPDELVAEPGIQQPTDAGTEHDGRFSIVEELKMLRDEPVAEPRIQQPTDARTKHDGRFSIVEELKMLPDEPVAEPGIQQPTDAETEHDVRFKVCCSSEHGHDSGSSFSISIEEELNVDDYDIDIMEMMPDKSHHPEATPASLIQQQEADVQQHGHGHIVGLHFEGMQQPTNVAEPEHDDGRSIHPTSGDLLLAAQANFDFEGMQQPTTVAESEHDDGRSVHPLSGGPVLAAQISYDFEEMQQPTTVAELEHDDGQSVHPLSGGPVLAAQVSFDFEGMQQPTTIAEPEHDDGRSMSIQLPRMCSYTSSGVHTSATKIQHNGLLQGPDDAHSLLF

SEQ ID NO: 53040 - protein, 207 aa, Zea mays
  Coding DNA Sequence Number=SeqID_11261
MEMMPDEPDHLEAMPASLIQQQEADVQQHGHSVGLHFEGMQQPINVAEPEHDDGRSIHPTSGDPLLAAQASFDFEGMQQPTTVAVSEHDDGRSVHPLSGGPVLAAQISYDFEGMQQPTTVAESEHDDGQSVHPLSGGPVLAAQVSFDFEGMQKPTTIAEPEHDDGRSMSIQLPRMCSYTPSGVHTSATKIQRNGLLQGPDDAHSLLF

SEQ ID NO: 53041 - protein, 117 aa, Zea mays
  Coding DNA Sequence Number=SeqID_11262
  Subcellular localization annotation: CTP_CleavageSite=27; ConfidenceScore=5.22e-01
MGGRSSLKTQLRARAGATRGRNRALLSASSRRGKVRGERERRAAGLEQGRDRKELEGVWRPWLDARRENTRAVAAAWERLRPWGKLRLGWATGGAPAGEFHGWEEQEAAAHREERCG

SEQ ID NO: 53042 - protein, 143 aa, Zea mays
  Coding DNA Sequence Number=SeqID_11263
  Homolog annotation: Hit_ID=Q5Z5A8; Match level="QueryCoverage=32%, HitCoverage=12%, E-value=9e-12, Identity=72%"; Hit description =Photosystem II stability/assembly factor HCF136, chloroplast precursor
MKKSSKVLLKEEDVAICNVKIDLTRGKYNPLERNIKILIDHIPLFVCTNQSPASSSLWNNQGGGMEILNMGWRADIGLWLLLRGGGLFLSMGTVINVLHKTTNKGKSWVYDKAVAANLYTVKFLDDNKGFVLGNDGMLLRGLG

SEQ ID NO: 53043 - protein, 194 aa, Zea mays
  Coding DNA Sequence Number=SeqID_11264
  Subcellular localization annotation: CTP_CleavageSite=28; ConfidenceScore=5.22e-01
MQAACNRAKWTHPFDSNAPSMEAQAHTSCNRRAGCCVRATAPPLAPLPLLLDCGTSTATRGNPACDPTVPARHVGHRRHRWQEKRATLRLRHNGHIKKGTGKEDTPKGILLREGNGPRAPLLIRGSKADPSEGFNSRLRALGLRAHYWLEVRRPAPRKGSTAASSHSGSAPTTDQGFVGWPSKGSQPPQTQSEG

SEQ ID NO: 53044 - protein, 126 aa, Zea mays
  Coding DNA Sequence Number=SeqID_11265
MEDMHRATGAEPTGEAEVLQAPPPPSSAMCRQLSYEEGDDEATVDGWGRATIQLVLERHPLTAGWTRLLPQKCGTMSENGEVVASAEKMGFSPVWSPISCCSSGDSGPRIGVNKGAPLYCRFRLDR

SEQ ID NO: 53045 - protein, 217 aa, Zea mays
  Coding DNA Sequence Number=SeqID_11266
  Homolog annotation: Hit_ID=Q6QP51; Match level="QueryCoverage=74%, HitCoverage=95%, E-value=7e-16, Identity=41%"; Hit description =Putative growth-regulating factor 1
MQVACNRTTETHLFDFDASSMEAQAHTSWTGKGDISKGILLREGSGPRALLLIRAASEHSGSAPNTDQGFEGWPLEGFDSRPRARRVRDDSGYVRYMAEARAMLPRSIQCEDRLTPYPDVRSSVNRAEPQAPQEAPPRPTLGLGLRRSLRLARPQGSAPASASEDGLRLVRPQGPASTLTSGGIASSPDPGLRRSLRLARPWARTDHAARSTSLPYP

SEQ ID NO: 53046 - protein, 174 aa, Zea mays
  Coding DNA Sequence Number=SeqID_11267
MSQGRKDRELLTFDAIEYAEAKDDVAGPLLLHAQAPYMMLAVASKEGDDVMELPEKGRFSPRCCLRWHADGGSEQGRLWTARSFGSCSLRSTAARSTAPSHLRLDRDSPFVKSPTSRRCWKGGGEAVDYEVFQLSMKEGGRLGVSCAGNGNGYGLCKEGDCERQLGVGWAREWE

SEQ ID NO: 53047 - protein, 58 aa, Zea mays
  Coding DNA Sequence Number=SeqID_11268
MTKNLAEKQYNSNECCAFENKSPTEKITKEIMEGLSEDSDDSDSYDVESGNEDSEDRS

SEQ ID NO: 53048 - protein, 133 aa, Zea mays
  Coding DNA Sequence Number=SeqID_11269
MEMMRNAVRIRLGSSYRRRWCDMHWPREGVCRNDFASSARNSPDVGDQLPIAPPREPAPPPREVTKPHTERAVEVEKIALTAWPHKADRTHPHPMQTELSKGARRSKIAIEREWLTARDPAVGAETWDGRAGV

SEQ ID NO: 53049 - protein, 125 aa, Zea mays
  Coding DNA Sequence Number=SeqID_11270
MGRGKRGKGWPRRADGKRKHPPRPPSEDFGDSEYLEERSIERAGLGGSNNSEEVEDSSDSEEWSGGEDDGSSDDDNGKGGGSGEDGNGDGDGDGDSKGDGKGDGSSKGDGKGGGDGKASGITPLA

SEQ ID NO: 53050 - protein, 70 aa, Zea mays
  Coding DNA Sequence Number=SeqID_11271
MGVALLPGEPGRRGTLDASATWGSEVVRSCSRRPASSAPGSPRVMGHRIVWGIAPSCTGKRHGGAVARLG

SEQ ID NO: 53051 - protein, 164 aa, Zea mays
  Coding DNA Sequence Number=SeqID_11272
MAINGASMRERKWGRKGRNGREDFGRRAARAVPGRARRGFGAAGSRQRAVGRLGWRGRVARWCRAPGARRRGRSPGRDGFGSSWRGAVGEAGKGRVTSLEALGGVGLRVGENMRKGRRERLKLGTWLPSERRGQTPWRWGEEGRPTLTTPVPLKGMRHWWLIVA

SEQ ID NO: 53052 - protein, 86 aa, Zea mays
  Coding DNA Sequence Number=SeqID_11273
MTGDVARSNRMTELPFLKCLHLCSGGAQPKNKALVHELRQGRLKTTVDLLDIVTEFADGEGVVGAIFFKGKSPHDAGELSDEKRGH

SEQ ID NO: 53053 - protein, 115 aa, Zea mays
  Coding DNA Sequence Number=SeqID_11274
MDLPRKANNGNKISNRSFASYNAIEVPDRQAMMSTSIFRRSIAAHDDFAPMGVRSKNNEQKSTAHLGECEGFQGRSWTVQGEVIHHCMLGQIPQDDLVPEIPVNGIVQFDFFSLR

SEQ ID NO: 53054 - protein, 112 aa, Zea mays
  Coding DNA Sequence Number=SeqID_11275
  Gene Ontology: Mol. function=nucleic acid binding
  Homolog annotation: Hit_ID=Q3LRV2; Match level="QueryCoverage=99%, HitCoverage=58%, E-value=2e-30, Identity=59%"; Hit description=Gag
MKKVVYYETDASSPSTSGAESTSSKRQERKKYSKPPYFDGEDYCMWSDKMRHHLTSLHESIWDIVEFGAQAPQVGDKDYDSDEAAQIRHFNSQATSIRSLPCVERSTTRCKG

SEQ ID NO: 53055 - protein, 272 aa, Zea mays
  Coding DNA Sequence Number=SeqID_11276
  Gene Ontology: Mol. function=protein transporter activity; Cellular component=membrane; Biological process=intracellular protein transport
  Homolog annotation: Hit_ID=Q6X9V9; Match level="QueryCoverage=99%, HitCoverage=98%, E-value=4e-72, Identity=54%"; Hit description =Syntaxin
  Pfam annotation: Domain name=SNARE; Domain location=182-244; Score =77.1; E_value=5.6e-20; Accession=PF05739.9; Description=SNARE domain
  Pfam annotation: Domain name=Syntaxin; Domain location=49-157; Score =47.4; E_value=4.8e-11; Accession=PF00804.15; Description=Syntaxin
  Pfam module annotation: Pfam domain module=SNARE::Syntaxin; Domain location=182-244::49-157
  Subcellular localization annotation: CTP_CleavageSite=39; ConfidenceScore=5.20e-01
MNSLFSSSWKRGVGDGGEQGTSSPAAWRCLRRRVPERGRASTGSDVDVTRTGPGTLTVESIKEELRDLERIQRSLHDANVGGKSLHDAAAVRGLRARMDADVGTTIKKAKVVKLRLESLDRANAANRSVPGCGHGSSTDRTRTSVVAGLRKKLRDSMESFSSLRSRSWARGGLGRVVAEIQERHGAVAELERGLLELQQVFNDMAVLVAAQGEQLDDIEGNVGPARSFVDRGREQLQVARKHQKSTRKWTCIVILFAIVLPIVLKNVNSNKN

SEQ ID NO: 53056 - protein, 203 aa, Zea mays
  Coding DNA Sequence Number=SeqID_11277
  Gene Ontology: Mol. function=protein transporter activity; Cellular component=membrane; Biological process=intracellular protein transport
  Homolog annotation: Hit_ID=Q309H8; Match level="QueryCoverage=55%, HitCoverage=35%, E-value=2e-17, Identity=50%"; Hit description=SNARE protein
SKTACSNVLLVTRRPARHGATASHQTSHGDGMMDASPKSDARPISPNSAAAAQAIQAMQPAAMNSLFSSSWKRGVGDGGDIESGGVEMSALLPGAAAGASLDRLFEDVESIKDELRDLERIQRSLHDANEGGKSLHAAAAVRNLRTRMDADVAAAIEKAKVVKHRLESLQVARKHHTSTRKWICIAILILLLVILVIVLPIVS

SEQ ID NO: 53057 - protein, 625 aa, Zea mays
  Coding DNA Sequence Number=SeqID_11278
  Gene Ontology: Mol. function=protein serine/threonine kinase activity; Cellular component=flagellin-based flagellum; Biological process=protein amino acid phosphorylation
  Homolog annotation: Hit_ID=Q852N6; Match level="QueryCoverage=92%, HitCoverage=98%, E-value=0.0, Identity=81%"; Hit description =Putative calcium-dependent protein kinase
  Pfam annotation: Domain name=Kdo; Domain location=110-298; Score= -84.3; E_value=0.055; Accession=PF06293.4; Description=Lipopolysacchar ide kinase (Kdo)
  Pfam annotation: Domain name=Pkinase; Domain location=121-382; Score =354.0; E_value=2.5e-103; Accession=PF00069.15; Description=Protein kinase domain
  Pfam annotation: Domain name=Pkinase_Tyr; Domain location=121-377; Score=-28.8; E_value=1.1e-10; Accession=PF07714.7; Description =Protein tyrosine kinase
  Pfam annotation: Domain name=efhand; Domain location=429-457; Score =38.3; E_value=2.6e-08; Accession=PF00036.22; Description=EF hand
  Pfam annotation: Domain name=efhand; Domain location=465-493; Score =26.1; E_value=0.00012; Accession=PF00036.22; Description=EF hand
  Pfam annotation: Domain name=efhand; Domain location=501-529; Score =33.3; E_value=8.8e-07; Accession=PF00036.22; Description=EF hand
  Pfam annotation: Domain name=efhand; Domain location=535-563; Score =35.1; E_value=2.4e-07; Accession=PF00036.22; Description=EF hand
  Pfam module annotation: Pfam domain module=Kdo::Pkinase::Pkinase _Tyr::efhand::efhand::efhand::efhand; Domain location=110-298::121 -382::121-377::429-457::465-493::501-529::535-563
MGNTCVGPSAAGRNGFLANVTLWRPRGDDPTPAPALPPPSSPASDKAPDPVTIPESKPSSHHSSRSTDLPPAPASQPQAQAQDNTPAKQPAPKVKRVQSAGLLADSVLKRDVNTARLKDLYTIGKKLGQGQFGTTYLCVEKATGREFACKSIAKRKLITEEDVEDVRREIQIMHHLAGHANVVSIVGAYEDAVAVQLVMELCAGGELFDRIIKRGHYSEKAAAQLARVIVGVVESCHSLGVMHRDLKPENFLFVNQKEDSPLMTIDFGLSIFFKPGEMFTDVVGSPYYVAPEVLLKYYGREVDVWSAGVIIYILLSGVPPFWDGEAESEQGIFEQVLRGDLDFSSEPWPSISESAKDLVRKMLIRDPKKRLTAHEALCHPWVCVDGVAPDKPLDSAVLSRLKQFSAMNKLKKMALRVIAESLSEEEIAGLKEMFKMIDTDNSGHITLEELKTGLQRVGANLMDSEINALMEAADIDNSGTIDYGEFIAATLHINKVEKEDKLFAAFSYFDKDGSGYITQDELQKACEEFGIGDTRLEDIIGDIDQDNDGRIDYNEFVAMMQKGDNPLGRKGYQSNGADVSRYSKRSIQQLRNLDQTTAPKACTMPVHWSPRFNDALSKSGVAEAI

SEQ ID NO: 53058 - protein, 232 aa, Zea mays
  Coding DNA Sequence Number=SeqID_11279
  Homolog annotation: Hit_ID=Q10CD0; Match level="QueryCoverage=83%, HitCoverage=53%, E-value=3e-48, Identity=54%"; Hit description=IQ calmodulin-binding motif family protein, expressed
  Pfam annotation: Domain name=IQ; Domain location=110-130; Score=15.2; E_value=0.23; Accession=PF00612.17; Description=IQ calmodulin-binding motif
  Pfam annotation: Domain name=IQ; Domain location=136-156; Score=7.0; E_value=7.4; Accession=PF00612.17; Description=IQ calmodulin-binding motif
  Pfam annotation: Domain name=IQ; Domain location=88-108; Score=24.6; E_value=0.00035; Accession=PF00612.17; Description=IQ calmodulin -binding motif
  Pfam module annotation: Pfam domain module=IQ::IQ::IQ; Domain location=110-130::136-156::88-108
MGISARWLKSLVGLRKVEQQPRKESADVGRMNQRSQDDSSIAAQEEIPEVPYGNDPPEDDSNAPSCLEPTYSSADVPLFQTEEELKEIWAATIIQTTFRAFLARRAHRALKGLVRLQALVRGHIVRKQADTTLRCMQALVRVQARVRARRVRMALENQTDQQNTSPEHTTVARVREIEDGWCDSIGSVEDIQAKLLKRQEAAAKRERAMAYALAHQSKRLFSFPSFLGLRYV

SEQ ID NO: 53059 - protein, 48 aa, Zea mays
  Coding DNA Sequence Number=SeqID_11280
MPAATDTGLRGVSDGAVPPVVPAAVVAAAAAGSAVASGLAGMEASSAS

SEQ ID NO: 53060 - protein, 87 aa, Zea mays
  Coding DNA Sequence Number=SeqID_11281
MDHVLGCRSLWLMGKETWTEELSRQPLSPMPTKFCGKSKENILKSNTAIAKCVTAVHRVQRCTSYIGLSLRSNHLHLIGEQGLSIPI

SEQ ID NO: 53061 - protein, 199 aa, Zea mays
  Coding DNA Sequence Number=SeqID_11282
  Gene Ontology: Mol. function=transferase activity, transferring glycosyl groups; Cellular component=chloroplast; Biological process =biosynthetic process
  Homolog annotation: Hit_ID=Q6ER83; Match level="QueryCoverage=84%, HitCoverage=20%, E-value=1e-69, Identity=80%"; Hit description =Putative digalactosyldiacylglycerol synthase
MAKHKIDLEGFKLDVYGSGEDSQEVQSTAKRLDLSLNFFKGRDHADNSLCGCKVFKNPSISDVLCTTTAEALAMGKFVICAEHPSNEFFMSFPNCLTYKTSEEFVARVKEAMDREPQPLTPEQRYNLSREAATERFMEYSDLEKVLNNEAAQSEQGRKRKNKRTSQPNLSSVFRAHLREIKGDADSSLDRPWQKKAEIK

SEQ ID NO: 53062 - protein, 118 aa, Zea mays
  Coding DNA Sequence Number=SeqID_11283
MACKTKSLLLALCVAALLAARSEFHGLGDFTSGEATTTSEMQTFFMPQATTALPEALDASMPAKPEATALPAAAAATTAAGTTGGTAPSDTPRRPVSVAAGMAVVAMVGIADHPDAVA

SEQ ID NO: 53063 - protein, 546 aa, Zea mays
  Coding DNA Sequence Number=SeqID_11284
  Gene Ontology: Mol. function=monooxygenase activity; Cellular component=membrane; Biological process=electron transport
  Homolog annotation: Hit_ID=Q285R4; Match level="QueryCoverage=89%, HitCoverage=96%, E-value=0.0, Identity=77%"; Hit description=ABA 8' -hydroxylase 2
  Pfam annotation: Domain name=p450; Domain location=88-521; Score =186.6; E_value=5.9e-53; Accession=PF00067.12; Description=Cytochrome P450
  Subcellular localization annotation: CTP_CleavageSite=28; ConfidenceScore=5.15e-01
HQHITKQAGRLIQYAQSGNRAKNSAGQSAATATGLLVSRISWMALFFILACTLIFVAIASYAQYARWQKGKGRLGGHEKASSSSSKLPPGSMGWPYLGDTLQLYSQDPNVFFASKQKRYGEIFKTHLLGCPCVMLASPEAARFVLVTQAHLFKPTYPRSKERMIGPSALFFHQGDYHLRLRKLVQGALGPDALRALVPEVESAVRSTLAAWDGQVRSTFDAMKTLSFDVGILAIFGGGGLDERRKAELRKNYSIVEKGYNSFPNSIPGTLYYKAMQARRRLHGVLIDVMRERRERGAPGTDLLGCLMRSQGDDDGARRPLLTDDQVADNIIGVLFAAQDTTASALTWAVKYLHDHPKLLEAVRAEQAAVREATGGGRRPLTWAHTRSMALTHRVILESLRMASIISFTFREAVADVEYKGFLIPKGWKVMPLFRNIHHSPDYFQDPHKFDPSRFQVAPRPNTFLPFGSGVHACPGNELAKLEMLVLIHHLVTAYRWETVGSSDEVEYRPFPVPKQGLPVRLWRESSAAVDRNGRHETDDDVEDIIV

SEQ ID NO: 53064 - protein, 160 aa, Zea mays
  Coding DNA Sequence Number=SeqID_11285
  Subcellular localization annotation: CTP_CleavageSite=11; ConfidenceScore=5.04e-01
MRAPAALCTVRHATTARSAVLALSPAPLVHARAPGHARRPVWGQWKAKHTPRRRGGVEDAWRRSAGVILFGHSVALSQLLGAPPSGFFVGGLVRGLALLLAVADAGFLRSFIAIRGKPPPNRDCETGSGAALMDPIQHRLDDDAATPSSTRLPRSGLCNR

SEQ ID NO: 53065 - protein, 83 aa, Zea mays
  Coding DNA Sequence Number=SeqID_11286
MAARAAAPRRHGGACPSAGTDDAVAWPPVKVLAMLTTEIRTQWKWYGCCHRPSLSQIWLSLSDLQALFGSSRYLWIGQDWKKL

SEQ ID NO: 53066 - protein, 125 aa, Zea mays
  Coding DNA Sequence Number=SeqID_11287
MVTVTCLGALGSDAPGKRSAGGGRDRNPTGGHDFGPLETVHTFMAPPGAGAGAGVAVWPRVTVTVDDDSVVTGCECARDWHFWGECRRLLVEIGFASCIIERMALSRKKLQPSAVKKSATAAAIF

SEQ ID NO: 53067 - protein, 341 aa, Zea mays
  Coding DNA Sequence Number=SeqID_11288
  Gene Ontology: Mol. function=sequence-specific DNA binding; Cellular component=nucleus; Biological process=regulation of transcription, DNA-dependent
  Homolog annotation: Hit_ID=Q67TP9; Match level="QueryCoverage=98%, HitCoverage=94%, E-value=2e-81, Identity=53%"; Hit description =Putative heat shock factor
  Pfam annotation: Domain name=HSF_DNA-bind; Domain location=15-262; Score=78.6; E_value=2e-20; Accession=PF00447.8; Description=HSF-type DNA-binding
MVEEGATAAASRSGPAPFLSKTHQMVEERGTDEVISWAEQGRSFVVWKPVELARDLLPLHFKHCNFSSFVRQLNTYVEPTKSRSKFFHIYFYGCICKLLKTAWICIPHFHLRRWRQSMQGFRKVVPDRWEFANENFRRGEQGLLSGIRRRKSTTPQPSKYGGGSVVNTAFPPPLPLPPPASVTTSGGGGAGGAGNERSSSSASSPPRTDDLTSENEQLKKDNRTLSTELAQARRHCEELLGFLSRFLDVRQLDLGLLMQEDVRAGAGDDAAPRRAMVSQLERGGEEGKSVKLFGVLLTDAARKRARCEEAAASERPIKMIRIGEPWIGVPSSGPGRCGGGN

SEQ ID NO: 53068 - protein, 175 aa, Zea mays
  Coding DNA Sequence Number=SeqID_11289
  Gene Ontology: Mol. function=nucleic acid binding
MVVEEIAEGVKNLTVTGDAAASGGEGQRRGGGGSSNRIQVSNTKKPLFFYVNLAKVRLTFSPYAPHLSVILLPTRRFQILADLVTSVRAEKALALASEETLPNGGNLGDALSQAIATVVTVAEILKNNGFAVEKSETSGLCCLIEIILGKSDKFDELMAAAAEERGEVEDGEEQA

SEQ ID NO: 53069 - protein, 122 aa, Zea mays
  Coding DNA Sequence Number=SeqID_11290
MASMRLGLASRGAGAMGEMLQGKVGGTVETPGLPMPRFFLTGKDVSLEERIDSNLQPIDWDSVAEFDGPAHELDFNMVWDDGIEDHEIVADEVQDLRAFHYVEIGYNNAVAAYSLLDSTPAE

SEQ ID NO: 53070 - protein, 77 aa, Zea mays
  Coding DNA Sequence Number=SeqID_11291
MTQQVELLALQKQTVLALPHAGGSKAEARQRLADAATARALLLVARGQRQGNGWRTLLSRASYFWWRGGKGKAAAGT

SEQ ID NO: 53071 - protein, 184 aa, Zea mays
  Coding DNA Sequence Number=SeqID_11292
  Homolog annotation: Hit_ID=Q8S9M8; Match level="QueryCoverage=35%, HitCoverage=48%, E-value=8e-16, Identity=57%"; Hit description=P53 binding protein
  Pfam annotation: Domain name=zf-RanBP; Domain location=140-171; Score= 32.3; E_value=1.7e-06; Accession=PF00641.9; Description=Zn-finger in Ran binding protein and others
MPAPPAPGYDRLPLFYGGGGGAPSPISLGSGSYGGPYPHLGMRYGYGPPVGAPGSYGLFSSYGQPGPMSGMGYGPGPELGRYSYGFRGSPMPVSSPWSGGAIAENNDNIASRKRRGVFLFPFPISQLLCKFLYVGPDGLSEGDWTCPKCDNINFSFRNTCNMKKCGAPRPTPERMLVQQVSPDE

SEQ ID NO: 53072 - protein, 69 aa, Zea mays
  Coding DNA Sequence Number=SeqID_11293
MKGFLPTGMMAVLSSSERAWPLHRHLLLFEYGDRPRLGRRLKPKYRHVQTNGRARLGWLGPKPDLRAEA

SEQ ID NO: 53073 - protein, 195 aa, Zea mays
  Coding DNA Sequence Number=SeqID_11294
  Homolog annotation: Hit_ID=Q6QP54; Match level="QueryCoverage=45%, HitCoverage=31%, E-value=4e-26, Identity=70%"; Hit description =Putative kinase
  Subcellular localization annotation: CTP_CleavageSite=65; ConfidenceScore=5.30e-01
MDKVKTNIKPKTVQSESTGLSGGAPDCVRARTRAKARKTANSAPPDPGLGLGLRLGRRRTQLRPTQGSDSGSAPEDDELRFTRPQGSDTALASADDLRLARPKGSDSASAMKDRLDLDFGGASTSPNLGHRPATSTGSAFITLPRADSGHREQDRGTSARTQPSDSCPSAQAPVAFSDSPRPPDHLGAKISPAAT

SEQ ID NO: 53074 - protein, 163 aa, Zea mays
  Coding DNA Sequence Number=SeqID_11295
MGHPMPQPPPPIPAYPENLNEWHQQEYGVPFVTLEDEAKKFDDSFFQSAHVAALGPIPGNSRPSGSGYTPHPPPFQGPLSSSTFSLSYDSPGDSSYEDLPHMTKDMGDPVEEDKEDMRDTPRRKSEPSLPHMTSPGEGRQTKEKLKKMKDPKTVEEGDPSLKA

SEQ ID NO: 53075 - protein, 74 aa, Zea mays
  Coding DNA Sequence Number=SeqID_11296
  Subcellular localization annotation: CTP_CleavageSite=46; ConfidenceScore=5.37e-01
MKRLSMAAVHSFLNSTTATHGEDPGDTLSQAHKQTLTMTLTSVLTSASTSTVHRTRGSGNTRGLMERRLRWWFI

SEQ ID NO: 53076 - protein, 107 aa, Zea mays
  Coding DNA Sequence Number=SeqID_11297
MAREELDQGWSKANPVKSSAGACVNLGAKAQQRRHHGQTASSDEGGARQNATHIGVEGRRGVEQNSSQGAAQRLERERGRGLGRGAARVENWKEERGATGARKLGAP

SEQ ID NO: 53077 - protein, 186 aa, Zea mays
  Coding DNA Sequence Number=SeqID_11298
MAREELGQGWSKVNPVKSTAEACINLGAKAQQRRHHGHTASFDEGGARQNTTHTGVEGSRGIEQNPSQGAAQRLEKERGVRIGKRSSVRRELGGGKRSDRHTEFGRAIELRAWRAGASAGRCSAGREKRSARSRLGARSADREQAGALGWGRRWTPRWDFYQGGRADGSEGTTLRISSTNLRRRRR

SEQ ID NO: 53078 - protein, 73 aa, Zea mays
  Coding DNA Sequence Number=SeqID_11299
MTTTSWEIDGEQEACTWRAESTVHGLGEHSRDMEPGRALNISQPATNTQREKRIEEFGKLGLGRGEMKDLGAG

SEQ ID NO: 53079 - protein, 41 aa, Zea mays
  Coding DNA Sequence Number=SeqID_11300
MYNQVNTSSKEQYKHKSDEVAGDEADAVVRESGSPVRAGTD

SEQ ID NO: 53080 - protein, 101 aa, Zea mays
  Coding DNA Sequence Number=SeqID_11301
  Gene Ontology: Mol. function=structural constituent of ribosome; Cellular component=ribonucleoprotein complex; Biological process =translation
  Homolog annotation: Hit_ID=Q75IN7; Match level="QueryCoverage=60%, HitCoverage=88%, E-value=2e-27, Identity=96%"; Hit description =Putative 60S ribosomal protein L38
  Pfam annotation: Domain name=Ribosomal_L38e; Domain location=41-101; Score=138.6; E_value=1.7e-38; Accession=PF01781.8; Description =Ribosomal L38e protein family
MTIEDEKDMSISYFDPNKASGISVVLPPTINDGIADFFTSPKQIHEIKDFLLTARRKDARSVRIKRAKDAVKFKVRCSRYLYTLCVHDADKANKLKQSLPP

SEQ ID NO: 53081 - protein, 211 aa, Zea mays
  Coding DNA Sequence Number=SeqID_11302
  Homolog annotation: Hit_ID=Q10EV9; Match level="QueryCoverage=54%, HitCoverage=64%, E-value=5e-15, Identity=34%"; Hit description =Expressed protein
  Pfam annotation: Domain name=DUF538; Domain location=17-168; Score =109.0; E_value=1.4e-29; Accession=PF04398.3; Description=Protein of unknown function, DUF538
MAKLPRLRCPFAVLALVCILPLFAPRPALSSRAAPKDGVSFAGAGNTIHQLLKDHGLPGGLLPRGVESYTLDESSGLLQARLSAPCYAKYDNGDLAYFDNVVRGNLSKGALRGVEGLSQEELFVWLPVKGILVQDQEPGVILFDIGFAHKSLSRSLFEDPPDCKPSAASGMSAAAAVAAARWKVRRLDFESAVNLSPADEEMQLQALDSES

SEQ ID NO: 53082 - protein, 86 aa, Zea mays
  Coding DNA Sequence Number=SeqID_11303
  Gene Ontology: Mol. function=binding
  Homolog annotation: Hit_ID=Q6ZIQ0; Match level="QueryCoverage=67%, HitCoverage=16%, E-value=6e-19, Identity=85%"; Hit description=Arm repeat-containing protein-like protein
MADPESGMVDKAAYVLHSLVSSGEGRAATVEEGGIPVLVEMVEVGTSRQKIATLSLLQIGIDHDGADDGDRGVEERMSVGSMEGGR

SEQ ID NO: 53083 - protein, 476 aa, Zea mays
  Coding DNA Sequence Number=SeqID_11304
  Gene Ontology: Mol. function=DNA binding; Cellular component=nucleus
  Homolog annotation: Hit_ID=Q6YZE8; Match level="QueryCoverage=88%, HitCoverage=89%, E-value=5e-84, Identity=44%"; Hit description=SBP -domain protein-like
  Pfam annotation: Domain name=SBP; Domain location=113-208; Score =146.1; E_value=9.1e-41; Accession=PF03110.5; Description=SBP domain
MPVSWDLPDLEHDAVPPPIAAAASAAPSPAAASGIAAAAAGPPPAAAPRGAPSRAECSVDLKLGGLGEFGAADGTKEPVVAAAAAAAAAPPSASPMKRPRSGPGGAAGAQCPSCAVDGCKADLSKCRDYHRRHKVCEAHSKTPVVAVAGREMRFCQQCSREGNVTCLRRRNLLFERQFHLLAEFDEAKRSCRKRLDGHNRRRRKPQPDTMSSGSFMTSQQGTRFSSFPVPRPEPSWPGVIKSEDSGSYYAHQRHPVLSSRPHFAGGGSTPPAYSSKEGRRFPFLQDGCDQQQVGGFSAGAGAQQLEVSSTSTVCQPLLKAAAAAAPPPPPESSSSNKMFSDGLAPAVLDSDCALSLLSSPANSSSVDVGRMVVHQPAEHIPMAQPLVPGGLQQQQQHHPFGGSPAWFACSQAGSSAVSAGGFACPPGVESEQLNTVLVPSSDGGGHDMNMNYHGIFHVGGDGSSDGTSPSLPFSWQ

SEQ ID NO: 53084 - protein, 219 aa, Zea mays
  Coding DNA Sequence Number=SeqID_11305
  Homolog annotation: Hit_ID=Q10BS2; Match level="QueryCoverage=87%, HitCoverage=91%, E-value=9e-18, Identity=39%"; Hit description =Expressed protein
MDASQDVWDWEVVLPDHRSFSLSHGGKNLDDKETEEHDLLPPSGDVDVHDEFKGIGVVLDETCKSAVPSVADPIMNPEGGEEEKAIQSPDAEESVTADSNFAQQEEEEEEDIKKDGDDKVGALIGALCSFGVAAATACVFLIGGRLHHHHTQHNNIQLQFFGDDKRIQQVVRQTSRLNQKAMSFAMGAGASRHFGRPRAGAIARFSVIGYRSLASPPHL

SEQ ID NO: 53085 - protein, 143 aa, Zea mays
  Coding DNA Sequence Number=SeqID_11306
  Gene Ontology: Mol. function=identical protein binding; Cellular component=cellulose and pectin-containing cell wall; Biological process=negative regulation of enzyme activity
  Homolog annotation: Hit_ID=Q8H4X8; Match level="QueryCoverage=75%, HitCoverage=14%, E-value=2e-29, Identity=59%"; Hit description =Putative subtilisin-like serine protease AIR3
MDYESTIHDDGDVIFVSFGQDAPTSDDTKSFFHEPVTFSSLHTAIHGDPIVCSTGNSGPYDDTVINAAPWVIIVVATTVDRDFPNILTLGNIMRLGGTSLMSTTRQRTLLDGRCFLRHLQPVRHRRPCEGITDESMINEGGIL

SEQ ID NO: 53086 - protein, 472 aa, Zea mays
  Coding DNA Sequence Number=SeqID_11307
  Gene Ontology: Mol. function=identical protein binding; Cellular component=cytoplasm; Biological process=negative regulation of enzyme activity
  Homolog annotation: Hit_ID=Q8H4X8; Match level="QueryCoverage=98%, HitCoverage=30%, E-value=2e-57, Identity=59%"; Hit description =Putative subtilisin-like serine protease AIR3
GSALSANVVAKGEDVGEVPVDGDSSDGDDPWHGVDDCVIIEAGIAARVYDGDTIDGGVEGAKHDELMEEGLGISERRVLAEGDEDDLSTVMDGGLEAHEDAGIGNSLHRLADLLGRDTRPWCAAFGCDSGVSEEAGTGHVAVDSDGERVGVVALGVTCPVSAMFAQEEEEEGEEEDIKKDGDDKVGALIGALCSFGVAAATACVFLIGGRLHHHHTQQHKIQLQFFGDDKRIQQVVRQTSRLNQKAMVEGVKSTFECVVRVRGGINHQVERAGSWWTQGSAPSAHAVAKGEDVGEVPVDGGGDDGDDPWRGVDDCVIIGAGIVAGVYGGDIMDGGVEGAKRDGLMEEGLCIVSERRVLAEGDEDDISTIIDGRLEAHEDAGGGNALRRPADLLGRDTRPWRATFGGDSGVSEEAGTGHGAVDCDGQRVGVVALGVARPVSAMVVLLSSISLLKNQAPMILGLQAKPCFTESW

SEQ ID NO: 53087 - protein, 74 aa, Zea mays
  Coding DNA Sequence Number=SeqID_11308
MVFIRYEPGSKAYRFYNSDICLSLWIAVAAIRTIAFNPKRTTQRIYVKKKQHGAYIGLVGAHEWQLQARQGCQH

SEQ ID NO: 53088 - protein, 122 aa, Zea mays
  Coding DNA Sequence Number=SeqID_11309
MEFVKPPDTTRDLDTSHDGETLLQFKMLDIVLGSVEIPRLVEWEFVVNEDFLLTIGDDEPDTFKEARGNADCRKCDEQGSAVKHKAQFVAKGYRSSTGATPITLGQAAYACKLLEKASMGKF

SEQ ID NO: 53089 - protein, 97 aa, Zea mays
  Coding DNA Sequence Number=SeqID_11310
MEVREGKRGYPYLSPEDSARDRDNDVPDSGNGGELLARFVVAGSEMTSGTEEPATEAKRAARARHCWWRLTRVWMSWAHYYIAIDAFIFIIHKCTIN

SEQ ID NO: 53090 - protein, 144 aa, Zea mays
  Coding DNA Sequence Number=SeqID_11311
MGRCRTPVYMVRASKFGPGPPRFYIWPPLRYTPRDRAYGRHRYAPGDLPRFHLSLPSSSHRIPSLSILSAHLYRSSAPPPPRTMSGSLSPPPSRSAAVSCSNGFTYPSPSPTHSSPLPPAPATFNAAGMGDLRRSGGPRDGGGG

SEQ ID NO: 53091 - protein, 511 aa, Zea mays
  Coding DNA Sequence Number=SeqID_11312
  Homolog annotation: Hit_ID=Q9SJ17; Match level="QueryCoverage=18%, HitCoverage=100%, E-value=1e-10, Identity=45%"; Hit description =Expressed protein
MADGPPLHLHHLHLHDGDSDVSLWREMGGTERPPGPPPTAAASLQLAKGLAPAASKCKWLAAVQHLFGKGKEMKGKKRLWCGVAEVSRPGALSTLGNSREDPCLPDRVSRVRSMKRGGRERFIGLLQLRSQIAKQRPSLSEEELVLRVRRKSTPTFRGPLTPPRGRHWHWHWRASCETVTTDPSYAEPWHARIQERSRYYNCNGQTAAAASTSVAEAATSESSSSIHPARPLEIEDSRHRQDHNCQACVRRPSTRDAKAFDMLYLAFLAVRYRPQQEPANGSLKYSGSSTTGKCGVLLFIRYPSAQSCCLVLIVFANSVPQHNSATPPALLLRQPVEHHAMAVRAEVPRRGAVRGLVRDIRVQSVPIRSSTWKEHHGHGVHGGLRRRGAVVGSPIRRQRGRRTPATASNGTERNAIMSGAQGAQPKGAFTATTYTSAAATGGGAAQGQGQGQEDQERRQTPRTELRSAEDERGLPVRKLEDAVEDAAGKGGPVFGAGTEDGKPDLGVTGTG

SEQ ID NO: 53092 - protein, 191 aa, Zea mays
  Coding DNA Sequence Number=SeqID_11313
MGVWAWVPGFCASLHSPTPPYPGAVAGGRGLCCCPVAFQPHSLCRPPGSDTAEAEPAGHGGRTVYSAPLPVPAWAGAWPGGGSRAGGAAGKRKSGAAARKRLCDLQVQGGGREGVREHEAVVVNSQQCAMSPAGQIFLPMRSACALLRFVVVAAITDALSKTWVKIVEQQFVRAASKRSILIINRGSKAVT

SEQ ID NO: 53093 - protein, 37 aa, Zea mays
  Coding DNA Sequence Number=SeqID_11314
MAIGTLSDAANDSIDIDKLTYIDGQCTGDRIEMYQKL

SEQ ID NO: 53094 - protein, 60 aa, Zea mays
  Coding DNA Sequence Number=SeqID_11315
MAFKLYRKGSSLISTIEHQQINMRAMTLILLKFGVISDESYMSLLMSLVYESSFVRFMLS

SEQ ID NO: 53095 - protein, 131 aa, Zea mays
  Coding DNA Sequence Number=SeqID_11316
MARTPTHSLGYGEHRHTFNSIAGHWNVATDGGGRTAGPTSSIPRARNVYSTVEESLRLPSHNEVGTRVAWSPWSLDALAKADWVAMGKVNTSRTPGSPRPQSVLWLKLKIRDDSWEPINIPLEDWLKQCIH

SEQ ID NO: 53096 - protein, 90 aa, Zea mays
  Coding DNA Sequence Number=SeqID_11317
MEAGRAEAEDAQGAGSLDVGQRRWAPFSNKKDTKISQLRMSVLVCIESATHSGSDVTHRTCGREAMRSPDTDFALKTLVVKFGYGIIDCI

SEQ ID NO: 53097 - protein, 269 aa, Zea mays
  Coding DNA Sequence Number=SeqID_11318
  Homolog annotation: Hit_ID=Q6QP51; Match level="QueryCoverage=62%, HitCoverage=74%, E-value=7e-11, Identity=42%"; Hit description =Putative growth-regulating factor 1
MEAQAHASCNRHAESFVHATAPPLAPPPRLLDCGTDTATRGNPGHDQAAPAWRDGQCGQKWAGSNGGGRRAGEAGPGKGDTPKRILPREGTRLRASLLIRGSKAGPSEGFDSRLRSRGLYTHYWSEVRRPAPRKGSTDASGYSGSAPTTDQGARTWAKPRKTANSAPPDPGLGLGLSPGRRRTPLCPTQGSDLGSAPEDGELRTARPRARTWAQPQKMTNSAPPDPRARTTPWPQPTVSASPDPGARTRPRPRKTESTSTSEELPHRPT

SEQ ID NO: 53098 - protein, 79 aa, Zea mays
  Coding DNA Sequence Number=SeqID_11319
MELGAKIYGAELGPKCKKFGLEGISYLSLPGCMVVLGQLFDVINDVSINNEIAMMLLKDSLPESGALVLYRVSEALGKA

SEQ ID NO: 53099 - protein, 52 aa, Zea mays
  Coding DNA Sequence Number=SeqID_11320
MAQSLFLPHRYLDLAPWERDLRVLWGRQATRGVPRRVYVYSSQDAKRIGLRH

SEQ ID NO: 53100 - protein, 193 aa, Zea mays
  Coding DNA Sequence Number=SeqID_11321
  Gene Ontology: Mol. function=protein-tyrosine kinase activity; Biological process=protein amino acid phosphorylation
  Homolog annotation: Hit_ID=Q6AV53; Match level="QueryCoverage=92%, HitCoverage=73%, E-value=7e-39, Identity=52%"; Hit description =Putative PB1 domain containing protein
  Pfam annotation: Domain name=PB1; Domain location=29-120; Score=37.5; E_value=4.5e-08; Accession=PF00564.15; Description=PB1 domain
MAPEAPSRRGDNTHMKLLCSHGGRFQPCGPDGELRYVGGETRVLVVPRTVSFRDLAARLAEMAGGSVQVRAIRHRLADEGVEDVIVTVTCDEEVAHMRDEYDRLRATRPAARFRVYVTTTASPSSAGSKTATTAGLPPRAPSMRRVQSELEVSARAHNQHRPAQRVHSAPELAGGVHMQMQPSFYNHHRHQHC

SEQ ID NO: 53101 - protein, 1318 aa, Zea mays
  Coding DNA Sequence Number=SeqID_11322
  Homolog annotation: Hit_ID=Q6AV51; Match level="QueryCoverage=49%, HitCoverage=92%, E-value=0.0, Identity=75%"; Hit description =Putative HIPL1 protein
  Pfam annotation: Domain name=Branch; Domain location=954-1184; Score =358.2; E_value=1.3e-104; Accession=PF02485.11; Description=Core-2I -Branching enzyme
MRRPPIVARVRRSLFLLLCCCCCLAAWSSPPAVRALPLCTDGRAPVPLNRTLGFCSAYGGGGSSSSCCDAAADAALRKRFNAMNISDAACAGVIKSVLCAECSPFSAELFNSSSKIQMVPLLCNYTSSSSSAQSKDSTRDYCKLVWETCKNVTIVNSPFQPPLQGSARLPSSSSKLTDVWQSEHDFCTSFGGSSGEQSLCFNGNGIFFNSTEPSPTPKGICLERISNGSYLNMASHPDGSNRVFLSSQAGKIWLASIPEQGSGGTLQYDEANPFLDITDEVYHDSQFGLMGIAFHPKFATNGRFFVSYNCDRTQSPKCAGRCSCNSDANCDPSKLGTDNGAQPCQYQVVVSEYSTKISSPNVSMATSANPSEVRRIFTMGLPYIAHHGGQILFGPTDGYLYLMMGDGGSEGDPFNFSQNKKSLLGKIMRLDVDSTQGQSQTTNQSLWGNYSIPKDNPFADDSDFQPEIWALGFSNPWRCSFDSERPSYFYCGDVGKDAYEEVDLVTKGGNYGWRVYEGPYIFHPQKSPGGNTSPESINAIFPVMGYDHSAVNKEIGSASITGGYVYRGSADPCLYGRYLYTDLYSSLMWTGTEAPEGSGNYTSAVKPVSCSKASPIGCESVAGSTDPLLGYVFSFGEDSRKDVFVLASKGVYRVVRPSLCGYTCPAERPATDNGTAPGPGGPSSGAPAATRLGRSVAAVAVALALIPKGLLEGAEESALVPNAAAAPRFWPRGTSLSSGGCASSCWDGMPSRRPRRVVRRRGRPNGETGAICALFNNSTADGSQRNKNPMMRSSLSTATTYVITSRFRCQCHAGTTRRNHKERDPALPASPLSSALPIPRSPAYRQAQAPASKVQTQLELRASMESAAPCPRAHAHPVDLRWLLSVAAGGLFALLLVLLATSPSFRLASTSPSPRLFLGPASGSSRARPPLFVEPALSRPAAPSPPASASLPRFAYLISGSAGDAGMMRRCLLALYHPRNRYVLHLDAEAPDADRAGLAAFVAAHPVLAAARNVRVVEKANLVTYRGPTMVTTTLHAAAALLWGEGRGRGADWDWFINLSASDYPLVTQDDLMHVFSKLPRDLNFIDHTSNISWKAFARAMPVIIDPALYMKKKGDLFWVPERRSLPTAFKLFTGSAWMVLSRAFVEYLIWGWDNLPRTVLMYYANFISSPEGYFHTVACNADGFRNTTVNSDLHFISWDNPPMQHPHQLTVGDWDRMLGSGAPFARKFRRDDPVLDRIDADILARGPGTVAPGGWCGRGAAGGGGQGQSNGTDPCAAVGDAAVLRPGPGAERLQRLVTSLLSEENFRPRQCVVENEN

SEQ ID NO: 53102 - protein, 149 aa, Zea mays
  Coding DNA Sequence Number=SeqID_11323
  Subcellular localization annotation: CTP_CleavageSite=56; ConfidenceScore=5.13e-01
MGRLALLICVLLLAAAIVANGARSAGTVRGGGGGAAPASPVVATKPTVAAVDKTTPAAAAAATAETTATSEQQQQPTLDDPSSDSKRKESQMGRSTVQESVGWRRRCSYQCYAEANRSCWETKIARPKWSLGLNGVKRSTCRTPSTHFT

SEQ ID NO: 53103 - protein, 105 aa, Zea mays
  Coding DNA Sequence Number=SeqID_11324
MTRERSDDLALVAYYDAAEKARVEKITKEIMVGLYDYSDDSKEFDFEEDTDDVEDQPSKPSYLWQVNHKGGSYQGTAGAAARGWRDVPGPATVRVRETGPWWHRP

SEQ ID NO: 53104 - protein, 264 aa, Zea mays
  Coding DNA Sequence Number=SeqID_11325
  Homolog annotation: Hit_ID=Q94LW4; Match level="QueryCoverage=27%, HitCoverage=25%, E-value=1e-12, Identity=62%"; Hit description=KNOX family class 2 homeodomain protein
MDLATAVQYRSNFLLSTTVYASGLLPPHRYLRVGAWELVHGAATRWQATCALSKSSYSGCTAMASFSLSQPGPTTMTPETKLGFEATPTAGSIANAWSIESRERYAKEATTVGIKGRLSSNPYLAPSMEAGGEGATEVTACVAGASGEIHSQECVRGGLWSDGEIHMRGSGESTAGAVEAGARRVQAVARGARIWEDLRLRMHSADDLPLRRWWEEGDGEEGPRIRVDCRSAVLTADGEVGGEEGPRIRVDCGRVHAGATVAGA

SEQ ID NO: 53105 - protein, 1068 aa, Zea mays
  Coding DNA Sequence Number=SeqID_11326
  Gene Ontology: Mol. function=RNA-directed DNA polymerase activity; Cellular component=intracellular; Biological process=RNA-dependent DNA replication
  Homolog annotation: Hit_ID=UPI00005A975E; Match level="QueryCoverage =95%, HitCoverage=59%, E-value=0.0, Identity=86%"; Hit description =PREDICTED: similar to Retrovirus-related Pol polyprotein from transposon 297
  Pfam annotation: Domain name=RVT_1; Domain location=56-225; Score =127.3; E_value=4.3e-35; Accession=PF00078.17; Description=Reverse transcriptase (RNA-dependent
  Pfam annotation: Domain name=RnaseH; Domain location=455-582; Score =4.1; E_value=2.4e-05; Accession=PF00075.14; Description=RNase H
  Pfam annotation: Domain name=rve; Domain location=780-939; Score =123.9; E_value=4.4e-34; Accession=PF00665.16; Description=Integrase core domain
  Pfam module annotation: Pfam domain module=RVT_1::RnaseH::rve; Domain location=56-225::455-582::780-939
MPGIPRDVAEHSLDIRAGARPVRQPLRRFDEEKRRVIGEEIHKLMAAGFIKEVFHPEWLANPVLVRKKGGKWRMCVDYTGLNKACPKVPYPLPRIDQIVDSTAGCETLSFLDAYSGYHQIRMKESDQLATSFITPFGMYCYVTMSFGLRNAGATYQRCMNHVFGEHIGRTVEAYVDDIVVKTRKASDLLSDLEVTFRCLKAKGVKLNPEKYVFGVPRGMLLEFIVSKRGIEANPEKIAAITSMGPIKDLKGVQRVMGCLAALSRFISRLGERGLPLYRLLRKTECFAWTPEAEEALENLKALLTKVPVLMPPTDGEALLVYVAATTQVVSVAIVVERQEKGHALPVQRPVYFVSEVLSETKIRYPQVQKLLYAVILTRRKLRHYFESHPVTVVSSFPLGEIIQCREASGRIAKWAVEIMGETISFAPWKAIKSQVLADFVAEWVDTQLPTAPIQPELWTMFFDGSLMKTGVGAGLLFISPLGKHLRYVLRLHFSASNNVAEYEALVNGLRIAIELGVKRLDARGDSQLVIDQVMKNSHCRDPKMEAYCDEVRRLEDKFFGLELNHIAWRYNETADELAKIASGRTTVPPDVFSRDLHQPSVKIDDAPEPEAPSAQPEAPSARPEAPSAQPEEPSAPEAEVLDVEEEQSGATPDRNWQAPYLRYLRQGELPLDQAEARRVARRAKSFVLLGDEEELYHRSPSGILQRCISIAEGQELLQEIHSGACGHHAAPRALVGNAFRQGFYWPTAVADVTRIVCTCEGCQFYAKQTHLPAQALQTIPITWPFAVWGLDLVGPMQKAPGGYTHLLVAIDKFSKWIEVRPLNSIRSEQAVAFFTNIIHRFGVPNSIITDNGTQFTGKKFLDFCEDHHIWVDWAAVAHPMSNGQVERANGMILQGLKPRIYNGLNKFGKRWMKELPSVVWSLRTTPSRATGFSPFFLVYGAEAILPTDLEYGSPRTRAYTDQSNQASREESLDQLEEARDRALLHSARYQQSLRRYHVRGVRPRDFQVGDLVLRLRQDARGRHKLSPPWEGPFVIAKVLKPGTYKLANNQGEIYGNAWNIKQLRRFYP

SEQ ID NO: 53106 - protein, 74 aa, Zea mays
  Coding DNA Sequence Number=SeqID_11327
MKFGRKFYTYVQLGGGKKLAHKAANKVEVIREAIRLKDLKLFDDKHTYSDALSLEPEEHISKNNLEIKESLAIY

SEQ ID NO: 53107 - protein, 296 aa, Zea mays
  Coding DNA Sequence Number=SeqID_11328
  Homolog annotation: Hit_ID=Q6QP51; Match level="QueryCoverage=33%, HitCoverage=49%, E-value=5e-16, Identity=46%"; Hit description =Putative growth-regulating factor 1
MTTSKKVRHVIRFRILFLFLFLSLTTRTGKGDTQKGILLREGNGPRAPLLIRGSKAGPSEGFNSRLRALEFRAHYWSDVRRPAPRKGSTASSGHSGSAPTTDQGFVGWPSKGSTVASDAERGMTLEDSAACAARTAVPLDRVRLTAAKSGLGRHRKLRLARPQGSDLASAPEGDELHLARPQGSDSASALEDDELRLARPQGSDSAPEDDELRLARPQGSDSASAPEDDELRLTRPQGSDSALASTDGLHLARPKGSDSTLTSEDRLDLDLGGASASPYPGLGPTTSQEGPSLPYP

SEQ ID NO: 53108 - protein, 206 aa, Zea mays
  Coding DNA Sequence Number=SeqID_11329
  Gene Ontology: Mol. function=RNA-directed DNA polymerase activity; Cellular component=mitochondrion; Biological process=RNA-dependent DNA replication
  Homolog annotation: Hit_ID=UPI00004C1731; Match level="QueryCoverage =93%, HitCoverage=13%, E-value=1e-97, Identity=89%"; Hit description =UPI00004C1731 related cluster
  Pfam annotation: Domain name=rve; Domain location=2-156; Score=95.2; E_value=1.9e-25; Accession=PF00665.16; Description=Integrase core domain
MQRLEPSWGMPSDKKAPGGFLHLLVTIDKFSKWIEVRPLTSIRSEQAVAFFTNIIHRFGVPNSIITDNGTQFTGKKFLDFCDDHHISVDWAAVAHPMTNGQVERANGMILQGLKPRIYNDLNKFGKRWMKELPSVVWSLRTTPSRATGFSPFFLVYEAEAVLPTDSLRTRAYDDQSNQTSQEDSLDQLEEAQDIALLHSARYQQSL

SEQ ID NO: 53109 - protein, 50 aa, Zea mays
  Coding DNA Sequence Number=SeqID_11330
MGQSPEYEVYFRESYPSTQKTLKDMLAFKGVKSNAKNKKNLFVKQGIKEK

SEQ ID NO: 53110 - protein, 165 aa, Zea mays
  Coding DNA Sequence Number=SeqID_11331
MAVATPQYDDERVFKVWPIFDEECIFDAEPIFDEDPNGLITESVDVFGSSGVPMYDDVFATTAYSTVVTSEFKEQSREAEKWARAGQPSGEVAATVARGFGGREESDSLGPRVSEARESWMTSGGHGIGTRSLMHGTHATDPSGPHVGAGAELRPYVRGSESLLG

SEQ ID NO: 53111 - protein, 103 aa, Zea mays
  Coding DNA Sequence Number=SeqID_11332
  Subcellular localization annotation: CTP_CleavageSite=87; ConfidenceScore=5.37e-01
MTQKHVPAIFGVGVGGSSCSVGGYSSTGVRGVGVTVSDGGIRAKPNGLPSDPPDSSLLLPSFTSNMDNAHRERTGGAEEKVITGTEREMEDSGFGHQDATATI

SEQ ID NO: 53112 - protein, 105 aa, Zea mays
  Coding DNA Sequence Number=SeqID_11333
MAPPCLMSRRRGVSFSTLESARIGRFRINQTVGCVSFAKESPRNSPINPPSRDYYSLCLGDLAPRPLTFLEFEAQSKEDEQATVDPEVQQVEVVEQELIEGKLCP

SEQ ID NO: 53113 - protein, 450 aa, Zea mays
  Coding DNA Sequence Number=SeqID_11334
  Gene Ontology: Mol. function=monooxygenase activity; Cellular component=intrinsic to endoplasmic reticulum membrane; Biological process=electron transport
  Homolog annotation: Hit_ID=Q9AV12; Match level="QueryCoverage=80%, HitCoverage=98%, E-value=1e-137, Identity=63%"; Hit description =Putative flavin-containing monooxygenase
  Pfam annotation: Domain name=DAO; Domain location=6-271; Score=-46.2; E_value=0.0067; Accession=PF01266.14; Description=FAD dependent oxidoreductase
  Pfam annotation: Domain name=FMO-like; Domain location=7-431; Score= -236.1; E_value=4.8e-13; Accession=PF00743.9; Description=Flavin -binding monooxygenase-like
  Pfam annotation: Domain name=Pyr_redox; Domain location=221-298; Score=-4.3; E_value=0.034; Accession=PF00070.17; Description =Pyridine nucleotide-disulphide oxidor
  Pfam annotation: Domain name=Pyr_redox_2; Domain location=6-293; Score=-33.8; E_value=0.034; Accession=PF07992.4; Description =Pyridine nucleotide-disulphide oxidore
  Pfam module annotation: Pfam domain module=DAO::FMO-like::Pyr _redox::Pyr_redox_2; Domain location=6-271::7-431::221-298::6-293
MRRRAEVAVVGAGAAGLVAARELLREGHTVSVFEKSGRVGGTWAYSPRADADPLGSDPGAPGAVHSSLYASLRTNLPRELMGFSGFPLAGRAFAGDPRTFPGHREVLAYLDAFAADSGVAPHVRLRAQVLRVRPLCPGRGQGEKWAVAWRGEDGDVAEEAFDAVVVCNGHCSVPLVPKIRGINKWRGKQMHSHNYRTPEPFQDQLVITPHQFQTGKLSLQSVVVVGLGASGIDIAREISHVAKEVHISARYSEGRLGKIELYHNAWMHSEIECIQDDGQVRFAEGSSVAADTILYCTGYRYHFPFLDLDGFTVDDNRVGPLYKHVFPPKHAPNLCFVGLPYKSIIFQALELESKWVAAVLSGRAELPVEEDMTADVEEEYQRMEDAGKPKRHTHTLWPRWVEYLNWVADQVGEAHLEPRKCEMYEKALKCVWSLDEGYRDRWEEESIGSG

SEQ ID NO: 53114 - protein, 103 aa, Zea mays
  Coding DNA Sequence Number=SeqID_11335
MVVGAVGGAAGGAEVWGAAGTGGGGQGGGGWAGAAAGTSGHNGGDGRDTVAGTGAAETGERGGRRVRRRRRQFERKERNEPARGARGVHKPLIPVGQSIGRRE

SEQ ID NO: 53115 - protein, 200 aa, Zea mays
  Coding DNA Sequence Number=SeqID_11336
MVARLTGGRRGPGGPGGHVEGRITGGDGGIGLAACAGSRARRRCLLRPAHDGRIQLNSTGSFTGGQGCCRHKELTNGLPCSSVDVRQRPVEVRRRQSGVSGEVVFGLWARGASLSSEEASRGVRRGGGGLEWPVYSGWGSGGRWHAVPRANAGELVLGQGWSARGHTVEAGVGFIAAGVGAGLTRRGARRAERRGVLWCC

SEQ ID NO: 53116 - protein, 84 aa, Zea mays
  Coding DNA Sequence Number=SeqID_11337
MSVDRGCELGTSLVVPWPLSIKETNFLSLLRLKIHTQTVFLFDKMECRQAQKRNGSAELKLRIFHAFLQGSRPPVPSLPVPAPW

SEQ ID NO: 53117 - protein, 81 aa, Zea mays
  Coding DNA Sequence Number=SeqID_11338
MESSPMSSATLTANDLLKRVKGMVGKADYNVLPQVFCLFPGVAGLQIRPASSPEGRGEPSVAQVIYRAVVEEEGLGKEASP

SEQ ID NO: 53118 - protein, 72 aa, Zea mays
  Coding DNA Sequence Number=SeqID_11339
  Subcellular localization annotation: CTP_CleavageSite=42; ConfidenceScore=5.41e-01
MGGVVSVGLGWSRWIRAVTGQTSPRRLSLFPSAVRSSPAFLRERAEKEGRMSISGRDGNGDPIPDSPREFPY

SEQ ID NO: 53119 - protein, 104 aa, Zea mays
  Coding DNA Sequence Number=SeqID_11340
MEQSITQSSGSRTPTNWQGAKHMGKIGIRRDGLWGFRETNSGQIRDSERTDSGRFVTWTTAKTWRRLLASEKDGGLGGGAAPASKEEEEGSSGPERVNRGIDSG

SEQ ID NO: 53120 - protein, 223 aa, Zea mays
  Coding DNA Sequence Number=SeqID_11341
MRAPRCGSVFMLRRVFVSCLVLRRVGDRFGEGPLTSPPAFAPLEEKKGAAMHGGDNAMQIKKRKIRRGRGGKGNMQSKPSSGSEEDIGPHLVQLESRVAEVIQPKPSCVLDFSDEMAWEEVELRRALFVTIVGTRPEVSGREVVEEVARYFQVEEDNMVIHHSMLEDFIMFLPNAQPPGFSMEVRCIEVLVSACNSGVGRGLHTPQRPICRAWLMWKYVLYRL

SEQ ID NO: 53121 - protein, 167 aa, Zea mays
  Coding DNA Sequence Number=SeqID_11342
MDLIIVEPRLGGQEQRCLSYNVEVMVFPVDKPVGDASAPPLEEDEQDAGIEEEDLQAVLGEGAEGPLAERLLLAALGGTTLEEELEGFVEEMYSSKYGGVQPGTTTDRNVEANRQSLQFLPQIHGPLDFDGPNICIASQCTSDEAESPDGTLGLGEPFCPCACVMAR

SEQ ID NO: 53122 - protein, 113 aa, Zea mays
  Coding DNA Sequence Number=SeqID_11343
MTLPEGWRRWRSGGDAGAVLRTMLAEVSGRPTFGVRTRLFSTRRHQPLPCHCSFYADHGRFAPLVRTVCPCTSTTEITTCSCSRHTLMSRMVHCKGLDNPRIGEFPKSFSCPE

SEQ ID NO: 53123 - protein, 137 aa, Zea mays
  Coding DNA Sequence Number=SeqID_11344
MVTNSPPLAAKNGGARTECGGGIAGAQATQVPGAPTQVWLGATRRGCEGEFVGATNPTNRPWLEPARDNAPSATKMDTDGNSRRTATLSRFIKCNGQRDGTNKRYMGVLPALEYRACLPKTTGGGRVRPPMARVPSA

SEQ ID NO: 53124 - protein, 408 aa, Zea mays
  Coding DNA Sequence Number=SeqID_11345
  Gene Ontology: Mol. function=protein serine/threonine kinase activity; Cellular component=membrane; Biological process=protein amino acid phosphorylation
  Homolog annotation: Hit_ID=Q9LUI6; Match level="QueryCoverage=95%, HitCoverage=91%, E-value=1e-145, Identity=65%"; Hit description =Kinase-like protein
  Pfam annotation: Domain name=Pkinase; Domain location=63-379; Score =139.2; E_value=1.1e-38; Accession=PF00069.15; Description=Protein kinase domain
  Pfam annotation: Domain name=Pkinase_Tyr; Domain location=63-379; Score=185.5; E_value=1.3e-52; Accession=PF07714.7; Description =Protein tyrosine kinase
  Pfam module annotation: Pfam domain module=Pkinase::Pkinase_Tyr; Domain location=63-379::63-379
MTSTAAGASSSAAKSESYLRADKIDLESLDIQLEKQLAKTWEKHKGSYNQGPREDWEIDLAKLEIRYVIAQGTYGTVYRGTYDGQDVAGRLAWQMIHLVSADGFASETETATLRASFKQEVAVWHELNHPNVTKFVGASMGTTDLKIPANSSNSGGRTELPPRACCVVVEYLAGGSLKQYLIKNRRRKLAYKVVVQIALDLARGGVGGVLWSMLSRPRPGSGEMEVPPEALVEPASGLNYLHSRKIVHRDVKTENMLLDTQRNLKIADFGVARVEAQNPKDMTGATGTLGYMAPEVLEGKPYNRKCDVYSFGICLWEIYCCDMPYPDLSFADVSSAVVHQNLRPDIPRCCPSPMANIMRKCWDANPDKRPDMDDVVRFLEALDTSKGGGMIPEGQAGGCLCFFRARGP

SEQ ID NO: 53125 - protein, 75 aa, Zea mays
  Coding DNA Sequence Number=SeqID_11346
MAARSVTEIHGGGADTGAHELRQRCATRARDPVPCEVRGGQCVPAQSGEEDEPGTATAPWGRGAAIGRNPRHALW

SEQ ID NO: 53126 - protein, 835 aa, Zea mays
  Coding DNA Sequence Number=SeqID_11347
  Homolog annotation: Hit_ID=Q9LHJ0; Match level="QueryCoverage=86%, HitCoverage=98%, E-value=1e-105, Identity=36%"; Hit description =Arabidopsis thaliana genomic DNA, chromosome 3, P1 clone: MMP21
MEARFELRTSRQNSPRQKTRRGLNGGDRMDVRGAVNGDGLPSSSKRQRTSEGDTKFDASQYAFFGNNAVEEVELGGLDDDDDAAFIEHEDEENPLYGRDNMLEEGVGSFADIDDLAGTFSKLTRIVNGPKQPVVVSHSGSISRQKWVQESELPYWPTQPVLDTDHGLDKKNWWSQPPHSVNFIDYRLQRTSSSPQQDAQHNPVEPILEAKPSPLHRTSTYPQQEPQYSNTEPIPVPKSSFISCPPSGAASHSSPSQPHHVNMPSPPTAFQLHMSSAQNDLLLPQFHHGGTPPGPPFGRQNHVLNNGSMHGKGPRFMPGLMPHQLQCPNGLMPPQMQPPHQHGMLPIQQSPPQFSQLHARMIGPHHSPPQSMQMFGPQHPSSQVMSRFDANFAMPDLSDPRARSMLQHERLGQRYPHQGYELNNIRIDNGWSRFRSKYMCTEEIENIARMQQAATHINDPYIDDYYHQACLAKKSAGAQLKHHFCPTLIRDPSSRARSKDEPHAYLQVDALGRLPFSSIRRPRPLLDVEQASAPSDNAEKSVSKPLDQEPMLAARITIEDGLCLLLDVDDIDRLLQFSQQQDGGLQLRNRRQGLLEQLAESLQLVDLLAPNKNSPVSPYDDLVFLRIVTLSKGQKLLSHYLELLTSGSELARIACMAVFRHLRSIFGNMPSDISAVETMNRLAKAVSAHIVQMDLSDLSACLAAVVCSSLQPPLRPLGSPAGDWASVIIKYVLDRATVLLTDHHVASNYSMRNRSLWQASFDAFFGLLTQYCMSKFDRVVHTAQLQPAAATVITREMPVELLRASLPHTNEAQRKQLLSFAQRTVPVGTHSSHGSW

SEQ ID NO: 53127 - protein, 204 aa, Zea mays
  Coding DNA Sequence Number=SeqID_11348
  Gene Ontology: Mol. function=nucleic acid binding; Cellular component= mitochondrion; Biological process=DNA integration
  Homolog annotation: Hit_ID=Q8W0X5; Match level="QueryCoverage=99%, HitCoverage=58%, E-value=1e-83, Identity=76%"; Hit description =Putative pol protein
  Pfam annotation: Domain name=RVT_2; Domain location=1-52; Score= -187.4; E_value=0.02; Accession=PF07727.4; Description=Reverse transcriptase (RNA-dependent
MSMMGKLTYFLGFQVKQLKDGTFISQTKYTQDLLKRFGMKDAKPAKTPMGTDGHVDLNKGVSTPCFGIWYPKGSTFDLIGYSDSNYAGCKVDRKSTSGTCQFLGRSPVSWSSKKQTFVALSTAEAEYVAAGQCCAQLLWMRQTLRDFGYNLSKVPLLYDNESAIRMADNPVDHSRTKHIDIRHHFLRYHQQKGDIEVYHISNEN

SEQ ID NO: 53128 - protein, 335 aa, Zea mays
  Coding DNA Sequence Number=SeqID_11349
  Gene Ontology: Mol. function=oxidoreductase activity; Cellular component=vacuole; Biological process=response to oxidative stress
  Homolog annotation: Hit_ID=Q8S5Y4; Match level="QueryCoverage=87%, HitCoverage=88%, E-value=1e-111, Identity=67%"; Hit description =Putative peroxidase
  Pfam annotation: Domain name=peroxidase; Domain location=47-299; Score=446.8; E_value=2.7e-131; Accession=PF00141.13; Description =Peroxidase
MAFPTAMAAVAVALCAAFALAALGGAEAQQLSPAYYDDSCPHVYDTVRRVIQEARASDPRILASLLRLHFHDCFVNGCDASLLLDETPTMRSEKEANPNKGSARGFPVVDDIKAALENACPGVVSCADVLALAAEVSVELAGGPYWRVMLGRTDGMAANFDGAQNLPNPTEPLNDLKQKFADLGLDDTDFVALQGAHTIGRAQCRFFQDRLYNFSDTERSDPTLDRSYLAALRESCPAAVSDNTCLNNLDPATPDTFDNRYYANILSNRGLLRSDQAMLSAPEEGAVSTAPIVGRFANSQVEFFQSFATAMVKMGNIAPMTGGLREVRRNCRVVN

SEQ ID NO: 53129 - protein, 133 aa, Zea mays
  Coding DNA Sequence Number=SeqID_11350
MACACRYDPVVFPASCAVAGCGPARVGLSHPQLTCDVSSAELGTEIDLAHQPPPAKAASNDGIERRNTKFTPTPPSGLRFVLGSFSGARWRFLGQPKGVRQLGAGGIRRRGSGSIAVPLLAVASLHVVIIAGG

SEQ ID NO: 53130 - protein, 334 aa, Zea mays
  Coding DNA Sequence Number=SeqID_11351
  Gene Ontology: Mol. function=oxidoreductase activity; Cellular component=vacuole; Biological process=response to oxidative stress
  Homolog annotation: Hit_ID=Q43004; Match level="QueryCoverage=90%, HitCoverage=90%, E-value=1e-130, Identity=76%"; Hit description =Peroxidase
  Pfam annotation: Domain name=peroxidase; Domain location=50-298; Score=452.0; E_value=7.6e-133; Accession=PF00141.13; Description =Peroxidase
MERKSFSCRDTASCLALLAVALCLGAATVARGQLTDDFYDDCCPQAENIVRARVSAAMKAEPRMGASLLRLHFHDCFVNGCDGSILLDGNNTEKLAGPNLNSARGFDVVDAIKADLEKACPGVVSCADILAIAAKYGVLLSGGPDYDVLLGRRDGLVANQSGANSNLPSPFDPISTITKKFSDVGLNTTDVVVLSGGHTIGRARCVLFSGRLANFSATSSVDPTLNASLASSLQALCRGGDGNQTAALDDGSADAFDNHYYQNLLGQRGLLSSDQGLFSSTDGSAATTRALVQAYSASSERFFCDFGRSMLKMGNILPLTGSAGQIRSNCRAIN

SEQ ID NO: 53131 - protein, 143 aa, Zea mays
  Coding DNA Sequence Number=SeqID_11352
MGKNNKRKREPTPPSEDFGDSEYSEEEFSSESERSPAPIPLRESSDDSDDSQGLAAEVWTYIRAVERSGLEGSNESEYSSDEEDSSEEDGGGDGEDDDDDDDDEGGGGGDGDGGGRGGSSGSKGDGGGSSKGGNRGGSSRASG

SEQ ID NO: 53132 - protein, 121 aa, Zea mays
  Coding DNA Sequence Number=SeqID_11353
MPVSVLAFATAGVINFLVPDPAVQALQMWGDLLGACFPATMGISPSTYSLQLLGQTSLLRRAYLEPPPEWNPRNLGEESRVAFVRYSTNGLNPEFVVVSHPRVGYCVSPSYIDLLGARENV

SEQ ID NO: 53133 - protein, 53 aa, Zea mays
  Coding DNA Sequence Number=SeqID_11354
MASANPTQHSASRPQQGTIKSKTVGGIRGEGDIMLRYNGRMEGQTISITTIED

SEQ ID NO: 53134 - protein, 121 aa, Zea mays
  Coding DNA Sequence Number=SeqID_11355
MHVHHICLHQPDIVNLSLNHEDLDIICSKIDIVDTLKLRVTINCITLNALMDSNSTHTFICDTIIRCLGSQVTPKTGMWMKVANGECILNGGYTMTTLTIDNEGFITTSEFVGKRDPDPFD

SEQ ID NO: 53135 - protein, 483 aa, Zea mays
  Coding DNA Sequence Number=SeqID_11356
  Gene Ontology: Mol. function=transferase activity, transferring hexosyl groups; Cellular component=integral to membrane; Biological process=metabolic process
  Homolog annotation: Hit_ID=Q59J80; Match level="QueryCoverage=89%, HitCoverage=88%, E-value=4e-86, Identity=42%"; Hit description=Cyclo- DOPA 5-O-glucosyltransferase
  Pfam annotation: Domain name=UDPGT; Domain location=9-483; Score= -76.2; E_value=8.8e-07; Accession=PF00201.9; Description=UDP -glucoronosyl and UDP-glucosyl transferase
MVGTEHPVHVVLFPFMAQGHVAPFRFLAELVRRARPDASITIVATPWVSESLRATLAASNVDVHALPFNPADHGLPADAHNSASIGPDQLGSLFAASESLGPAFCRFVAGLRATDPAAHVHIMADMFLGWTVGVARDDAGVSHSIVFTCGSYGAAVYFSLWNSVPLGAFSAGSTDDAFVLPQFPQISVRRSQLSDQLAAADGKDTRSTFIRKQIAFFSRADALIVNTAENLEPKGLTMLQQWFNVPAYPVGPLLRTTVAASSSETKDTSSTIFAWLDKQLPGSVLYVSFGSQFNINATQMVELAIGLEQSAHKFVWVIRPPSGFDDNRECWSEWLPDGFSERLVVTGQGLVVPCWAPQVEILAHAANGAFLTHCGWNSVQESLAHGVPLIGWPLSAEQFYNAKMLVEEMGVCVEVARGSDGVRRERITEVVAMVLGDTLELAALRRNAAAEAEKLIRAAGENDRNGSSVKVMQMFFNEMSHLF

SEQ ID NO: 53136 - protein, 87 aa, Zea mays
  Coding DNA Sequence Number=SeqID_11357
MNALSREGCRHFEVFDQADEDFERDIYKVEDPIVKESAGAIYDRMWGPHGREVVRERAETARAQAVAYTHAVEGVEEDDVRLTTIVD

SEQ ID NO: 53137 - protein, 90 aa, Zea mays
  Coding DNA Sequence Number=SeqID_11358
MAPRILCDDGGSQPPYGSKRTGGLDGHADVLIVSEDGWSRLVHVRRRRLTRSTFASERRKSGEGDSGSSVRLYQVRGLGELHGSLAKLTE

SEQ ID NO: 53138 - protein, 43 aa, Zea mays
  Coding DNA Sequence Number=SeqID_11359
MTKVKPSYIVFEVEQHKDRKARHAVAVFGGALLATDYGSRLVP

SEQ ID NO: 53139 - protein, 96 aa, Zea mays
  Coding DNA Sequence Number=SeqID_11360
MAIHGGAPWPDPPPPHTAAQTQILRVLRDEKAKVNIKGGSYQGMRGRRDPVTVDGGVAVVFGSGEQSPCFKPPIPPYEVADAFSVLWRLSSTVNQA

SEQ ID NO: 53140 - protein, 98 aa, Zea mays
  Coding DNA Sequence Number=SeqID_11361
MTRPRSDCFPLILVYLIFSEPQLPGYIEEWVRVFYATVWIDPDHQWLRPVTLDFSTQVIRPVSAQPPLPPAYAITTTIMAVFVTAPAPAVPAPQPTSK

SEQ ID NO: 53141 - protein, 148 aa, Zea mays
  Coding DNA Sequence Number=SeqID_11362
MWQLWGRVELAPERALLLLACTPRPRCARLHLAEVDAPHSLPLTPVPRSLLPPLASATPNRHGRRELSSCPRSHCRHCPKPSTSTRFTVQPKNQSPCSSSEKTRAHPVDAVVHRFPPTCVDRALSSTVRKAEGTNEFVVNRHSSPTLA

SEQ ID NO: 53142 - protein, 638 aa, Zea mays
  Coding DNA Sequence Number=SeqID_11363
  Gene Ontology: Mol. function=protein serine/threonine kinase activity; Biological process=protein amino acid phosphorylation
  Homolog annotation: Hit_ID=Q6K5F8; Match level="QueryCoverage=88%, HitCoverage=88%, E-value=1e-166, Identity=54%"; Hit description =Putative PITSLRE alpha 2-1
  Pfam annotation: Domain name=Pkinase; Domain location=348-584; Score =171.7; E_value=1.9e-48; Accession=PF00069.15; Description=Protein kinase domain
  Pfam annotation: Domain name=Pkinase_Tyr; Domain location=348-584; Score=-85.2; E_value=3.1e-07; Accession=PF07714.7; Description =Protein tyrosine kinase
  Pfam module annotation: Pfam domain module=Pkinase::Pkinase_Tyr; Domain location=348-584::348-584
MAAGRHGGYRDYEERERELDAEASRRSKEQHHHLGGRHRDVDRRRDGGRSRGGRDFANGHGRRRSPPPRSRLAGRLGDREPGEVLSGSASDDSGGRSDRGRENGVRSSSREGDMVAGTGISSPIKKRKFSPIIWDRDSPKPPHSGAARDKKSVESVPSELPPPPPLPQDHIPLSLSVEKSPMDVETTVGTESAEQLPEHEVNKVIEQEEDYPSPTMRNISTSRWAGANDDEEGGAAPMKKRSVSPADSSVPGQWKRASPEPGEVSGGRAMSRSSDSGKIGNDEKEDSEVDKDDYMDVDREHASDSGTENCMSDTDSDNEMCRPETPEPERPPHRCINMLQGCRSVDEFERLNKINEGTYGVVYRARDKKTSEIVALKKYMEHDLKGVMETMKQPYTQSEVKCLMLQLLEDGHLFYRDLKTSNLLLNNRGELKICDFGLSRQYGSPLKPYTQLVVTLWYRAPELLLGTKEYSTAIDMWSVGCIMAELLAKEPLFNGKTEFEQLDKIFRTLGTPSEKIWPGYAKLPGVKVNFVKQPYNRLRDKFPAASFSGRPILSEAGFDLLNRLLTYDPDKRISADDALKHKWFSEVPLPKSKDFMPTFPALNELDRRTKRYLKSPDPLEEQRLKELQGNIGNRGLFG

SEQ ID NO: 53143 - protein, 127 aa, Zea mays
  Coding DNA Sequence Number=SeqID_11364
MASVRACGHGSQNLALHGTGGGPNKIKRKPVVQEEEKGNGSPTFSWVVIPEEVETRRLALLLRLGTRPPSACVPEPVLGDGAPGSGKPVPVDRRSRGGPEAVLASWDLGGDQCPEELLGRITARLQI

SEQ ID NO: 53144 - protein, 297 aa, Zea mays
  Coding DNA Sequence Number=SeqID_11365
  Subcellular localization annotation: CTP_CleavageSite=36; ConfidenceScore=5.08e-01
MDQLAVVSNPARMLAANGRLTVNGKKASTTSGILPREEKRQGGILFRGSKVRPSAGFGKTALGRQGSEPITDQGFEEAQEHNGNKTAVTSGRNNMITHVPLCAHATCYTRMGYLIRRKSRLALGRKTLPRPMLGLPSSTISASPDVWARPRVSSPPRPNSSSATCSTVNPADDHSTNCGARQGKLDHRLGKTSASPEQVSDLNICSEGLLVSPSTGTLTPPISRLLPMPRPCYNHYGMDNPSPGGSGVWPTARHRPRLSEGKQQAQVNNAVQGRVIHRAPRRLPSSATASDSTAYTP

SEQ ID NO: 53145 - protein, 379 aa, Zea mays
  Coding DNA Sequence Number=SeqID_11366
  Gene Ontology: Mol. function=protein serine/threonine kinase activity; Cellular component=nucleus; Biological process=protein amino acid phosphorylation
  Homolog annotation: Hit_ID=Q2QRH9; Match level="QueryCoverage=99%, HitCoverage=99%, E-value=1e-130, Identity=58%"; Hit description =Protein kinase AFC1, putative, expressed
  Pfam annotation: Domain name=Pkinase; Domain location=111-372; Score =69.3; E_value=1.3e-17; Accession=PF00069.15; Description=Protein kinase domain
  Pfam annotation: Domain name=Pkinase_Tyr; Domain location=111-372; Score=-103.8; E_value=4.2e-06; Accession=PF07714.7; Description =Protein tyrosine kinase
  Pfam module annotation: Pfam domain module=Pkinase::Pkinase_Tyr; Domain location=111-372::111-372
MECIAEMPRAPLDSRLRKRQRLGWDVGPAEMYKAVRPRHGWDVGPAEMYQLELCGQEVVNAISAAALGLSSGCVSSQVKQEQPHDGSPPLREDDRDGHYVFAVGDNLTSRYKINAKMGEGTFGQVLECWDKERKEMVAIKIIRGIKKYRDAAMIEIGMLEQLGKYDESRSSCVQIRNWFDYRNHICIVFERLGPSLYDFLRENSYRSFPIALVREIAKQLLEFMHELCLIHTDLKPENILLVSPEYIKVPDYKVSSRSPKEGSYYKRVPKSSAIKDLDGVTHVISGVLVVFLLSFARRHSDKYIRKGRLNWPEGCTSRESMKAVMKLSRLQNLVMQNVDQAAGDFIDLLQGLLKYDPSSRLTAREALRHPFFTQGFWRR

SEQ ID NO: 53146 - protein, 76 aa, Zea mays
  Coding DNA Sequence Number=SeqID_11367
MAVYGYKSPDCLVVHRTVRLTSVLLCEHQIPIQPKINGWSSILQVQLIELRTKVRRTSKNRVHERRSRRPRYMKPE

SEQ ID NO: 53147 - protein, 105 aa, Zea mays
  Coding DNA Sequence Number=SeqID_11368
MGKPPWKGPQLAGAGARPASLAGGAGNWAREDAAGGRNTACLREKRAGRNTERHGKAVGGRGRRRGGAEKELSDLGELGEQRARRGRGALTASLEQGARDAGEAR

SEQ ID NO: 53148 - protein, 107 aa, Zea mays
  Coding DNA Sequence Number=SeqID_11369
MERTSAGWGWGSAGELGRRRLNWAREDAAGGRNTTCLREKQAGRNTGRHGKAAGGRGRRRGGAQKALSDLGELGEQRAGHAEPSQGHSRGASTTSLEQGARDAGEAR

SEQ ID NO: 53149 - protein, 259 aa, Zea mays
  Coding DNA Sequence Number=SeqID_11370
  Subcellular localization annotation: CTP_CleavageSite=92; ConfidenceScore=5.48e-01
MVLPRNPLHPFLIARPPHHSRSQLPPPPRQSRNLCLPYRALPSMARSPPPHPPPPFHPSPPLPFPASPSSSVLHRSTCAPLPSLPNHAQDVPAPVEEEETIASAHYARSRSETAPTAREGDRRPTPPRVKKSTSEVRRSQVRAGMGAAGQEGEDAGGNSTRAKSSSGARKTPALRQAEVHHYQEEEYVPPPAPAPPLSRTSSVLDRLRSFDLYRFRSGDLGPDLPSAAAATETDKNEKQQSAHYGRSQRGSRASRRTQG

SEQ ID NO: 53150 - protein, 127 aa, Zea mays
  Coding DNA Sequence Number=SeqID_11371
MESWEEKLRRDPNSGVAAASTYSAREGAVERRRCKAINGGSGSYGEKKRHSLEGGWAWRGSLGSAARCGLRRVFGRGDSSLAASASRLRGALTRVAGCGGCNWQASDVSVFFHEKNEQDRTRRTKEK

SEQ ID NO: 53151 - protein, 264 aa, Zea mays
  Coding DNA Sequence Number=SeqID_11372
  Gene Ontology: Mol. function=protein dimerization activity
  Homolog annotation: Hit_ID=Q2QNH1; Match level="QueryCoverage=87%, HitCoverage=79%, E-value=2e-26, Identity=52%"; Hit description=HAT family dimerisation domain containing protein, expressed
MAPRKHSSGSKKRERRKEVEEFIESQRGAMGKFVRTNTRTSSNEDQPNLAIVIVAEQPNTNEEDHDPTLEENVDINTNANDVTDHDPIFDSSHIENDSFDEQSVPTEDIYDPRNWGNLDNKSRNTLVEKGSIREENIVFPLDANVAIMCLDATLKNIEGAMKFFEYYRNEGFASSLIIAREIASELGVEPSFPVKRHAKRKTQYDETEFEEAKLEAEKAFEVNYFLVMVDVAISSLKRRFEAPIIQKYIWVFDELNNPEGTGYY

SEQ ID NO: 53152 - protein, 458 aa, Zea mays
  Coding DNA Sequence Number=SeqID_11373
  Gene Ontology: Mol. function=ATP-dependent helicase activity; Cellular component=proteasome core complex (sensu Eukaryota); Biological process=ubiquitin-dependent protein catabolic process
  Homolog annotation: Hit_ID=Q6ATJ8; Match level="QueryCoverage=90%, HitCoverage=65%, E-value=1e-156, Identity=67%"; Hit description =Putative DEAD/DEAH box helicase
  Pfam annotation: Domain name=DEAD; Domain location=65-233; Score =92.6; E_value=1.2e-24; Accession=PF00270.19; Description=DEADDEAH box helicase
  Pfam annotation: Domain name=Helicase_C; Domain location=276-402; Score=43.9; E_value=5.4e-10; Accession=PF00271.21; Description =Helicase conserved C-terminal domain
  Pfam annotation: Domain name=ResIII; Domain location=61-171; Score= -37.0; E_value=0.058; Accession=PF04851.6; Description=Type III restriction enzyme, res subunit
  Pfam module annotation: Pfam domain module=DEAD::Helicase_C::ResIII; Domain location=65-233::276-402::61-171
MDTAEEAGQEVVSAVGEDSIPEAAACSREERKEEEEEEVEVSFDELGLDEQLKRALRKKGILKATPIQREAIPLILEGKDVVAKAKTGSGKTFAYLLPLLHELLKLSSEGRIRKPAPNAFILVPTRDLCHQVYNEALSLLELCTCKLRVVQVTASMSDKDITVALSGPPNILVSTPACVATCISKGIIRGPAVKESLSMMILDEFNNCLNASDISDVDKLTKLLLHNPFVLTLSEISCDAKDKILHILALLKFELIQKKVLIFVNSIDMAFRLRLILEKFGIRSAVLNAELPQNSRLHIIEAFNARLFDYLIATDDTKTKEKQTNEENKKEATLSRKRKKQTNKENQKEQKVSRKHLQQTLDAEFGVVRGIDFKNVFTVVNFDMPLDATGYVHRIGRTGRANKTGASISLVSPKEDSTFKEIEHMLQDVEKKDMDCISPFPLLTKDAVESLRYRAQFL

SEQ ID NO: 53153 - protein, 292 aa, Zea mays
  Coding DNA Sequence Number=SeqID_11374
  Gene Ontology: Mol. function=heat shock protein binding; Cellular component=integral to membrane; Biological process=protein folding
  Homolog annotation: Hit_ID=Q6ATJ1; Match level="QueryCoverage=81%, HitCoverage=98%, E-value=2e-93, Identity=70%"; Hit description =Putative DnaJ protein
  Pfam annotation: Domain name=DnaJ; Domain location=180-247; Score =54.5; E_value=3.6e-13; Accession=PF00226.21; Description=DnaJ domain
MAPHPQEDKSDRHSSGAGASREQERRPSKAWGILIFGLIGVTTASFAFQITQVRKSMDWFYTQLNKVQSTSSWTWRYTSNNSSRGSFSEEAKKRYYQRMQQEYEEEQERVQRIRHMQSVFNRERNKFGRGYESWRENGPPRGYNYIPRDDWYWQTDTSHSEHKNRRTYTPAGPRVYPMSHHYAVLGLDRSRATPYTDAEVKTAFRTKAMEVHPDQNQNDRDAAEEKFKEVVKSYEAIKSERKNGESSSDVRIPWRKEAGIYRLDPVEEEWRHLAIAHAMIPNPKSQMCATEA

SEQ ID NO: 53154 - protein, 36 aa, Zea mays
  Coding DNA Sequence Number=SeqID_11375
MAIGVIEALYAKAASPILLTGNRWQMRLLDPCCYIE

SEQ ID NO: 53155 - protein, 307 aa, Zea mays
  Coding DNA Sequence Number=SeqID_11376
MQDAARRAFSLYCSLFSGVADGLDLKYNPHHSTGSTGGVIVSPVGTKVEGVPSKRSKHHRMRHPSSSCHTPPPNDNRAVVSNADSSSSSDWSDPGSHATRATVVASTSASTSPWTPKTGCARWSGSYIPLSATIETRFDDSEEGRISGIEARSPVDHSSSRITLRDTSTSINVRINSSFRGSSLSSSSTARATNQEEVSTRDRTTRHLAFLPQQPIRQPQRKEEAEDVSTLGNKATGHHIAQIKKLSISQLPMPQQDRMQLRKEQTTVDSPVPSIKSVFMDYLNKIIVVFIDDILVYSHKEEEHEEH

SEQ ID NO: 53156 - protein, 79 aa, Zea mays
  Coding DNA Sequence Number=SeqID_11377
  Gene Ontology: Mol. function=zinc ion binding
  Homolog annotation: Hit_ID=Q6EPS5; Match level="QueryCoverage=87%, HitCoverage=23%, E-value=4e-09, Identity=35%"; Hit description =Ubiquitin conjugating enzyme 7 interacting protein 4-like
MLVDDDRDFAESECPSCACVVAHRRYLHRVQKQKGGRGVEDMMLLEMAKGKNWKRCPKFEFFMEKRDGCMHITCKVNFS

SEQ ID NO: 53157 - protein, 83 aa, Zea mays
  Coding DNA Sequence Number=SeqID_11378
MELGKLCAETNRELGVRGEHQRVAGARFGEGAWLGERARELRTQTQGAGRELQQGSSAMGAPRAARLAEAPWGRSQRAVEKPG

SEQ ID NO: 53158 - protein, 75 aa, Zea mays
  Coding DNA Sequence Number=SeqID_11379
MMWGMVAQRRGVIRLEVEKWNTKERIAWIVIPGCQVSWLPGSPDHDYITHSRALGLTMRLYPSAGGLRTKETTLF

SEQ ID NO: 53159 - protein, 242 aa, Zea mays
  Coding DNA Sequence Number=SeqID_11380
  Homolog annotation: Hit_ID=Q6ETB0; Match level="QueryCoverage=25%, HitCoverage=24%, E-value=2e-18, Identity=73%"; Hit description =Putative AP2 domain-containing transcription factor TINY
  Pfam annotation: Domain name=AP2; Domain location=33-97; Score=140.0; E_value=6.4e-39; Accession=PF00847.10; Description=AP2 domain
  Subcellular localization annotation: CTP_CleavageSite=42; ConfidenceScore=5.54e-01
MPDSDVPSPASSPLGSVQKIARGRKSRRGGGRSPAYRGVRMRAWGKWVSEIREPRKKSRIWLGTFPTAEMAARAHDAAALVVKGRGAVLNFPEMAASLPRPASAAPRDVQAAAARAAAMDVPVGAAEPLPSSSPQQVLGQPLVVGDPDVELLEEIVELPLIDEDVMASDDVFCWTASFHDCAADDPLSYEPNAWMQAGGSIAAQVAEMMVPGTGLATDQLWTAQPDGIMPSELGAFLWNPCS

SEQ ID NO: 53160 - protein, 51 aa, Zea mays
  Coding DNA Sequence Number=SeqID_11381
MAFNLKKARWRPERGEVTGVSAIVAFTRAVSQVMDRLLQPIYCDVGKILMN

SEQ ID NO: 53161 - protein, 151 aa, Zea mays
  Coding DNA Sequence Number=SeqID_11382
MGAGTHREGAEKEHHGKRRGAQAGAQEEAGGEGNLCAREMETERERQRETRALRSSSGEAQQPWSLGREGACHGRSVTTTDAAVAARASTTEEMDDQAPWIEEQRRHRQRAEGGRSLLIFVFTYARDLNSSKFASDEDSIIPKVHETFLTA

SEQ ID NO: 53162 - protein, 58 aa, Zea mays
  Coding DNA Sequence Number=SeqID_11383
MAHDEENRDVDPSERRLGAGTGEIARGWELNTEVVGRSSTDQGDGAMELAGELAEATR

SEQ ID NO: 53163 - protein, 109 aa, Zea mays
  Coding DNA Sequence Number=SeqID_11384
METERERQRGTRALRSSAGEAQQPWSLGRERARHGGSITGADAAATARASTTEQMDGWAPWIEEQRRHRLRAEGEGEAEGLRSGQANAARRKRRERGARGYQSWRKLRA

SEQ ID NO: 53164 - protein, 246 aa, Zea mays
  Coding DNA Sequence Number=SeqID_11385
MAHDKRNWDADPSERRLGAGTGEIARHNKWGGGDTLVNWRLEETAPREVDADGERKLWLWQGAKDRAAGCGRAGEHRVRRSTTREDEGRWPSRELGTGNRGAAARGAHRGHQVEGRVKHGIEIKDCTVEVLAGSLVGVGHGELVQGSEQRRPMWSTGTTAPPPMAWETEKGRRGRSQGREESGFLIMALRRRHLKLGKGAWADEVDAAWQSNSRERAMEDAAARGRVSGRRAEEKRRNEDDARNIP

SEQ ID NO: 53165 - protein, 120 aa, Zea mays
  Coding DNA Sequence Number=SeqID_11386
  Gene Ontology: Mol. function=alpha-1,4-glucan-protein synthase (UDP -forming) activity; Cellular component=cellulose and pectin -containing cell wall; Biological process=cellulose biosynthetic process
  Homolog annotation: Hit_ID=Q9ZR34; Match level="QueryCoverage=68%, HitCoverage=23%, E-value=2e-34, Identity=84%"; Hit description =Amylogenin
SDAEAGKALESLKEWEGVKVMDDVLPFFQSLKLSRTAVTVDDCVKELAGVVREKLGPKNAIFTKAADAMVEWNNLWKVHAQQNLWAGAVKIYESICCIPDMFRKTIHHTQKKYLAKFTNT

SEQ ID NO: 53166 - protein, 86 aa, Zea mays
  Coding DNA Sequence Number=SeqID_11387
MEHQCSDHEELTHANCAPYKAGWSVTWEIVLSGLILQTVRSGNIQKHTVPAQTNLAPTDVEDTTHIIDQSFDGDLPTVMVIEACKK

SEQ ID NO: 53167 - protein, 564 aa, Zea mays
  Coding DNA Sequence Number=SeqID_11388
  Gene Ontology: Mol. function=shikimate 5-dehydrogenase activity; Cellular component=chloroplast; Biological process=aromatic amino acid family biosynthetic process, shikimate pathway
  Homolog annotation: Hit_ID=O48674; Match level="QueryCoverage=92%, HitCoverage=92%, E-value=0.0, Identity=82%"; Hit description =Glutamyl-tRNA reductase, chloroplast precursor
  Pfam annotation: Domain name=GlutR_N; Domain location=118-269; Score =296.9; E_value=3.8e-86; Accession=PF05201.5; Description=Glutamyl -tRNAGlu reductase, N-terminal domain
  Pfam annotation: Domain name=GlutR_dimer; Domain location=438-545; Score=181.7; E_value=1.8e-51; Accession=PF00745.11; Description =Glutamyl-tRNAGlu reductase, dimerisation domain
  Pfam annotation: Domain name=NAD_binding_2; Domain location=296-413; Score=-84.3; E_value=0.069; Accession=PF03446.5; Description=NAD binding domain of 6-phosphogluconate dehydrogenase
  Pfam annotation: Domain name=Shikimate_DH; Domain location=273-425; Score=197.4; E_value=3.4e-56; Accession=PF01488.10; Description =Shikimate  quinate 5-dehydrogenase
  Pfam annotation: Domain name=TrkA_N; Domain location=299-406; Score= -10.0; E_value=0.087; Accession=PF02254.8; Description=TrkA-N domain
  Pfam module annotation: Pfam domain module=GlutR_N::GlutR_dimer::NAD _binding_2::Shikimate_DH::TrkA_N; Domain location=118-269::438 -545::296-413::273-425::299-406
  Subcellular localization annotation: CTP_CleavageSite=49; ConfidenceScore=5.66e-01
MASTAPAASTAVAFGAAATPRGPASASAALCARVPAAAGGMRRSGVAVRCDAGADAQVRAVAKAASVAALEQFKISADRQKISVVWGRKEKGVVVFDNVLTLYPRPGYMKERSSIAVIGLSVHTAPVEMREKLAVAEELWPRAIQELTSLNHIEEAAVLSTCNRMEIYVVALSWNRGIREVVDWMSKKSGIPASELREHLFMLRDSDATRHLFEVSAGLDSLVLGEGQILAQVKQVVRSGQNSGGLGKNIDRMFKDAITAGKRVRSETNISSGAVSVSSAAVELALMKLRKSEALSARMLLIGAGKMGKLVIKHLIAKGCKKVVVVNRSAQRVDAIREEIKAIEIVYRPLSEMYEAAAEADVVFTSTASETPLFTKEHADALPTVSDAMGGVRLFVDISVPRNVSACVSEIGSARVYNVDDLKEVVEANKEDRLRKAMEAQTIITEELKRFEAWRDSLETVPTIKKLRSYADRIRASELEKCLQKIGDDVLTKKMRRAIEELSTGIVNKLLHGPLQHLRCDGSNSRTLDETLENMHALNRMFSLDTEKAIIEQKIKAKVEKTQN

SEQ ID NO: 53168 - protein, 185 aa, Zea mays
  Coding DNA Sequence Number=SeqID_11389
MERTIKDLEKDQVFETPSHDQYSFDCVLSCVLDCAYRDKISGKIESLTWSATPTNLMFSGVDMWPLATRAVIIPAALWRHGENAVEVSLARASEDIRFPSTSYVIVFAYQKEKNMVTRRIESEVYKGLCDGIKVAGRKRLRNEGPNQSSLNGNKVEAPKGYDRLGDPVYVVTDHPVPDDENYQNT

SEQ ID NO: 53169 - protein, 84 aa, Zea mays
  Coding DNA Sequence Number=SeqID_11390
  Subcellular localization annotation: CTP_CleavageSite=40; ConfidenceScore=5.41e-01
MVVLPVAPRPPQAPATSLSLSLSLPGLHQQPEPSPPPTPQAQASSPLSAEFLLMMQDMIRIEVWNYMFGSSFDARAVMGMAEID

SEQ ID NO: 53170 - protein, 185 aa, Zea mays
  Coding DNA Sequence Number=SeqID_11391
  Gene Ontology: Mol. function=RNA-directed DNA polymerase activity; Cellular component=mitochondrion; Biological process=RNA-dependent DNA replication
  Homolog annotation: Hit_ID=UPI00004C1733; Match level="QueryCoverage =99%, HitCoverage=25%, E-value=3e-57, Identity=92%"; Hit description =UPI00004C1733 related cluster
  Pfam annotation: Domain name=rve; Domain location=51-184; Score=39.9; E_value=8.7e-09; Accession=PF00665.16; Description=Integrase core domain
MYFDGSLMKTGAGAGLLFISPLGEHVRYVLRLHFPASNNVAKYEALVNGLRIAVELGVRRLDACGDSQLVIDQKAPRGFTHLLVAIDKFSKWIEVRPLTSIRSEQVVAFFTNIIHRFGVPNSIITNNGTQFTRKKFLDFCEDHHIRVDWAAVAHPMTNGQVERANGMILQGLKPRIYNDLNKFGK

SEQ ID NO: 53171 - protein, 112 aa, Zea mays
  Coding DNA Sequence Number=SeqID_11392
MLCLLDCGTSAVTRGTEKGDILKGILPREGNGPPSPPTDQGFEGKQCRPPRSGCYANHPGETDNGQVKPRAQQEAPPRPTPGLGFGLGRRSPPRPTPGLGLDLGLGKSHILA

SEQ ID NO: 53172 - protein, 122 aa, Zea mays
  Coding DNA Sequence Number=SeqID_11393
MTTRSKVSRRGGRGESRCCGLPYNREVDQCATTDCATMAQRPTMRGGSFGIRCSVCAFGPTRQCARLASHAHGETAGGTHGSVSHARTAGVDRWVAQRDKWAKFTYYNGPTSILPHQPASKR

SEQ ID NO: 53173 - protein, 52 aa, Zea mays
  Coding DNA Sequence Number=SeqID_11394
MKSVVPMLRPTNDTHYLTRKVSLVKRATHFRPSGHPQHRIDFCDPKDLFGTK

SEQ ID NO: 53174 - protein, 151 aa, Zea mays
  Coding DNA Sequence Number=SeqID_11395
MALVDDVVGGDNKDLGDDSTSETKLAKRDTRKAFLEKASSVSAPSSVLCALYEGLQSALESYRHNKTRTEEENTYLQLVLSWVSNRELQLGMVVSQFKRGTDGPRISFASRSWSNVHLSKVGDWSGLKPLEKHSATPKLIKITPPKPITPL

SEQ ID NO: 53175 - protein, 48 aa, Zea mays
  Coding DNA Sequence Number=SeqID_11396
MMLDADEDGEPVDQKEYMSMISSLLTACGALSFSQADPKTKPPVIVKI

SEQ ID NO: 53176 - protein, 201 aa, Zea mays
  Coding DNA Sequence Number=SeqID_11397
  Pfam annotation: Domain name=zf-CCHC; Domain location=141-158; Score =7.8; E_value=0.051; Accession=PF00098.13; Description=Zinc knuckle
MTGTQGGLGSTVKELRLQGAEAGELGPGKTEGLGAKQRVSHVASEEAELIEATNAAEARRRPQNGWRITMELHRRVCGAKRVVMGASMEESVGLEVRERVVADRREERVESLGDKELVLVASRFMWFHNNRQNRRHGKLKDGCFNCCDPNHFVANFLNKGKSEAGSRDHHSSRRKDKREHSSGKHKSMGRFDKEALKKKYL

SEQ ID NO: 53177 - protein, 67 aa, Zea mays
  Coding DNA Sequence Number=SeqID_11398
MESGGGTTVGAVGSLLMSSCFRDTAVGVAQAALSFCQAGQWSGEVTAVTSALPEGARQDKGVRLPLH

SEQ ID NO: 53178 - protein, 849 aa, Zea mays
  Coding DNA Sequence Number=SeqID_11399
  Homolog annotation: Hit_ID=Q6Z5I5; Match level="QueryCoverage=35%, HitCoverage=83%, E-value=2e-50, Identity=41%"; Hit description =Putative RING-H2 zinc finger protein ATL6
  Pfam annotation: Domain name=PHD; Domain location=595-640; Score=5.3; E_value=0.017; Accession=PF00628.19; Description=PHD-finger
  Pfam annotation: Domain name=PPR; Domain location=156-190; Score =33.3; E_value=8.7e-07; Accession=PF01535.11; Description=PPR repeat
  Pfam annotation: Domain name=PPR; Domain location=191-225; Score =17.3; E_value=0.054; Accession=PF01535.11; Description=PPR repeat
  Pfam annotation: Domain name=PPR; Domain location=343-376; Score=1.5; E_value=5; Accession=PF01535.11; Description=PPR repeat
  Pfam annotation: Domain name=zf-C3HC4; Domain location=596-637; Score= 33.0; E_value=1e-06; Accession=PF00097.15; Description=Zinc finger, C3HC4 type (RING finger)
  Pfam module annotation: Pfam domain module=PHD::PPR::PPR::PPR::zf -C3HC4; Domain location=595-640::156-190::191-225::343-376::596-637
MAAVLTRAGGRSKRSVSGFHLRSVLAGHGTFSSEAASTAVGDRVVAATGEHDGDDLRSRIFRLGLAKRSATAALEKWSSEGRDAPTAELRRIARDLTRVRRYKHALEVADWMKTHHESDLSENDYGMRIDLITKVFGASAAEDFFEKLPPGAKSLEAYTALLHSYGRSKMTDRAERLFERMKDASLPMDALVYNEMMTLYISVGELGKVEAVAEELKRQNVSPDLFTYNLRASAAAASMDLEGFRAVLDEMSRDPKSSTEGGWALYRDLASVYVDAGQLLGSVNSPPVEAGEARISQREWITYDFLVILHAGLGRPERIRDIWRSMVATSQSQSQQQQRMTSRNYVCVVSSYLACGRLEDAGEVVDQWQRSKAPEFDVSACNRLLDALLRAGLADAAGCSYCKDDRYSGYELAETMLLHTVCPMLHILATKMDSLHSRQTGGRSGAVSPNLCLCVRASRGAMETRQLLLVFCLLGAGMAVVVDAQAQSAPAPPPRQTPSAPPQQTQFGRTMSTFITVAISVFFFLLFVCAYINQCRLADPGAAAAAAAAAAAAGGGGGGPSRRGKRGLDPAVVATFPIVSYREVVEHKIGKGVLECAVCLTAFEDDDDLRLLPHCSHAFHPECIDPWLQSRVTCPLCRANLEKPAPAPAVAPPSPSPRLAPRQPSPPPEAVAIPVSDDGSEGGSSSCEDDRKEEAVELETLRSARRAARMPRSHSTGHSLFAAAAAAAAAEEGDHERFTLRLPEHVREQVLRSRRLRHATSLLNLSDMSSEGSSRGGRGVAGAGSFGNGGGSSHGGRRWQSFLARTVSWARGGGDGSVRRGWDGSTRRGRDGGESSWKGVASPPPTGRP

SEQ ID NO: 53179 - protein, 115 aa, Zea mays
  Coding DNA Sequence Number=SeqID_11400
MALLKCYFMCIIVSFYSTAIVSLSFYSTAIFVLYIGLCAQNITIFIIRFPRICRFPTTVARASDSDHAKLSVSVATGRRGTNSICTVAWIGAGAAPIRRSNPRMVLPRIGVTCTC

SEQ ID NO: 53180 - protein, 148 aa, Zea mays
  Coding DNA Sequence Number=SeqID_11401
MGKTRALLLALHQVINFLKFVRLSIWWNFLINVLAWGFSCLGTRYSDERNLRCESQKFFFYANDEDVAEDGDQDAELLILRFEKDRLSHADRAPDSLHCYSSWTPACACSVWHHVAHCLRRRARAVLLTGELPPLSLFVLPFLIDLAL

SEQ ID NO: 53181 - protein, 240 aa, Zea mays
  Coding DNA Sequence Number=SeqID_11402
  Gene Ontology: Mol. function=zinc ion binding
  Homolog annotation: Hit_ID=Q10QQ7; Match level="QueryCoverage=19%, HitCoverage=23%, E-value=8e-14, Identity=68%"; Hit description =Expressed protein
MAPSPVAGAHGEGASAGAVCCMCGDRGLPGELFRCRCCRSRLQHRYCSDLYPRAAAYRRCNWCLREPGPGVGQAGLGHAHAAAVFAANNKPEDDKQRKTTAAASDEERRLRHDHDGCSPSPKRLSPPRPPAELGHPVKKKHRAEEKTPQPPPAVAANNRPEDDKRKTTAAASDEERPRQRHEGCSPTLRKSSPPPAELVHPVKKKHRAEEKTPPAVAGKVRVNRVCRVRRYKLLAEVISC

SEQ ID NO: 53182 - protein, 442 aa, Zea mays
  Coding DNA Sequence Number=SeqID_11403
MAAVVSWYGPLIDLSAAASHVGGFVQLLAVVRRLLPHQEQNAATGRTYQRTIAEVGDDTRSSFSVSLWSSKHNSTIIAGDVLLLQNIKIVQFRNGLEGRASQMSSVQVLLNSKDLLDTEPEGICELISSCKVGNATKSKLRKVAEWIIHTKCALGESHHQVVSKNWKLAKENESAHFLSISELISQRKLCNINIYACIGKMVLVSSPTSPLKVNLSVIDRRSFKEHSDIVRDLVTAGCKLNLHEENTFALDCPNNPKYLHVPGQIYRPFLIYIYDQSGQVPLLVRNRAAETLFANITADDVSECHNSHMLSETYESCNLSTPGTVDDCGNKEIAKRRKTEQKPNFYLIWLTLIKCLLSQGSNSPFCFQISVNPEKNVEDGRFELVPNETPGNTAIDLAEQGALFYDWPVPLACVLSLSQSCHIKTGYFSFFSSGDLDFVFLV

SEQ ID NO: 53183 - protein, 254 aa, Zea mays
  Coding DNA Sequence Number=SeqID_11404
  Homolog annotation: Hit_ID=Q338Z9; Match level="QueryCoverage=31%, HitCoverage=39%, E-value=8e-09, Identity=37%"; Hit description =Expressed protein
  Subcellular localization annotation: CTP_CleavageSite=33; ConfidenceScore=5.59e-01
MAALGPASVTSTGLALHTPAIPHRRRRHGNAVACASSSQHQRSLNGLAMSSSGTNNALPIKGITTTRVPAVGRSVPAANPSPSGGNNLPVPKIPPWVKWVAGAVIFAVPMYRRFRALEGKQISIDRWIAYSSVRETISYYSTAHSACRHVFDRGARMTDKIEKTAEVAIEVIDKVAEATEKVAGEVADEFPGNESIKEAASRIKKVMHVVEEDADKAEALIEKVDEIKKDVDSIVDPIIGKVAKDKSRRMNQKG

SEQ ID NO: 53184 - protein, 61 aa, Zea mays
  Coding DNA Sequence Number=SeqID_11405
MAGHSVFFLQHTTEAGCRLLPWRDTRRTADGVPAIPMPARRKEGRTDLDLKRRRMNRTVEK

SEQ ID NO: 53185 - protein, 61 aa, Zea mays; identical to SEQ ID NO: 53184
  Coding DNA Sequence Number=SeqID_11406

SEQ ID NO: 53186 - protein, 455 aa, Zea mays
  Coding DNA Sequence Number=SeqID_11407
  Homolog annotation: Hit_ID=Q6Z5I2; Match level="QueryCoverage=17%, HitCoverage=24%, E-value=7e-25, Identity=66%"; Hit description=Zinc finger (C3HC4-type RING finger)-like protein
  Pfam annotation: Domain name=zf-C3HC4; Domain location=200-241; Score= 35.6; E_value=1.7e-07; Accession=PF00097.15; Description=Zinc finger, C3HC4 type (RING finger)
MRPRRRALFPLHSAGAGACGDPWADCQTPPPVPSTPDSGPGPSPSLPPYGDLPCPPVLSPSPSPSPAPAHNGRRNQGGTQGYGPPPGAGDHDRRHLVKYALIAAGVFAFVCLILLGVSVAVRRRQVRRRRQALLAPPIPFPEGAANVGGGGGHDHGWDGAGGVVHHVWNIRTVGLDEASISSIAATRYRAGAGLLGAADCSVCLGEFQDGELVRLLPKCAHAFHVPCIDTWLRAHVNCPVCRSDVLDPAVTADSGGGGESSSSPPPADPDASPNGGPDHVGAASDAAPDHEGEESDGLDASPAREDQQERPSSAQPPPPPELLCALPRNVRRAASMDAVAVSTAASVAELDRLPEVAAPEEEQIGGRRKRWTGPCPSRPKASGSGHRSNLSTDWLLAPSGVPRSFFSRHSRARSSVLPLLEVDDRIQELDVCNSRNEHRHEEIIGENCASPSALG

SEQ ID NO: 53187 - protein, 269 aa, Zea mays
  Coding DNA Sequence Number=SeqID_11408
  Gene Ontology: Mol. function=catalytic activity; Cellular component =cytosol; Biological process=cellular metabolic process
  Homolog annotation: Hit_ID=Q9SFX4; Match level="QueryCoverage=97%, HitCoverage=82%, E-value=5e-63, Identity=46%"; Hit description =Putative cinnamoyl-CoA reductase; 14056-15506
  Pfam annotation: Domain name=3Beta_HSD; Domain location=7-258; Score=- 52.5; E_value=3.8e-09; Accession=PF01073.9; Description=3-beta hydroxysteroid dehydrogenaseisomerase family
  Pfam annotation: Domain name=Epimerase; Domain location=6-244; Score =77.9; E_value=3.1e-20; Accession=PF01370.11; Description=NAD dependent epimerasedehydratase family
  Pfam annotation: Domain name=KR; Domain location=8-133; Score=-62.4; E_value=0.00098; Accession=PF08659.1; Description=KR domain
  Pfam annotation: Domain name=NAD_binding_4; Domain location=8-228; Score=-39.0; E_value=4.1e-06; Accession=PF07993.2; Description=Male sterility protein
  Pfam annotation: Domain name=NmrA; Domain location=6-268; Score= -73.0; E_value=0.0006; Accession=PF05368.3; Description=NmrA-like family
  Pfam annotation: Domain name=Polysacc_synt_2; Domain location=6-208; Score=-181.7; E_value=0.013; Accession=PF02719.6; Description =Polysaccharide biosynthesis protein
  Pfam annotation: Domain name=adh_short; Domain location=4-134; Score=- 26.3; E_value=0.0003; Accession=PF00106.15; Description=short chain dehydrogenase
  Pfam module annotation: Pfam domain module=3Beta_HSD::Epimerase::KR::N AD_binding_4::NmrA::Polysacc_synt_2::adh_short; Domain location=7 -258::6-244::8-133::8-228::6-268::6-208::4-134
MASPRVCVTGGGGYVASWLVKLLLSRGYAVHATVRDPSDPKNAHLRRMEGASESLLLFKADMLDRDALAAAVSGCEGVFHVASPVPADKAEVLSPAVKGTLNVLQACSANNVRKVIVVSSTAAVHFNPSWPQGIIQDESCWSDKFFCTKSEEWYIAAKTIAEETALEYGEKNGLLVVTVCPCVVLGPLLQPLINTTSEVFVYIIKGGPRAMKNITWNIVDVRDVADALLLVYEKVESSGRYICAPNRISTYDIANLFRKFYPNYNYVKW

SEQ ID NO: 53188 - protein, 476 aa, Zea mays
  Coding DNA Sequence Number=SeqID_11409
  Gene Ontology: Mol. function=unfolded protein binding; Cellular component=mitochondrion; Biological process=protein folding
  Homolog annotation: Hit_ID=P37900; Match level="QueryCoverage=84%, HitCoverage=81%, E-value=1e-124, Identity=75%"; Hit description=Heat shock 70 kDa protein, mitochondrial precursor
  Pfam annotation: Domain name=HSP70; Domain location=55-444; Score =531.4; E_value=9.7e-157; Accession=PF00012.10; Description=Hsp70 protein
  Pfam annotation: Domain name=MreB_Mbl; Domain location=53-291; Score=- 236.8; E_value=0.0051; Accession=PF06723.3; Description=MreBMbl protein
  Pfam module annotation: Pfam domain module=HSP70::MreB_Mbl; Domain location=55-444::53-291
  Subcellular localization annotation: CTP_CleavageSite=68; ConfidenceScore=5.23e-01
MAFGALVTSRLVRSGHTLASAVAQGPVAQRIAPPLLSRLGAVARLLSTKPAATDVIGIDLGTTNSCVSVMEGKTQKEMKMVPYKIVKAPNGDAWVEMGGQQYSPSQIGAFVLTKMKETAEAYLGKTVSKAVITVPAYFNDAQRQATKDAGRIAGLEVMRIINEPTAAALSYGMNNKEGLIAVFDLGGGTFDVSILEISNGVFEVKATNGDTFLGGEDFDGALLEYLVSEFKKSDNIDLSKDKLALQRLREAAEKAKVELSSTMQTEINLPFITADASGAKHFNITLTRSKFESLVSNLIERTRIPCVNCLKDAGISAKEIDEVLLVSARDKATGKEQEITIKSSGGLSEVEIEKMVKEAELHSQKDQERKSLIDLKNSADTTIYSIEKSVSEYKDKVPAEVTKEIESAVSDLRAAMAEDDLDKIKQKLEAANKAVSKIGEHMQQGGGSGSAGGSGSSSGGDQTPEAEYQDAKEAKM

SEQ ID NO: 53189 - protein, 48 aa, Zea mays
  Coding DNA Sequence Number=SeqID_11410
MAPSWGAIGAAAPVCLSWGYLMVLGLLGVVTVDLVINGQCRVGSPDLI

SEQ ID NO: 53190 - protein, 61 aa, Zea mays
  Coding DNA Sequence Number=SeqID_11411
MNPELLTGILRARGAARHRGQCPLCFQPRSDGARAIGRGYRRSRDQRAVQGGESRSNLIRL

SEQ ID NO: 53191 - protein, 116 aa, Zea mays
  Coding DNA Sequence Number=SeqID_11412
MTPERDGGGERGAQRSVRGRHPPGAEEPLQVPPLLDDGGWLPAPVGMALSRLGHRRRCGAHEQHLYPVPMAMAARSGSSIPAPTPRNAAARSRASDEGFSCDGKEPTVADFSNKNK

SEQ ID NO: 53192 - protein, 85 aa, Zea mays
  Coding DNA Sequence Number=SeqID_11413
  Subcellular localization annotation: CTP_CleavageSite=27; ConfidenceScore=5.25e-01
MAGNGSPGVSPVRPKTFLTAVLPLSARGFMVPSPPLNNEQSEVPECVVGDLPEQPPGEGKCPQTYHVLLYFYNSPSRITLLKPKD

SEQ ID NO: 53193 - protein, 132 aa, Zea mays
  Coding DNA Sequence Number=SeqID_11414
MTSDAWGGGYLRVRARWERRSGVGLTEARACERGWRCQMEPKGQGHTGDVGEGERRGRGGVGEELSNLGLVGGGRHALGPARGGARTRGVDPVIASMEGCRRKVPKVQHKLIKRSKLGFKRKEQKKPKRTLV

SEQ ID NO: 53194 - protein, 174 aa, Zea mays
  Coding DNA Sequence Number=SeqID_11415
  Homolog annotation: Hit_ID=Q10KX9; Match level="QueryCoverage=51%, HitCoverage=26%, E-value=2e-26, Identity=59%"; Hit description =Expressed protein
MGTDYYNALKVLSDPQKRAAYDQYGKKGLKAFADIQERCEAEWAEEPPSLFHMLRHKLQFASSIFIADATPKSLPPFQMKEILGDYDAIHSLHPHLDRDTTPEYNRKRIAQWIPPGQTSFIALNERTPCFFSTLSDRQQFRYKLAYSCNLSSMLEPIIKENYQLLTVCKNEPAH

SEQ ID NO: 53195 - protein, 330 aa, Zea mays
  Coding DNA Sequence Number=SeqID_11416
  Gene Ontology: Mol. function=RNA-directed DNA polymerase activity; Cellular component=mitochondrion; Biological process=RNA-dependent DNA replication
  Homolog annotation: Hit_ID=UPI00004C1731; Match level="QueryCoverage =77%, HitCoverage=21%, E-value=1e-126, Identity=75%"; Hit description= UPI00004C1731 related cluster
  Pfam annotation: Domain name=rve; Domain location=104-250; Score =70.5; E_value=5.4e-18; Accession=PF00665.16; Description=Integrase core domain
MSGPNGVITVGSTYRHAYECDMECVEYAEALAKSEALIADLECLSKEVPDAKRHAGNFEPAEAVKSVPLDPSNDASKQELLQEIHSGACGHHAAPRALIGNAFRQGFYWPTAVADATRIKAPGGFSHLLVAIDKFSKWIEVVAFFTNIIHRFGVPNSIITNNGTQFTGKKFLDFCEDHHIRVDWAVVAHPMTNGQVERANGMILQGLKPRIYNNLNKFGKRWMKELPSVVWSLRMTPSRATSFSPFFLVYGAEAVLPANLEYGSPRTRAYDDQSNQTSREDSLDQLKEARDVALLHSVRYQQSLRRYHARGVRPRDIQVGDLVLRLRQDA

SEQ ID NO: 53196 - protein, 96 aa, Zea mays
  Coding DNA Sequence Number=SeqID_11417
MATDLVIKRGSHRRNDREKGLTAGVTRMELATLPRHHPRAASSDDGHTIAGDPEALELRRRSRSAHAPPHPRGGKSATKFPGRVLDLVLGNIILDV

SEQ ID NO: 53197 - protein, 991 aa, Zea mays
  Coding DNA Sequence Number=SeqID_11418
  Gene Ontology: Mol. function=phosphoenolpyruvate carboxylase activity; Biological process=carbon utilization by fixation of carbon dioxide
  Homolog annotation: Hit_ID=P29195; Match level="QueryCoverage=99%, HitCoverage=100%, E-value=0.0, Identity=90%"; Hit description =Phosphoenolpyruvate carboxylase 1
  Pfam annotation: Domain name=PEPcase; Domain location=7-991; Score =2454.0; E_value=0; Accession=PF00311.8; Description=Phosphoenolpyruva te carboxylase
MPERHQSIDAQLRLLAPGKVSEDDKLVEYDALLVDRFLDILQDLHGPHLREFVRPDQYRLPPHPQIRMFRRSRARADQECYELSAEYENDRDEARLGELGSKLTSLPPGDSIVVASSFSHMLNLANLAEEVQIAHRRRIKLKRGDFADEASAPTESDIEETLKRLVSQLGKSREEVFDALKSQTVDLVFTAHPTQSVRRSLLQKHGRIRNCLRQLYAKDITADDKQELDEALQREIQAAFRTDEIRRTPPTPQDEMRAGLSYFHETIWKGVPKFLRRIDTALKNIGINERLPYNAPLIQFSSWMGGDRDGNPRVTPEVTRDVCLLARMMAANLYFSQIEDLMFEGSILDLLVGDALSAYALQKSMHANLRKITNRVSTLAEFWKQVPPNEPYRVILGDVRDKLYYTRERSRHLLTSGISEIPEEATFTNVEQFLEPLELCYRSLCACGDKPIADGSLLDFLRQVSTFGLALVKLDIRQESDRHTDVLDSITTHLGIGSYAEWSEEKRQDWLLSELRGKRPLFGSDLPQTEETADVLGTFHVLAELPADCFGAYIISMATAPSDVLAVELLQRECHVKQPLRVVPLFEKLADLEAAPAAVARLFSIDWYMNRINGKQEVMIGYSDSGKDAGRLSAAWQMYKAQEELIKVAKHYGVKLTMFHGRGGTVGRGGGPTHLAILSQPPDTIHGSLRVTVQGEVIEHSFGEEHLCFRTLQRYTAATLEHGMHPPISPKPEWRALMDEMAVVATKEYRSIVFQEPRFVEYFRSATPETEYGRMNIGSRPSKRKPSGGIESLRAIPWIFAWTQTRFHLPVWLGFGAAIKHIMQKDIRNIHILKEMYNEWPFFRVTLDLLEMVFAKGDPGIAAVYDKLLVADDLQSFGEQLRKNYEETKELLLQVAGHKDVLEGDPYLKQRLRLRESYITTLNVCQAYTLKRIRDPSFQVSPQPPLSKEFTDESQPAELVQLNEQSEYAPGLEDTLILTMKGIAAGMQNTG

SEQ ID NO: 53198 - protein, 39 aa, Zea mays
  Coding DNA Sequence Number=SeqID_11419
MTSSPFIIAALELAQRPRNRPFPAPSLLCSSPVERFKDN

SEQ ID NO: 53199 - protein, 69 aa, Zea mays
  Coding DNA Sequence Number=SeqID_11420
  Gene Ontology: Mol. function=protein binding
  Homolog annotation: Hit_ID=Q6K7R2; Match level="QueryCoverage=88%, HitCoverage=10%, E-value=2e-21, Identity=83%"; Hit description =Putative disease resistance protein Hcr2-5D
  Pfam annotation: Domain name=LRR_1; Domain location=32-53; Score =16.3; E_value=0.11; Accession=PF00560.23; Description=Leucine Rich Repeat
  Pfam annotation: Domain name=LRR_1; Domain location=9-30; Score=2.1; E_value=1.1e+02; Accession=PF00560.23; Description=Leucine Rich Repeat
  Pfam module annotation: Pfam domain module=LRR_1::LRR_1; Domain location=32-53::9-30
MRKQYRVKLLRILDLSQNHPTTVPEGIKNFTALIELDLSDNNITALPAELGLLEANLQVLKLDGNPLRR

SEQ ID NO: 53200 - protein, 275 aa, Zea mays
  Coding DNA Sequence Number=SeqID_11421
  Gene Ontology: Mol. function=cyanate hydratase activity; Biological process=cyanate metabolic process
  Homolog annotation: Hit_ID=Q9FWK4; Match level="QueryCoverage=72%, HitCoverage=97%, E-value=7e-65, Identity=68%"; Hit description =Cyanate hydratase
  Pfam annotation: Domain name=Cyanate_lyase; Domain location=149-261; Score=116.5; E_value=7.6e-32; Accession=PF02560.5; Description =Cyanate lyase C-terminal domain
  Subcellular localization annotation: CTP_CleavageSite=58; ConfidenceScore=5.12e-01
MTRHDPPGRCVTRRAAHISVILSSPVPVSHQPTFPSTLLTHPLTDSSTEQRGGHPSERASAEGSEFRRLGMEASGEKAAVVRRLMEAKEVSGKTFSGIAAETGLTNVYVAQLLRRQAQLKADTVPALRAALPTLTDDLIELMMQPPFRSYHPNIVHEPAIYSSQAAVAERLNEAVMHFGESIKEIINEEFGDGIHFVRTWNALNFVQLYLSLSPDEASVTTHLKSMSAIDFYCSVDKVEGADGKDRVVVTFDGKYLPYTEQKSEHMMSRPTRKTS

SEQ ID NO: 53201 - protein, 175 aa, Zea mays
  Coding DNA Sequence Number=SeqID_11422
MSWIYIATTRSGAARMEQRAGIKVNDVVPDTVLHTDSSTTPKRGEQGCAQHKHDNTQSTAHIVEQGKWWRTSWGGAPCAGGEVVVGHQVGEEPGSMEKLAAVGVLGAAKGKSRGEGPAWSAPMEKKASTLAVLGGEGSPWAAKGVAGGYCYREGGDSGECVRERKKEKREWRLGG

SEQ ID NO: 53202 - protein, 526 aa, Zea mays
  Coding DNA Sequence Number=SeqID_11423
  Gene Ontology: Mol. function=zinc ion binding; Cellular component =intracellular
  Homolog annotation: Hit_ID=Q7Y245; Match level="QueryCoverage=19%, HitCoverage=98%, E-value=4e-49, Identity=83%"; Hit description=Fiber protein Fb21
  Pfam annotation: Domain name=ARID; Domain location=334-456; Score= -6.5; E_value=0.00067; Accession=PF01388.11; Description=ARIDBRIGHT DNA binding domain
  Pfam annotation: Domain name=PHD; Domain location=447-501; Score=9.5; E_value=0.0064; Accession=PF00628.19; Description=PHD-finger
  Pfam module annotation: Pfam domain module=ARID::PHD; Domain location= 334-456::447-501
MDTSSYFILHQKKVLTFDSWEQTAESNQKIYLLFLLSDSASPPPLEAASLPRGMVTMRCDITTCSSSHVSLLVSGSAQTCFDDQLLESHIKNEIIEKSQLVRALSNSEDKLPSSEPLTSMSTACGASTFEVWMSLPKWAAQVLKHLAPDISYRSLVALGIGCINGTPVASFERRDADRLLFFCTSQCKDLANENGPYFHLPRWSASLTKDRTKLGSESKQNLLGANGVLEDKKHMMEGPSSFSAVKAKLKPATMRPIPHSQKQQMHPFMCLPETSFHETSIVKPSLTVAPTVKHNSVSYAPTTHRKSTSGPSHTPSVIQLNPLPMKKHGCDRLSIQVCSEEDFLKDVMQFLIQRGHNRLVPHGGLAEFPDAVLNAKRLDLYNLYKEVVSRGGFYVGNGINWKGQVFSKMRNHTATNRMTGVGNTLKRHYETYLLEYELAHDDVDGECCLLCHSSAPGDWVNCGLCGEWAHFGCDRRQGLGTFKDYAKTDGLEYICPHCSLANYKKPPLPPKVANGFSNTAYVPRSV

SEQ ID NO: 53203 - protein, 147 aa, Zea mays
  Coding DNA Sequence Number=SeqID_11424
  Gene Ontology: Mol. function=zinc ion binding; Cellular component =intracellular
MSQIQSFSRNNCVLLVVLCGKYAEKRAPAAKSGLEAKRPRPSYPFPELSSAGRLEVHTLFNPTPEQFLEAQRVVQPNFLYIQGQQLEDEKEIGSLVWGDADVSDPQAFSTLISPPFPTIVYLEVPIGEKLAQAVHSKALFGSLKNDN

SEQ ID NO: 53204 - protein, 73 aa, Zea mays
  Coding DNA Sequence Number=SeqID_11425
MALPRWFITVGWVPTGEDEDREFGRRWVAPSNNVLGQFAPSARDAADEPATVESEVQQVEVAEQELIEGKLCP

SEQ ID NO: 53205 - protein, 73 aa, Zea mays; identical to SEQ ID NO: 53204
  Coding DNA Sequence Number=SeqID_11426

SEQ ID NO: 53206 - protein, 131 aa, Zea mays
  Coding DNA Sequence Number=SeqID_11427
APERAAGAEDAGYGKQSASRNGALGGIEGKPPWKGGRASWGKPGARARSKAPRHGNRACGASSIAEQRGRAEASWSGSAPWPRAEDAAQNTDARAEEVGAEGIAEKEDGERLGGWGCPHAKKYPRENGGLG

SEQ ID NO: 53207 - protein, 630 aa, Zea mays
  Coding DNA Sequence Number=SeqID_11428
  Gene Ontology: Mol. function=enzyme inhibitor activity; Cellular component=cell wall; Biological process=cell wall modification
  Homolog annotation: Hit_ID=Q9MBB6; Match level="QueryCoverage=83%, HitCoverage=87%, E-value=1e-145, Identity=49%"; Hit description =Pectin methylesterase
  Pfam annotation: Domain name=PMEI; Domain location=102-250; Score =129.6; E_value=8.8e-36; Accession=PF04043.6; Description=Plant invertasepectin methylesterase inhibitor
  Pfam annotation: Domain name=Pectinesterase; Domain location=316-614; Score=654.6; E_value=7.8e-194; Accession=PF01095.10; Description =Pectinesterase
  Pfam module annotation: Pfam domain module=PMEI::Pectinesterase; Domain location=102-250::316-614
MSSSAFGDFGPLTERRRAEKARQQRRRIMIAVGTVSIIAILIVIGWYAVMYSGKKSSSDGDHNHKSSSSPAKGKSSGGSDSESEAETETETESGSDSKTDLKAVSKSIKAMCSQTDYTDACEKSLGKAANASSSSPKDIIRSAVEVIGDAIGQAFDRADLILSNDPLVKGAVADCKEVFADAKDDLNSTLMGVDDKDGIAKQGYQLRIWLSAVIANMETCIDGFPDEEFKTKVKESFTEGKELTSNALALIEKGSSLLSALKGVSKRRLLEEEQGAAAAASQAGPALDKDGIPEWVPDGERRVLKGGGFKNTLTPNVVVAKDGSGKFKTINEALSAMPKTYDGRYVIQVKEGVYEEYVTITKTMKNVTLLGDGSKKSIVTGKKSFADGITTFKTATFTAQGDGFMAIGMGFQNTAGAEKHQAVALLVQSDKSIFLNCKMDGFQDTLYAHSKAQFYRNCIISGTVDFIFGDAAAVFQNCILVLRRPMDNQQNIVTAQGRADAREATGFVLQKCEFQAEAALRDAKRPAIRNYLGRPWRECSRTVVMESELPDFIDKAGYLPWNGDFGLKTLWYAEFGNTGPGASTAGRVSWPGFKKVISKADATKFTVENFLHAQPWIDPTGTPVKYDLFT

SEQ ID NO: 53208 - protein, 118 aa, Zea mays
  Coding DNA Sequence Number=SeqID_11429
MGRRVQARWGAGDASGGEGHSLGCTGIEGGWYRRDVGRRCHAGVRGRAVTTASERECRSRGRASQGERAGQRLGREPPQKGRMSLPGRRRGSRWRTDLGADSCGVEGVGVEDLANGVG

SEQ ID NO: 53209 - protein, 49 aa, Zea mays
  Coding DNA Sequence Number=SeqID_11430
YVRGTSSGKERVLGWLGVRIMGSRGVVRIGAAFRLRICEIDKGMSIEEQ

SEQ ID NO: 53210 - protein, 419 aa, Zea mays
  Coding DNA Sequence Number=SeqID_11431
  Homolog annotation: Hit_ID=Q1S746; Match level="QueryCoverage=58%, HitCoverage=48%, E-value=5e-26, Identity=50%"; Hit description =Putative serine esterase (DUF676), putative
  Pfam annotation: Domain name=DUF676; Domain location=99-415; Score =103.4; E_value=6.6e-28; Accession=PF05057.5; Description=Protein of unknown function (DUF676)
  Subcellular localization annotation: CTP_CleavageSite=28; ConfidenceScore=5.55e-01
MGRAATPAPGAQSSRLPRAVSRLRLVLRSSEAAARSGSKRWIGCFRPSPSPATAAAGAAVVKEAKGKRPEVEVEPARGGGEDVWSADAETEVAQGGAFPEHLVIMVNGLVGSADDWKFAAEQFVRRMPDKVIVHQTWDIVCVTRRSDPPHGVTSVLTYLLGDSDIHRKQNLTERIGDEVTISLYDDLAKIKGSCHHPLLAQYFTERIAAATTAAGSQCNSATQTFDGVDLMGERLANEVLSVVEQRRGVKKISFVAHSLGGLVARYAIGRLYEPNSRRKSSGGESRDDVVHLNGHIAGLEPMNFITFASPHLGSSGNKQLTKQTDMVGWRTSSIRRQHELPKHRLLVRDEKYPHIVYVEKEVTDNNETKAHADHYDPEEEMIRGLTQVPWERVDVSFQKSTQRLVAHNTIQHLKILNFP

SEQ ID NO: 53211 - protein, 105 aa, Zea mays
  Coding DNA Sequence Number=SeqID_11432
MAIVPARAADQRWRRPPAGSASDGGALVWLLRQQAGGGRTEEGQWGRADDLGRSRATPLGLTADLVCGHAVEDDDCVLVGPASWGEEGELHVVRGGGLELHRRGL

SEQ ID NO: 53212 - protein, 95 aa, Zea mays
  Coding DNA Sequence Number=SeqID_11433
MAVGVSEALYAKAHWIAGVLVPGIAMRGFAGVSAAADICCTLGYREVDDVFVAVDAEWAVGIGATYRFVPWDLGRRDRIQRAQCKRVPLNNDRRS

SEQ ID NO: 53213 - protein, 144 aa, Zea mays
  Coding DNA Sequence Number=SeqID_11434
MALRGNWPVTPCEAFMVGTGATLDHLRKGRRGRDWPRRADGKRKRAPSPPSEDFDDSEYSEEASSEYDRLPALASPSASSEDLDDSMGLSTAARAYLRSIERAGLDGSDESEEVSSEEVDSSDSSEEWSGDDGDDEGDGSKGQQ

SEQ ID NO: 53214 - protein, 107 aa, Zea mays
  Coding DNA Sequence Number=SeqID_11435
  Subcellular localization annotation: CTP_CleavageSite=70; ConfidenceScore=5.18e-01
VPKVQHKPIKRQRKGSNKKSKRQPKVVLVWRTGLSGVPPDSVRCTREINSELATFGNSGSHSDIIHRTVRCAKRSNGYLRQRSSATATGTVNSGHFGGWYFMYSEHL

SEQ ID NO: 53215 - protein, 261 aa, Zea mays
  Coding DNA Sequence Number=SeqID_11436
  Subcellular localization annotation: CTP_CleavageSite=7; ConfidenceScore=5.14e-01
MRPQAPRAESSPTRSKALPCDSGAGSRMSYKPAQGRRSQTAAHGTGEGGYPERDPSPRRNRAPRPPLLIRGSKAGPPRVQQPPQIAWARHPLLVRGSKASPPKGSMAASGYSGSAPITDQGARTRAKTRKTANSAPPDPRARTRAKTRKTANSAPPDPRARTRAKTRKTANSAPPDPRARTRAKTRKTANSAPPDPRARTRAKTRKTANSAPPDPRARTQAKTRKTTKLRLARPQGSDSALASAGRLPPRPTPWLGLGHGN

SEQ ID NO: 53216 - protein, 76 aa, Zea mays
  Coding DNA Sequence Number=SeqID_11437
MQAEEPELRHQGQHLVLLIAQHVSLVLLLLAQQVALLRVLGRLGCRWQVAQQEALQVPLRGQPALQEAGRVYCRLR

SEQ ID NO: 53217 - protein, 369 aa, Zea mays
  Coding DNA Sequence Number=SeqID_11438
  Homolog annotation: Hit_ID=Q8H7T7; Match level="QueryCoverage=10%, HitCoverage=9%, E-value=2e-10, Identity=82%"; Hit description =Putative aminotransferase
MGTSVQDLCPIADRKRRLKKETTDHVGGERSERRTCRTCGRYDTGVHELSAELGGDSSEEVGKGGKGIRLEAQRKGLKKRSPDYKRYQSDWRAGTSRQVQVIETTMPNGGGGGSSKSMGGGYVDGGSGWQVNRVEGTRAVTTSEHDTSESRQGGKEADRGCEPGGVAGDAAGEGEVAGERNNHVGKEASSGVLRANSGEGVCAHGESGLKGDVASGSDMAAHAGGHGEEGPCLGKRRVGAGELRMGRWLGKRLWQIGDQRPRGVGPLAVARVKGRAATAAQVGEEAATLARREAVVLVRPAAPSVAPTTSLKPTGARALGMWLSFVVEGGVEYGNQGVGVVSQQLYKSLTSLQMGNVEDWMGWTMQLNQ

SEQ ID NO: 53218 - protein, 68 aa, Zea mays
  Coding DNA Sequence Number=SeqID_11439
MGFAWGRFGEVWRGLANTVVVLDRVEVAGGGPTMNAGGWNVIDVSDEGLADVVRPREGARELRCSNIL

SEQ ID NO: 53219 - protein, 189 aa, Zea mays
  Coding DNA Sequence Number=SeqID_11440
MALRELCDDGSFQLSYGSKATSARGFDQPEAKRESRLMGKGPDWLPAYRPTRLTVAFGATYAQVKKEKKTSRRISRSSRTSTSSRIRLATSPSQLHVVASGTCSFLWPQSLYNIAPENGVVRTNDVNNLKGPLSRYDPVELSSRRLELDNLVLGMLRASRVLVCTTLRPLPPSIRTQVSRLDRKIGSTT

SEQ ID NO: 53220 - protein, 139 aa, Zea mays
  Coding DNA Sequence Number=SeqID_11441
  Gene Ontology: Mol. function=RNA-directed DNA polymerase activity; Cellular component=chromatin; Biological process=RNA-dependent DNA replication
  Homolog annotation: Hit_ID=UPI00004C1733; Match level="QueryCoverage =93%, HitCoverage=12%, E-value=5e-65, Identity=74%"; Hit description =UPI00004C1733 related cluster
MPDIPRDVAEHSLDIRAGARPVKQHLRRFDEEKRKAIGEEIHKLMAAGFIKEVFHPEWLANPVLVKKKGGKWRMCVDYTGLNKACPKVPYPLPRIDQIVDSTAGCETMSFLDAYSGATYQRCMNHMFGEHICWRLVLKC

SEQ ID NO: 53221 - protein, 90 aa, Zea mays
  Coding DNA Sequence Number=SeqID_11442
  Homolog annotation: Hit_ID=Q10JU8; Match level="QueryCoverage=82%, HitCoverage=15%, E-value=4e-20, Identity=69%"; Hit description=Von Willebrand factor type A domain containing protein, expressed
VDSVYIPDISAKYPLCVSGRYNGKLPETLIAKGHLADMSEISIELKVQHIKDIPLDKITCTNKDEVFLYLKAELYCITLKWILDPKKLTA

SEQ ID NO: 53222 - protein, 378 aa, Zea mays
  Coding DNA Sequence Number=SeqID_11443
  Homolog annotation: Hit_ID=Q8S7Q9; Match level="QueryCoverage=40%, HitCoverage=28%, E-value=2e-18, Identity=40%"; Hit description =Putative F-box domain containing protein
  Pfam annotation: Domain name=DUF828; Domain location=65-269; Score =34.9; E_value=5.6e-11; Accession=PF05703.2; Description=Plant protein of unknown function (DUF828)
  Pfam annotation: Domain name=PH_2; Domain location=289-374; Score =53.7; E_value=5.9e-13; Accession=PF08458.1; Description=Plant pleckstrin homology-like region
  Pfam module annotation: Pfam domain module=DUF828::PH_2; Domain location=65-269::289-374
MELRSRSLFRGSQPRSVHSVSHLGLMELPAKAESAPVDAQKADNTRCKEKSRHSKRCHCHLEEMPVIPEQAMEFLSRTWSPSSTDLFQILSPSDPEQDEARGDGGDDDDKEKHLGTVRLNGGTNQLFNQTCVSQPMGSPCQSRGAGRRRRRDELRLHSAQAHAAVSVAQLAAAVAGIVSACDLRPAASAGAGGDRRLGTVLASAAALVATVCAEAAETTGANRGRVTSAVRTGLESRTSADLLTLTATAATCLRGAAALKQRTADLRGISTSSSDAMAMSVSAGIHKGTTLAVCLPCGRVRVRTVSVFPRRGDGGAAVLRLGKKRLRGAFATFNDLSVVTSEGSTVQLLFEHQTHCKVWKAAIEGMLAEQKLRRGTTN

SEQ ID NO: 53223 - protein, 119 aa, Zea mays
  Coding DNA Sequence Number=SeqID_11444
MVYEGPVPPSARKEDRRQALATSDCNATELNRLGATCQRLDMLPSVWFTVFRTNIWCPLFVLRTMTLTMAPKKVTTRATSSLDEATKTALADKKGKVVLAENTWPAIAETNVADCHTRF

SEQ ID NO: 53224 - protein, 167 aa, Zea mays
  Coding DNA Sequence Number=SeqID_11445
MGRGKRSKGWPRRTDGKRKRPPCPPSEDFDDSMGLSTAARAYWRSIERAGLDGSDDSEEASSEEVEDSSDFEEWSSGEGNDGEDDGSSGSDDDKGSSEGDGEGDDDGDGKGDDKGDGMGDNGDGANGKGDDDSKGDGDGKGDDNGMGDDSGNGDDGDGKASNIMLVA

SEQ ID NO: 53225 - protein, 56 aa, Zea mays
  Coding DNA Sequence Number=SeqID_11446
MDEMVPKQNADPGQRAILHWKVVVWENRIRAVDNVHNPISRLGPRLLIPYVGLKGK

SEQ ID NO: 53226 - protein, 195 aa, Zea mays
  Coding DNA Sequence Number=SeqID_11447
  Homolog annotation: Hit_ID=Q8LN60; Match level="QueryCoverage=45%, HitCoverage=10%, E-value=1e-12, Identity=58%"; Hit description =Putative phosphatidylinositol 4-phosphate 5-kinase
MDYSLLLGVHFRDDFSMSKIGVSQFIGLPKSTGKRKSFEGGGDVCELCFTESGCKDRDFIVDSRVTPCVCTYQETTGPVRQEHACPGRAETQSCTREDSKSSVAECSSENIKEQFVQRVTAPLAFYIMGSIGEVLGYDGFTDPERALEQWKGWSVYPTHSFLNNWRRGRRSTADTHANAERMRAKTVELCLFKDL

SEQ ID NO: 53227 - protein, 74 aa, Zea mays
  Coding DNA Sequence Number=SeqID_11448
MYGLQVVMRMMVMIMTMVMLVHYSQTGHFVEYVDVYSHLLYTPNPPSCPCCNHCSGEDEVVEEDFQEFQEYDEF

SEQ ID NO: 53228 - protein, 131 aa, Zea mays
  Coding DNA Sequence Number=SeqID_11449
MGRDKRAKGWPRRADGKHKRPLSPPSEYFDDLEYSEERAGLGGLDDSEEASLEEVEDSSDSEEWSGDSEGDGSEDDGSGGDEDGKGDSEGDGEGNGDDKGDGDDDGDGKGDSGDGNNDCGDGKASVIMLLA

SEQ ID NO: 53229 - protein, 158 aa, Zea mays
  Coding DNA Sequence Number=SeqID_11450
MGKSNKRKREPTPPSEDFGDSKYSEEEFSSESEGSPAPVSPLASFDDSDDSQGIVAEVWTYIRAVERTRLEGSDESEYSSDEEDSSDSSEEDSSDSSEEGGGGDGGDDDDDGGDGDDGDDSGGGGDGGSNGGSKGDNGGSSRGSNGSGSSKGSNKASG

SEQ ID NO: 53230 - protein, 200 aa, Zea mays
  Coding DNA Sequence Number=SeqID_11451
MGASGDGSPETRDPASCKGSGRGKRRRWDNLRSGRLPEAKQQRGRPWSEATLVEDLNSRKEFRATRSPAASNLASTTPGSAPQRHNAAESTANRGRACVDVSLPHSGVYPSVCGVTGVFTIGRKQVREGEMSSILGRGKMTARPAGVEWMPRRWLQPPARENLHSARGNFAQIRAQVRRGPPNSARFGTSAGKWGSSLLC

SEQ ID NO: 53231 - protein, 82 aa, Zea mays
  Coding DNA Sequence Number=SeqID_11452
MPIHSIGRQYAHAAACTALIITRAYRGSSGDISILYALRTLWRSEITLRYRRPGRRELRLGRCLQPGNFCTTLLAPRPRHGP

SEQ ID NO: 53232 - protein, 60 aa, Zea mays
  Coding DNA Sequence Number=SeqID_11453
MERSSATRSRLFFSRTDPLRLILIAWPGLRVSLRAHTPCALGPPVSAQVLWRWARSVTIK

SEQ ID NO: 53233 - protein, 228 aa, Zea mays
  Coding DNA Sequence Number=SeqID_11454
  Homolog annotation: Hit_ID=Q8SA97; Match level="QueryCoverage=37%, HitCoverage=11%, E-value=8e-07, Identity=40%"; Hit description =Ornithine carbamoyltransferase
  Subcellular localization annotation: CTP_CleavageSite=58; ConfidenceScore=5.59e-01
MWKLLRSRGRVCLPWPRSSPSPWVGRGGVRRLLGLSPSPSPRSGGAEFVVFWGRAQVRALGRAERSSSSSGAEPKSEPWVGRSRVRRLPGLSSSPSPGSGGAEFAVFRDLARVRALGRAEPSSPSSGAEPESKPWVGRSGVRRLSGLSPSPSPGSGEAKLPMVPLAGPDCLSVSLCQVAPQSEWCRRRCPSVRSLYVDGGYQLRIRNLEGTPNYGPRQTYSRYGIPII

SEQ ID NO: 53234 - protein, 234 aa, Zea mays
  Coding DNA Sequence Number=SeqID_11455
MGVGVSSRCCPVPAIGGPSPLNKYRIHNVTELVKSERPGNQQASILQSVEEEQIEKEKVLPSTGHWRSFPTRQLLSPRVTEPVKSEGVGNQQASVLQSVEEEQIEKEKGVMPRPMGVGVTLRRCPVPPIGGPSPLVNYRVPSVTEPVKSKRPGNQKASIPQNVEEEQNEKEKCMKPRPMGVGVLSRRCPVLAFGSPSSLANCRVPSVTEPVKSERPGNQQTSVLRSVEEEQVEK

SEQ ID NO: 53235 - protein, 188 aa, Zea mays
  Coding DNA Sequence Number=SeqID_11456
PGEAPVAPVGTAGAVERIYVVRVAVPKCDEIQNAISDGEAELAPVPVFVFLDFVDLMMLVDLVHRVRNDVGGRTSPAPTRFVSVPDYDEEYNDCDDDDYDGTEYGINHPVNMGKDIMERYAMNKVIRNVVYIYRKKGEPIKLVFTGKKKGITPVASFSALDKEGEDPTPSAAAEPKPSNDPAEDDIST

SEQ ID NO: 53236 - protein, 630 aa, Zea mays
  Coding DNA Sequence Number=SeqID_11457
  Gene Ontology: Mol. function=nucleic acid binding
  Homolog annotation: Hit_ID=Q10R95; Match level="QueryCoverage=99%, HitCoverage=100%, E-value=0.0, Identity=66%"; Hit description =Calmodulin-binding family protein, putative, expressed
KMGLSISYPPDDYLPEDDDDDDDDGIDRLFVRSLSFDNLNTHDTLESPTALLDALTSKRLMVRGSLRFERREGDPFQVETTLSMVSPKPAKKSYNYKPIVLPRYKSTENLPPDSPVIGMVSPVHQAAAIRVQKVYKSFRTRRQLGDCAVLVEQRWWKLLDFALLKRNSVSFFDVQKPESALSRWSRARMRAAKVGKGLSKDEMAQKLALQHWLEAIDPRHRYGHNLHYYYQYWLHCEGKEVNIDEHCPRWKLLQQCIRYLGPKERESYEVVVEDGKFMYKLSQKIVDTSEGPRDAKWIFVLSTTRALYIGTKSKGTFQHSSFLAGGATSAAGRLIVEDGILKAVWPHSGHYRPTEANFREFMNYLKNRNVDLTNVKLSLSEGEEDEWFRHRASSLSQLNNTESSHPTSAEDSKSHSHPAGAADKGNDTTPGTPPSTSHDKTTTSAATSGTPAMKRSSSGSKLQRKRPPRLAVSKSRLGKGSGEQGAGAFGDCLNFCKENLFRGGEGDGEGGCEGEEMVVVPQEKILHRINSKMSLHSYQLGNQLSFRWTTGAGPRIGCVRDYPPELQFRSMEQVSLSPRGGAEHPRFGGTPPRQSPCAPLVPSTPGGPVSPLYGHGGAGTPSPRLQHGAA

SEQ ID NO: 53237 - protein, 163 aa, Zea mays
  Coding DNA Sequence Number=SeqID_11458
MADDQGCTRTGKGTRHRARHGMHADMGRKESKNEELTPATNLGYDGEARRARTTSSDGWHDDGNDDTPGGSAKRLWQGAQHGRTKVSSAQAIPVTAYQRPARGRAPDHCAARPNVEELVGSIACRSTVQADEAARDGAEPPGWPRHTGDRMPRPTTSMAARQG

SEQ ID NO: 53238 - protein, 159 aa, Zea mays
  Coding DNA Sequence Number=SeqID_11459
  Gene Ontology: Mol. function=DNA binding; Biological process=DNA integration
  Homolog annotation: Hit_ID=O24587; Match level="QueryCoverage=95%, HitCoverage=17%, E-value=1e-62, Identity=65%"; Hit description=Pol
MWDRNARKVYAFGGSSWIIDSGCTNHMMGEKKMFTSYVKNKDSNDTIIFGDGNQGKLCHMRYNCLFTNVDVTVFIRSDGSLAFKGVSNDKLYLVDFTKENVDLDACLLAKTNMAWLWHRHLAQVGMKNIHKLLKGELVLELTDVCIEKDRPCATCQAGK

SEQ ID NO: 53239 - protein, 461 aa, Zea mays
  Coding DNA Sequence Number=SeqID_11460
  Gene Ontology: Mol. function=hydrolase activity; Cellular component =membrane
  Homolog annotation: Hit_ID=Q2QN56; Match level="QueryCoverage=92%, HitCoverage=96%, E-value=1e-135, Identity=53%"; Hit description =Heparanase-like protein 2, putative, expressed
  Pfam annotation: Domain name=Glyco_hydro_79n; Domain location=37-292; Score=146.5; E_value=6.9e-41; Accession=PF03662.4; Description =Glycosyl hydrolase family 79, N-terminal domain
MEIEDDDAGRTATAWSGSRERPAGMDRDQMQQAAEDYADATVIVRGSETIASTSDEFVCATIDWWPPEKCNYDQCPWERASVLNLDLTNPLLAKAIQVVTFGLNALRGRQQTRKGVWGGPWNSSNAREFIEYTVLKNYPIDSWEFGNAIFIEFSFDALGVGNISYTCNSHVRCCVRVIGNELSGSGVGASVSAEQYGKDLVELQTIISELYGDSNKPLVVAPGGFYDQKWFAQLLDVSGPNVLNAMTHHIYNLGAEVSNSPYSAMDHGLLHGLVNLVVHITVAAGSYLDQLGQSAKYDTKVYCRQTLIGGNYGLLDTETFVPNPDYYRQAYGGVTLLLLNLHRTMGFMVSVRNDLNVNLAEGQGIRRDSAFVHGLKRTVSWVGSKASDGFSKREEYHLSSKDGNPFARTMLLNGAPLELTEDGGIPSLYPVEVSVNSPIYVAPLTIAFVVFPDFEAEACGR

SEQ ID NO: 53240 - protein, 463 aa, Zea mays
  Coding DNA Sequence Number=SeqID_11461
  Gene Ontology: Mol. function=transferase activity, transferring hexosyl groups; Cellular component=integral to membrane; Biological process=carbohydrate biosynthetic process
  Homolog annotation: Hit_ID=Q2QN55; Match level="QueryCoverage=99%, HitCoverage=100%, E-value=1e-170, Identity=81%"; Hit description =Glycosyl transferase family 8 protein, expressed
  Pfam annotation: Domain name=Glyco_transf_8; Domain location=171-434; Score=197.5; E_value=3.1e-56; Accession=PF01501.10; Description =Glycosyl transferase family 8
  Subcellular localization annotation: CTP_CleavageSite=29; ConfidenceScore=5.10e-01
MQIRLSPSMRSITISTSHGLLDLMRLKVAARHFSYRTVFHTVLILAFLLPFVFILTAIMTLEGFNKCSSLGRRLGPRLLGRGNDGSMRLVRDLYVMLDKVNSEEAPLDLKVPETFDEFIWDMKNNDYDLRSFAFKLKATMESMDKELRSSRLSEQLNKHYAAIAIPKGLYCLSLRLTDEYSSNALARKQLPPPELVPCLSDNSYFHFVLASDNILAASVVVRSTIRSSLKPERIVFHVITDKKTYPAMHSWFALNSLSPAIVEVKGVHQFDWLTQENVPVLESIETQRAARDRYHGSRRPITSANDSPRVFAAKLQAGSPTYTNVLNHIRIYMPELFPSLNKVVFLDDDVVVQHDLSPLWDIDLSGKNLKSNFTLWRLGTLPPGLIAFKGHVHPIDPSWHLLGLGYQEKTDISSVEQAAVIHYNGQSKPWLEIGFKHLQPFWTKYVNYSNEFLRNCHIMEPQL

SEQ ID NO: 53241 - protein, 234 aa, Zea mays
  Coding DNA Sequence Number=SeqID_11462
  Gene Ontology: Mol. function=nucleotide binding; Cellular component =intracellular; Biological process=cellular process
  Homolog annotation: Hit_ID=Q6ZJ99; Match level="QueryCoverage=99%, HitCoverage=52%, E-value=1e-102, Identity=77%"; Hit description =Putative GTP-binding protein ERG
  Pfam annotation: Domain name=KH_2; Domain location=180-234; Score =7.9; E_value=0.014; Accession=PF07650.7; Description=KH domain
MLGHHGFPYRDVTVRVESAWSSINLYDLLIVMFDVNRHLNLPDSRVIKLIKRLGTEVNPNQRRILCMNKVDLVEDKKDLLKVAKEFEDLPGYERYFMVSGLKGKGVKDLVQYLMEQNYSAIVICSMHSSYKATLFFTKEAVRRPWDEEPTVMTEEEIPYVIEHRLMGWKELKDGSLRVEQHFIAPKQSQRQILVGKNGSKIGRIGIEANEELRSIFKRDVHLILQVRVAKKRSA

SEQ ID NO: 53242 - protein, 853 aa, Zea mays
  Coding DNA Sequence Number=SeqID_11463
  Gene Ontology: Mol. function=DNA binding
  Pfam annotation: Domain name=MBD; Domain location=40-107; Score=24.1; E_value=0.00012; Accession=PF01429.10; Description=Methyl-CpG binding domain
  Subcellular localization annotation: CTP_CleavageSite=26; ConfidenceScore=5.14e-01
AVTKDDSGMRTLPNGSLSEDMPSRTRSGLVRRSPTVKTVSKDKRAVEGLPDGWRKEYRPRKNGSFLDVYYIDPVSGYEFRSFKDVHRYLETGDIRQCAVRPKKSTICEVHIIESQTHASASPQHTRPGTADKGIQCEILTSDGIMVPLGELIAPYNGNDTEHTVLPEPENLKAIQGSDNKLETSEHVSVQPVSARNGSRQTKSVKRKERNAEVKSKKRKTSSAVTAVRASPRLAALKVQLEVSIKHEDAMVSINHVDQVQTIEESAIDQAHKSQSGSVDEIHGNLESTFSQLQLSQADTANGMQAMQENTTIHSQPSQLDTLNPTHRSQENSGNQLQSVLTDSSIPKRTTQECTIDEPSQPGINHIHTDQEFTGNQFRSNLPDDTVISLRDIEECTAHSKPSNTDSTGQIQANEENTANQVQSSLTDTVIPVPVIQEYATGYSQLSKANTSNKKQANQEYIADQVQSSLTDTVIPVQVIKEYTTGYPHINKADISNQMQANQENTDDHLYLSQVGCVTQMQIIEENLPKQPQLSQSGTGGRIQIDLESTTNHLLPNYDENSMLQCGLSWAPEQNSGALSTDFWKNVETQASSVSMPINGAPVASFPANVRFHNAAAAAEPALPPQVAPAEAGSDQSGLAFQSVFGNIWSDPCIEFAFKTLTGDIPVLDDTTAVTDYFPEQQDLNKGPAPNRAGSVDNSRNHTQVDGSDSGSAPEDDELRLARPRARTRAQPRKTTNSASPDLGLSPGRRRTPPRPTQGSDSGSAPEDDELRFARPQGSDSALASADSLRLARPRGSDSTSALEDRLDLDLGGASTSPNPGLGPTTSQEAPSLPYPKLTQATGNKTGVPSGSLR

SEQ ID NO: 53243 - protein, 197 aa, Zea mays
  Coding DNA Sequence Number=SeqID_11464
  Homolog annotation: Hit_ID=Q6BTJ4; Match level="QueryCoverage=73%, HitCoverage=19%, E-value=1e-07, Identity=34%"; Hit description =Similar to CA1621|CaIFF6 Candida albicans CaIFF6 unknown function
MAMMGSTSEKSTSARVRLIAAKTGLRHHRNLRLAGPQGSDSTSTLEDGLRLARPPGLGLSLDLGRRTPPRPTPWLGLSLNSGRRSPPRPTLGLGLSLDLGRRTPPRPTPGLGLSLDSGRRSPPRPTLGLGLNLDLGRRSSPRPTPGARTQPRPRTTVSASPNPWAQTQPRPRRSLRLARPQARIDHITGGHHYPTPS

SEQ ID NO: 53244 - protein, 96 aa, Zea mays
  Coding DNA Sequence Number=SeqID_11465
  Subcellular localization annotation: CTP_CleavageSite=39; ConfidenceScore=5.34e-01
MTTTTKTVAAVTVTAAAGAAAAAAKTVTVAAAGAAAAVAAAAEAAPGVAAVAAATGPVARCHWNDVGFSLMIALLICEADSFETVTAESLNTMSEF

SEQ ID NO: 53245 - protein, 255 aa, Zea mays
  Coding DNA Sequence Number=SeqID_11466
  Subcellular localization annotation: CTP_CleavageSite=38; ConfidenceScore=5.43e-01
MAPPAPAPLCRSYGAPTNSLLQFPLRRPPARKVPLWPRAQIPARQRALDSAMERPLRLLVVIFLLQPCPCTSPDASPLFQSCARALFGFLLVRAAPTARRFPTPWYSPVIPLVLPAPWPFPSYSLRVCSAHPWPTVVCAAASSLCLVLARSRFGASAVVCSLSAPAPARCAPSSASFVFPMARPALLLPAGVCRWTVSFLRAVVVCNSRTARGAFPRRPQLDLSSAFCARESAVASCSVPLAELALRSDSTFLCA

SEQ ID NO: 53246 - protein, 129 aa, Zea mays
  Coding DNA Sequence Number=SeqID_11467
MSLPYAALPRHLSGADMWAHDTSRTPTWIAPDPARQLCAPVLARLGSLPVGPPEPLGGSCGTLREALRVLGVLLGEGRHRGFTSVVRSKSHRSSIRGGIHQPSSACDRRWCMELEDVGRIAANRSAASD

SEQ ID NO: 53247 - protein, 106 aa, Zea mays
  Coding DNA Sequence Number=SeqID_11468
MAYLVGLVDAFFVCAMRGGSRRAKVACSPSSQQPLKLKLIKIIRLRIKQIIPMSGLGEAAPEPVSSKSESVGDGLVPDPTKQRVSGPHGGAAPEPGSSESVRRVMA

SEQ ID NO: 53248 - protein, 188 aa, Zea mays
  Coding DNA Sequence Number=SeqID_11469
  Gene Ontology: Mol. function=carboxyl- and carbamoyltransferase activity; Cellular component=ornithine carbamoyltransferase complex; Biological process=amino acid metabolic process
  Homolog annotation: Hit_ID=Q8SA97; Match level="QueryCoverage=70%, HitCoverage=21%, E-value=7e-25, Identity=51%"; Hit description =Ornithine carbamoyltransferase
MALPVDVVGPRPKLGDVEAPPRSRSSLSSVAVVESEPLGRARRRPSVEARAESEPWGRAKRCSSSSGVEPKSEPWVGRCGVRRLPGLSPKSEPWGRAERSSPSSGGLAPSPSPGSGGAEFAVFRGLAQVRALGSGGAEFPMVPEAGPDYLSASLCLVALQLVRRRRRCPSVRWSVERRSDCGHFGSVD

SEQ ID NO: 53249 - protein, 59 aa, Zea mays
  Coding DNA Sequence Number=SeqID_11470
MDDCVPLHLLLRSRSSVNLQDATSAVSSARDLAKPENPFNKRAAGMDQKSFQLIKTYIN

SEQ ID NO: 53250 - protein, 132 aa, Zea mays
  Coding DNA Sequence Number=SeqID_11471
MGAAPPPGEFTEEIRWAAGDAIAQGLPCSRDCCMRGAVPTQWKTRWSSSSMESARTKDQLCYRQKIQVRAPRLLANSYALSRCLQYGERGTRVSRHLLYHCGHCGGLPRRASREALSVILHSLSARFNGHIA

SEQ ID NO: 53251 - protein, 82 aa, Zea mays
  Coding DNA Sequence Number=SeqID_11472
MGVEDPTAIFTTGLTILVRSRAVDQRFAGPHFIPLRDNLGLILALGARSNGCDQPVPLRSGLFAKEPSGFCGINPPSICRLI

SEQ ID NO: 53252 - protein, 87 aa, Zea mays
  Coding DNA Sequence Number=SeqID_11473
MENVVAAMEAVAACVPRKWRNVRALHVKSLESTALSLYSAPGTDGEDNYGDDDLEAAKSEGTPTKEEQGRMKRRKKDILEVVLSYMP

SEQ ID NO: 53253 - protein, 187 aa, Zea mays
  Coding DNA Sequence Number=SeqID_11474
  Pfam annotation: Domain name=PAM2; Domain location=159-176; Score =25.7; E_value=0.00016; Accession=PF07145.5; Description=Ataxin-2 C -terminal region
MQRMRCSYAQATDRPAQCRGLTSDAPPHYTPGPCSLQIVHLLLRSGRRSVAAAPTESLRPTPDLAAVNKYPTSPASASFENTSFPAFYPNNLTSCGSPLSLAATAPTSFPLWYCCWLAAALGGGGGGTETLALALMSQQEAVDPPSATDERLGGLPRSGSTSRLNAQAPEFVPRAAAVPPPPPQQKV

SEQ ID NO: 53254 - protein, 106 aa, Zea mays
  Coding DNA Sequence Number=SeqID_11475
MEHERVRALREIKNQIIGNRTKKLLYLRLGAVSAVVSALADPGASPAALVQAAAAAGIFACGVEDCARPCWPPGAVGHLTRLLAHPDEKVVEMPYESYHCIPSYVC

SEQ ID NO: 53255 - protein, 83 aa, Zea mays
  Coding DNA Sequence Number=SeqID_11476
MKHYSLQDNEPWTKHLRGFDVFGSVALVYKSEIPALVFQSTEWGVFIASKSLNSHLGEVGKTAQFLGAPDLEQRWSGGAPDLY

SEQ ID NO: 53256 - protein, 103 aa, Zea mays
  Coding DNA Sequence Number=SeqID_11477
MTKDEIYLGNLTFSRVVYIPKGKTQHDHNQVMKKEDETLHNYVKHWYDMKADISSMPEAMTKVFKKTLRHDVTLEKYKERLLAKGYMQKKMGDKTMFLNRELK

SEQ ID NO: 53257 - protein, 117 aa, Zea mays
  Coding DNA Sequence Number=SeqID_11478
MGPVGGFGKPAAPDRLYDWTIYVPLNGNFHLYPHLGQQGHVSADLTPFVLRKPTPAMAPKKVNIRASFSMDGAMKAALVEKKGKAALADDTLPTISKNNETRAVNNKNPHTDDPPYP

SEQ ID NO: 53258 - protein, 134 aa, Zea mays
  Coding DNA Sequence Number=SeqID_11479
MARGDARCGLGKKPTAPLLYKINFRELRVSPSEVNRAGPSPQPLSPSQGPEYHNNLETMDQTEYQSKKNFKEPRAREKVKKTEVLKARGEEDGLQEVKGVGAQGCLMRSNYINLMLWIPTPTQTGQEEKNIEKC

SEQ ID NO: 53259 - protein, 35 aa, Zea mays
  Coding DNA Sequence Number=SeqID_11480
MYYLRDIHNATEGEIAQVGITADQNNTKVGTAPKV

SEQ ID NO: 53260 - protein, 88 aa, Zea mays
  Coding DNA Sequence Number=SeqID_11481
MGERNRRNKGPLTRGEERTIAAASVLGAGQTRGCREVRSGVGGAVNVGSWSLGVMPGHGAQGAVLGVGLLGIAGAQGQASVAAGASWS

SEQ ID NO: 53261 - protein, 132 aa, Zea mays
  Coding DNA Sequence Number=SeqID_11482
  Subcellular localization annotation: CTP_CleavageSite=33; ConfidenceScore=5.21e-01
MVNRGRIKTTTAVATSVALSHGGMSTGPHRRRRADQRRPGVQSYSPEAVRIQGHDVEDNGAPRTDGRRGGRFYTEVESAFKESMAENLADAVARDPWRHHRIWSVAVAQITRVCFRGKKIDLAREGHGTARG

SEQ ID NO: 53262 - protein, 69 aa, Zea mays
  Coding DNA Sequence Number=SeqID_11483
MGTPLADSLPSAVRQTLGKAPASSMGFDDGVANSGDGGSGSNGEDRKSGLAWVARSASGLGSLGVMPGC

SEQ ID NO: 53263 - protein, 870 aa, Zea mays
  Coding DNA Sequence Number=SeqID_11484
  Gene Ontology: Mol. function=alpha-mannosidase activity; Cellular component=lysosome; Biological process=carbohydrate metabolic process
  Homolog annotation: Hit_ID=Q10A56; Match level="QueryCoverage=97%, HitCoverage=87%, E-value=0.0, Identity=74%"; Hit description =Glycosyl hydrolase family 38 protein, putative, expressed
  Pfam annotation: Domain name=Alpha-mann_mid; Domain location=254-329; Score=95.0; E_value=2.3e-25; Accession=PF09261.1; Description=Alpha mannosidase, middle domain
  Pfam annotation: Domain name=Glyco_hydro_38; Domain location=6-250; Score=235.4; E_value=1.3e-67; Accession=PF01074.12; Description =Glycosyl hydrolases family 38
  Pfam annotation: Domain name=Glyco_hydro_38C; Domain location=385 -867; Score=328.4; E_value=1.3e-95; Accession=PF07748.3; Description =Glycosyl hydrolases family 38 C-termi
  Pfam module annotation: Pfam domain module=Alpha-mann_mid::Glyco _hydro_38::Glyco_hydro_38C; Domain location=254-329::6-250::385-867
MGSEPDGSFQNQKNNLFLYVLFPRNGGWCMHDEAAVHYIDMIDQTTLGHRMIKKQFNKTPRAGWQIDPFGHSAVQAYLLGAELGFDSVHFARIDYQDRATRKADKGLEVIWRGSRTFGSSSQIFTNAFPVHYSPPDGFGFEVLDENIIPVQDDLSLFDYNVQERVDDFVAAALAQANVTRTDHIMWTMGDDFNYQYAESWFRNMDKLIQHVNKDGRVHALYSTPSIYTDAKHASNESWPVKYDDYFPYADSTNAYWTGYFTSRPTFKRYVRVHSGYYLAARQIEFLVGGRSSLGLFTSSLEDAMGIAQHHDAVSGTAKQHTTDDYAKRLALGAAKVEKGVNTALACLTSSNGTCGSSVVKFSQCSLLNISYCPSTEEAISSTKRLVVVVYNPLGWERSDFIRVPVNDQNLVVKGSDGNIVESQLVEVDNVTRNLRKFYVKAYLGITTHKAPKYWLLFQASVPPMGWNSYFISKSTGAGYNSTEHVSDVVSPSNSTIEVGPGHLKMSFSKASGQLNRIFNSISGVDLPVQQSFLWYRSSEGDASDSQASGAYIFRPDGNTPTTVSSSVPLKVIRGPLVDEVHQQFSSWIYQITRLYKNKEHAEVEYTVRNYREDWNLQVTQPVAGNYYPECSDRLTLQVNLGVYVADEKYELSVLVDRAVGASSIQDGQLEIMLHRRLLKDDGRGVGEPLDEVVCVDQDCQGLTSLIATVILPKTPQARGNYYVNVEKLGHGAHWRRTYGQQVYSPFLLAFTHEDETSSKSYSVAKAGMMNANYSLPDNVAIVTLQAAEDPRYSKVAKVDLKKVFGKRTIKELTETSLSANQKKSDMKKLSWRVIGNTETGPAAVKGGPVDSRALVVELGPMEIRTFLLKF

SEQ ID NO: 53264 - protein, 69 aa, Zea mays
  Coding DNA Sequence Number=SeqID_11485
MTIEQMFLMETQAVQAIGQTLAAMQQMPQMPMDKRLEFMRVHPPVFAHSADPMDAEDWRRTVERDLHTS

SEQ ID NO: 53265 - protein, 135 aa, Zea mays
  Coding DNA Sequence Number=SeqID_11486
  Gene Ontology: Mol. function=DNA binding; Biological process=DNA integration
  Homolog annotation: Hit_ID=O24587; Match level="QueryCoverage=91%, HitCoverage=13%, E-value=7e-41, Identity=62%"; Hit description=Pol
  Pfam annotation: Domain name=rve; Domain location=22-133; Score=-0.8; E_value=0.0069; Accession=PF00665.16; Description=Integrase core domain
MSVLRKTDLVACQEGKQVGISHPSKNMMTISRPSTRISLGPLLILASAEDKTETQETLKRFLGRAPNEFELKVKKIRSYNGSKFKNLQVEDYIEEEGIKHEFFAPYTPQQNGVVEGKNRTLIDMARTMLGEYKTS

SEQ ID NO: 53266 - protein, 52 aa, Zea mays
  Coding DNA Sequence Number=SeqID_11487
  Subcellular localization annotation: CTP_CleavageSite=30; ConfidenceScore=5.24e-01
MNKDKGPMPMSISKMKTKKPIGTPTGSKLMASAFKLCNLQSQVLVLVLVKVA

SEQ ID NO: 53267 - protein, 120 aa, Zea mays
  Coding DNA Sequence Number=SeqID_11488
  Homolog annotation: Hit_ID=Q67U69; Match level="QueryCoverage=40%, HitCoverage=12%, E-value=2e-07, Identity=53%"; Hit description =Formate dehydrogenase 2, mitochondrial precursor
MGFPYTDSATTQAVFSDDTDYFFGEELDTDRTKEFRYCDSKHVGVNINILPTGTSFDALQVQQQELLLTTEINSNHVDLPTVVAMGCIIVEVIDSNTVSVVEAQLMCALILKRNLLSGHH

SEQ ID NO: 53268 - protein, 441 aa, Zea mays
  Coding DNA Sequence Number=SeqID_11489
  Gene Ontology: Mol. function=protein dimerization activity; Cellular component=nucleus; Biological process=regulation of transcription, DNA-dependent
  Homolog annotation: Hit_ID=Q6H543; Match level="QueryCoverage=59%, HitCoverage=93%, E-value=9e-75, Identity=57%"; Hit description=Auxin- responsive protein IAA7
  Pfam annotation: Domain name=AUX_IAA; Domain location=195-437; Score =78.2; E_value=2.5e-20; Accession=PF02309.7; Description=AUXIAA family
MAPPIDVAGLRPRLGDAEAPPKPRSSLSSMAEAESEPLGRARRRSSAEARAESEPWGRAKRSSSSSGAEPESEPWVGRSGVRRLPGLSPSPRPGSGGAEFVIFRDLARVRALGRAERRPDCLSVSLCQVMLQSEWRRRRCPSVRPLYADGGYRLRIRSLEGRRIGVMGDAAETNKTLHNWMGEPRPRSSDQRDEEETLQLSLGLPGGGASAGGGVAPAAWRMLPARDEEMRSAAAVVDTSLLSLGYSAPAFSPRSPGKAKGSPAAATENALASTNNASQRRSPNTPVIGWPPVRAFRRNLATSSRASLEHQNGKKEDKPEQTTKRAPFVKINMDGIPIGRKIDLSALGSYDELSLSVDKLFRGLLAAQQDPLAAGAKECSQEEVAISGLLDGTGEYTLVYEDYEGDRVLVGDVPWGMFVSSVKRLRVLKTSDLSSSVSTSL

SEQ ID NO: 53269 - protein, 102 aa, Zea mays
  Coding DNA Sequence Number=SeqID_11490
MEFGGGCRSELVGDQKQATQLEDGTATGSRMVGRGGYATRVKALLPVNAADCGHLLRRWWSGFLGALPPSLWSKNHCSKESQMGVMRSSLYERDISIACAAL

SEQ ID NO: 53270 - protein, 111 aa, Zea mays
  Coding DNA Sequence Number=SeqID_11491
MEVAMQQVLKAMARMELRLTATLASSGGEQVLESFSYVTASSAIEPRYDDRVFDSSTVTKYYNVPFDDELYHDEIAKVLVVLEYNGMISSTTVLADYTTTTNVTPQVFVLR

SEQ ID NO: 53271 - protein, 126 aa, Zea mays
  Coding DNA Sequence Number=SeqID_11492
MAGVAARAWSRGAQRQRGASIGRECEKAACSVHDTWDVQLLTRYHIEGNDSPLLDCPRLLDKDCGQWDEDKKREGGGAPVGRRRRRSRMTTLSSRPLSMRHRRTSMRRSRMTIMLSRMPQVLAPQV

SEQ ID NO: 53272 - protein, 66 aa, Zea mays
  Coding DNA Sequence Number=SeqID_11493
MGSRHSACSAEAECRGSFVLLLLVTLLRGERYLIRDGWFTDDDEDGYDHAYGNGKEEVVEADLQEF

SEQ ID NO: 53273 - protein, 96 aa, Zea mays
  Coding DNA Sequence Number=SeqID_11494
MASDGTKEKGKVIEEEEKIPTNDTTNGGETIDSGSGKRKEGKKKRIKKIIYYNSDSLSSSHKDADDSSSKKKMNLCLERKMTGFGRPLNLSRSLYS

SEQ ID NO: 53274 - protein, 114 aa, Zea mays
  Coding DNA Sequence Number=SeqID_11495
  Subcellular localization annotation: CTP_CleavageSite=57; ConfidenceScore=5.08e-01
MAMMGSTSKKMYLCQVFPIPHWSLRWPQRIRFPLRLVEIARRSNPDPSEAPPPPSTRLQSRSDGQNPAIELAGSPSPALASSGDLRPPEAMPASSSATPPPRTGAAPSAVPLTP

SEQ ID NO: 53275 - protein, 140 aa, Zea mays
  Coding DNA Sequence Number=SeqID_11496
MAPSATSRAGEIRDEGVASDGMYDEVEIDGGARQPNKQEGTLARGQQGRANAMSLDDGARCSLAKRTPTPGNQQFGRPRGERAGEVEQEESTAVAGLLPMPERSSDSRRRAEIVSRRTTASAQARGAATVAWLWPERTRA

SEQ ID NO: 53276 - protein, 83 aa, Zea mays
  Coding DNA Sequence Number=SeqID_11497
MEQGDAGGEGYKKGKPGASAAAARRGAVLSSCACACAAHAHVGTDGEWRAGWRYCCAVCGLRGLLAAGCGLPTTGIDCVLPPL

SEQ ID NO: 53277 - protein, 94 aa, Zea mays
  Coding DNA Sequence Number=SeqID_11498
METVERWMRDYEKRRGASLHGVISFLPLPYPLVALWSSRFPLNGPSQIGFSAGDRLRGLSQALFGLFDPVGYLLQAALGGFAVGFEVYQLLKVD

SEQ ID NO: 53278 - protein, 256 aa, Zea mays
  Coding DNA Sequence Number=SeqID_11499
  Gene Ontology: Mol. function=protein dimerization activity; Cellular component=nucleus; Biological process=regulation of transcription, DNA-dependent
  Homolog annotation: Hit_ID=Q9LG86; Match level="QueryCoverage=83%, HitCoverage=94%, E-value=5e-46, Identity=51%"; Hit description=Auxin- responsive protein IAA2
  Pfam annotation: Domain name=AUX_IAA; Domain location=19-213; Score =101.6; E_value=2.3e-27; Accession=PF02309.7; Description=AUXIAA family
MAWRGPLGAGEEALDSGLELSLGLPAYFARPSASGLDAAREEPAEASAYAIQAASGSNVSKARVRPAGAAPVVGWPPVRSFRRNLAASSSRPSSGKHTRQEGSAKDGLFVKINMDGVPIGRKVDLTAYGGYADLSAAVGKLFRGLLAAQRDRAATAGGEEEEEGEGPVIGGDYTLVYEDDEGDRVLAGDVPWEMFVATAKRLRVLKSSDVPASSVTLLVKSPEWRRRGVALSLASFLCVALAAFLLVVLVLGASKK

SEQ ID NO: 53279 - protein, 355 aa, Zea mays
  Coding DNA Sequence Number=SeqID_11500
  Gene Ontology: Mol. function=oxidoreductase activity; Biological process=electron transport
  Homolog annotation: Hit_ID=Q5SNI3; Match level="QueryCoverage=99%, HitCoverage=97%, E-value=1e-156, Identity=76%"; Hit description =Syringomycin biosynthesis enzyme-like
  Pfam annotation: Domain name=TauD; Domain location=24-352; Score= -25.3; E_value=2.8e-05; Accession=PF02668.6; Description=Taurine catabolism dioxygenase TauD, TfdA family
MASFFRDARLPQQRVVEGVPFPAVLVPSARAGSCAGGVDKFLAAVRCERASRLEPLVRDAGALLLRGFPATTAADFDRAVDAFGYEELPIVGSVAPRTNVVGRVFTANDSPPDQKIPFHHEMAQSAVWWHWHLVFETLPLVFDRMYLAYQHVPTFPSKLFFFCEVEPKSGGETPVVPSHYVYKRMKEKFPGFVEKLEKDMIVYTRVLGEGDNPSSSIGRGWQSTFLTKDKAVAEERAAKLGIKLEWTDDGVKTVMGPIPAVKWDESRGRKIWFNSIVAAYIGWKDARNDPMKAVTFGDGSPLPADVIDACGQVLEEESVAVPWQHGDILLIDNWAVLHSRRSFEPPRRILASICK

SEQ ID NO: 53280 - protein, 100 aa, Zea mays
  Coding DNA Sequence Number=SeqID_11501
MGAGWYYDLGNWLLVLQREEEGAGCWSCGRRSAGGGAGAQWSAVGLWEEGGGGAERRFNNNGCLRCFRFGLRAAKCTSLPEGTKKQVMWQRLENIEERPQ

SEQ ID NO: 53281 - protein, 127 aa, Zea mays
  Coding DNA Sequence Number=SeqID_11502
  Subcellular localization annotation: CTP_CleavageSite=32; ConfidenceScore=5.10e-01
MATANGDINQRQLRNPPSSAFAVRAGFESAVCDVTRGGTYLAAWCVEVTTTRSTSSEDAAALGSFSVSAGHLPLPALSRVGDGVAYCCAWIAMWGWGTREPRRWEDGGAGVVRGQLLRTRAPPKVVG

SEQ ID NO: 53282 - protein, 165 aa, Zea mays
  Coding DNA Sequence Number=SeqID_11503
MTTAQEGRTGGGDQHRGWRSHAGRGQAGRAVQMWRQRSGGPCRAGNGGGPHVEGRSAAEIHTEGSSLTLGNIFGNPGHLLLQKVGLQKLCHEPGIASFGDWWWHASEAVSRLSRHGLVIQVSEELHLWSLAGAKGYATETYKLADLNAEAQESGDDEDDNVWEEG

SEQ ID NO: 53283 - protein, 234 aa, Zea mays
  Coding DNA Sequence Number=SeqID_11504
  Gene Ontology: Mol. function=protein binding; Biological process =defense response
  Homolog annotation: Hit_ID=Q53KR9; Match level="QueryCoverage=50%, HitCoverage=19%, E-value=1e-27, Identity=48%"; Hit description=NB -ARC domain, putative
PSYARADPSSTDPRISYPPQEARRWHCHQGQGDQKIAYAKIRLHNLVELIANNLALEKHTAMENPDAQAKAWVSEMRELAYDMEDNIDLFTHHVDHEPTDTATTGVKRFFLRIIRKLKKLHYRHRIEEGGSSLSHAEIDPRLEVLYVEVEKLVGIQGPSQEITGQLVGENTTERRRVVTVVGSGGSGKTTLAKQLVLCGASWVLASVCFLVAQLIATLITVYTNWAFAAIKGIR

SEQ ID NO: 53284 - protein, 291 aa, Zea mays
  Coding DNA Sequence Number=SeqID_11505
MPRSWDIRGSNVRLNRVFELNGLHYGPYPQEDSTDAGDDDRKRNGMAKRGGVDEGCSKGKVVAMAVRKKIRVEAKKKGLAKTSRVAGASNRFVEVQTEMCTDLGEVMASPDLRDASSRMLKVIGGSLKTNIPQQVQLNQLTALAQFRALAEGPPLSVSPASYHTLRAAAALAPFANASDAATYTKRRATAPWAPLTSAPACEYPGSSAAYATRAPTCTDLWDPRLNLTSIPASPCCLWRAGLKHQKLPPNRICHVRVFVYENRGELARELLEIIRQLGLLAWPYMWTLLTA

SEQ ID NO: 53285 - protein, 178 aa, Zea mays
  Coding DNA Sequence Number=SeqID_11506
MVSDSVTVMDLLPGHMMEFGTLRIYSGHVHEMQRLGYFRDGVGRAPGAKEVPEPEGELVVFEEFSLLVFDCLHFEKKVASGKIVQFGLGEVVELVPCAKNKWGNWWDFLFYVTLKDTEGVPGLPLSIMCSHFYMAFPQFKLKKEDANKDALHRASKASTGRDLVEEFIAYGVWSLVHG

SEQ ID NO: 53286 - protein, 147 aa, Zea mays
  Coding DNA Sequence Number=SeqID_11507
MVATKGYCRVLAIGSQIYGIESWRRLGLRWYPLEYSHPKLPSPFVEPNLLNRDIHVTLNPLATPALPDNKTDRKATIGGGTTVAPSFDEQYLHHSMTYTLITQSYARWTRQGNSRRVLLRSSDAENPVRAVKQLGGGSGLRRAISRI

SEQ ID NO: 53287 - protein, 118 aa, Zea mays
  Coding DNA Sequence Number=SeqID_11508
MDDGAGAREEGEQGWLESRKKELGMRNRGRQHSGDKDTMAMRGGRARRTTEIEIKYPTLAPTSGDLVTTTSFITMKSMASHQASPTSMEKLTLHITRGRALNLAKRNRRKKPKQGCNM

SEQ ID NO: 53288 - protein, 504 aa, Zea mays
  Coding DNA Sequence Number=SeqID_11509
  Gene Ontology: Mol. function=magnesium ion binding; Cellular component=chloroplast; Biological process=metabolic process
  Homolog annotation: Hit_ID=Q5GJ60; Match level="QueryCoverage=99%, HitCoverage=100%, E-value=0.0, Identity=91%"; Hit description =Terpene synthase 6
  Pfam annotation: Domain name=Terpene_synth; Domain location=30-220; Score=170.6; E_value=3.8e-48; Accession=PF01397.11; Description =Terpene synthase, N-terminal domain
  Pfam annotation: Domain name=Terpene_synth_C; Domain location=225 -450; Score=226.7; E_value=5.3e-65; Accession=PF03936.6; Description =Terpene synthase family, metal binding domain
  Pfam module annotation: Pfam domain module=Terpene_synth::Terpene _synth_C; Domain location=30-220::225-450
MAAPTLTADGPRLGQQEMKKMSPSFHPTLWGDFFLSYEAPTEAQEAQMREKAAVLKEEVRNMIKGSHDVPEIVDLIITLQRLNLDYHYEDEINEKLTVVYKSNYDGGNLDLVSRRFYLLRKCGYDVSSDVFLKFKDQLGNFVEADTRSLLSLYNAAFLRIHGETVLDEAISFTMRVLQDRLEHLESPLAEEVSSALDTPLFRRVGTLEMKDYIPIYEKDAKQNKSILEFAKLNFNLLQLRYSSELKECTTWWKELRVESNLSFVRDRIVEVYFWMSGGCYDPQYSHSRIILTKIVAFITILDDTLDSHATSCESMQLAEAIEREVKELVREYTKEIKWRDEDYVPKTLKEHLKVSLISIGGTLVLCSAFVGMGDVVTKKIMKWVMSDAELVKSFGIFVRLSNDIVSTKREQREKHCVSTVQCYMKQHEITMDEACEQIKELTEDSWKFMIEQGLALKEYPIIVPRTVLEFARTVDYMYKEADKYTVSHTIKDMLTSLYVKPVLM

SEQ ID NO: 53289 - protein, 52 aa, Zea mays
  Coding DNA Sequence Number=SeqID_11510
  Gene Ontology: Mol. function=glutathione peroxidase activity; Cellular component=mitochondrion; Biological process=response to oxidative stress
  Homolog annotation: Hit_ID=Q9FEV2; Match level="QueryCoverage=96%, HitCoverage=38%, E-value=2e-15, Identity=68%"; Hit description =Putative phospholipid hydroperoxide glutathione peroxidase
MVRVNGPDAAPVYKFLKASKPGLFGSSRIKWNFTKFLVDKDGKKDIQKALEE

SEQ ID NO: 53290 - protein, 255 aa, Zea mays
  Coding DNA Sequence Number=SeqID_11511
  Homolog annotation: Hit_ID=Q10L33; Match level="QueryCoverage=51%, HitCoverage=43%, E-value=1e-45, Identity=78%"; Hit description=MTERF family protein, expressed
  Pfam annotation: Domain name=mTERF; Domain location=7-229; Score= -93.8; E_value=0.053; Accession=PF02536.5; Description=mTERF
  Subcellular localization annotation: CTP_CleavageSite=33; ConfidenceScore=5.30e-01
MVTMSGTRTALAHEGLDYGPRLVAPRRSRLSVVAVAVRTRPASLAVPGLPPPTPEPVLPSPPVAAGVAAVLLEAGVPPADLRRAAGMCPELLSVPAEAVAAALRFLTEEAGVPEAELQRVLRRRPRLLVCPVAARLRPTLYFLRALGVPDLHRRADLLSFSVEDKLLPRIEFLESLGLPARAARSMARRFPALFGYGVDGKHAAQGGVPPGAWAPWAAARTSCDCYPDRVNIHSSQRLGRQSRALFVDNFSPQFY

SEQ ID NO: 53291 - protein, 235 aa, Zea mays
  Coding DNA Sequence Number=SeqID_11512
  Gene Ontology: Mol. function=NAD(P)H dehydrogenase (quinone) activity
  Homolog annotation: Hit_ID=Q941Z0; Match level="QueryCoverage=75%, HitCoverage=88%, E-value=1e-66, Identity=73%"; Hit description =Probable NADPH:quinone oxidoreductase 1
  Pfam annotation: Domain name=FMN_red; Domain location=54-213; Score =91.2; E_value=3.2e-24; Accession=PF03358.6; Description=NADPH -dependent FMN reductase
MDLAPESRVYSRQTGRTATSAIFRHGSTGCEARPPRGRHQRLHSQGLLAQRAHPRRNGYTSLANYPAAEVCEDCIPGLRVDHLDVADLPMLNTDLETNGGTGFPPAVEAFRAKVRHADCFLFASPEYNYSITSPLKNALDWASRGVNCWADKPAAIVSAGGNFGGGRSSYHLRQVGVFLDIHFINKPELFVFAFFEPAKFFDSDGNLIDADTRERLKQVLLSLEAFTRRLQNNKD

SEQ ID NO: 53292 - protein, 76 aa, Zea mays
  Coding DNA Sequence Number=SeqID_11513
  Homolog annotation: Hit_ID=Q10L35; Match level="QueryCoverage=85%, HitCoverage=37%, E-value=5e-29, Identity=90%"; Hit description =Expressed protein
  Pfam annotation: Domain name=DUF1077; Domain location=4-74; Score= -46.3; E_value=0.003; Accession=PF06417.2; Description=Protein of unknown function (DUF1077)
MWRYVYKVMVFEPFKDPRVDTIAPKLLFIALNLAAMGLGIWKLNTLGLLPTNPSDWVSSLAPAREVEYAGGGLPLI

SEQ ID NO: 53293 - protein, 68 aa, Zea mays
  Coding DNA Sequence Number=SeqID_11514
  Subcellular localization annotation: CTP_CleavageSite=28; ConfidenceScore=5.17e-01
MPIGPNPSDKTTASGPAPHSGTGPVLPRVPKRRCSWTTHMGLDHLVYRLDPYGRVLDLHVYYPEPPHK

SEQ ID NO: 53294 - protein, 129 aa, Zea mays
  Coding DNA Sequence Number=SeqID_11515
MAVVGGRAQRSRRQPGSRPILRQQESLLSRREDGTGEGGYPERDPSPRRNRAPSPPLLIRGSKAGPPRVQQPPQIAWARHPLLVRGSKANPPKGSMAASGYSGSAPITDQGFEGWPPKGSQSPQTPSEG

SEQ ID NO: 53295 - protein, 280 aa, Zea mays
  Coding DNA Sequence Number=SeqID_11516
MSSLAWHTGLSGGAPDSARCARPAFGEHATLGKIRRRMAIIHRTVRWCTGLSGEPTAASATVDRTIRGRRMARANGQQGAPDYPEEEEEVQRHEEEVATTDVGVQGHEEEIMTIDIGRQNHEEAVTTNVGSKAMRRSRQMMRPLRLLPFDEGPLEKATLCSVPHRLHSQKLVYWSSQFVIANGMTHLSMAKVTIDRRLTDMRCLRSMYSMFTGVIDSTELRSRGGSSSQTGCGSSRSPCSSMEEAMREQQEMFHEELLQQQMTFVRQQSDYMATYNAQAQ

SEQ ID NO: 53296 - protein, 67 aa, Zea mays
  Coding DNA Sequence Number=SeqID_11517
  Homolog annotation: Hit_ID=Q5GAV3; Match level="QueryCoverage=100%, HitCoverage=5%, E-value=2e-27, Identity=83%"; Hit description =Putative integral membrane protein
MEIHWSRGARTDGFHMLGVLGAHGSAPGRSSVAGDVVDSSRFGHRNDSHHRDSGPWLPGADAHYPVT

SEQ ID NO: 53297 - protein, 401 aa, Zea mays
  Coding DNA Sequence Number=SeqID_11518
  Homolog annotation: Hit_ID=Q9FI01; Match level="QueryCoverage=38%, HitCoverage=36%, E-value=9e-10, Identity=31%"; Hit description =Arabidopsis thaliana genomic DNA, chromosome 5, P1 clone:MGN6
  Pfam annotation: Domain name=CBS; Domain location=74-264; Score=14.2; E_value=0.0034; Accession=PF00571.18; Description=CBS domain
  Subcellular localization annotation: CTP_CleavageSite=80; ConfidenceScore=5.76e-01
PLDAVLSRGAGAPPSPLPPLPGAQGSSSAAGGGSAPPGNFSGSRRRTSCATSSTPSASSTMWPRAPCPRSGSCAPTSCPCAPAEAALSAVPLIRRARRHGDGRSPVVTEDGHLLGEISPALLAACDETAAAAIATLSAADLMAYVDYFGSPPEHISRAIKAGLKDKGLDAMLALVEDETLSSFSSASSSSDEEAGRTQLRRPSSGSYGRRSAEEPVVCSPASSLVAVMVQALAHRVSYVWVLDEDSDCRLAGIVTFADVLRVFREQLLLRLAERGALYGDEGFEAFSPFYPAELLAVADPNQHGEGSRNHGKAEVVIARCWRHRDRRPPRRGPARPPLRRPDRQTASASWARVYGLTSRPAAASRAALSQQPVASSTQQEAAALSSSTDLPMNTIPCRCVL

SEQ ID NO: 53298 - protein, 199 aa, Zea mays
  Coding DNA Sequence Number=SeqID_11519
MGEPRWSVAWPARHGRINHASRGPQVAPTRARGHGKAALRGSGWGYGVWEVGTWRGRAPARRLASATGPCSSACMQQRGERDMGGGERIHGRGVFWAVSWRSGWRLLASGRGKMVLRIVGKQGEKLGEREMAGKDEQGLWRRPGAPKHAHRAAGARLGGEMACWAAGEGMAQGSWANLAWRPGQGHACALGGLGRGAWR

SEQ ID NO: 53299 - protein, 118 aa, Zea mays
  Coding DNA Sequence Number=SeqID_11520
MTKRELEADTGEAYELPIAAGGGEAASGYDSTTRIDILRRVVYNPSTSHLLRAQRVGEQASEIVVCRVTLAQVAFHKVPILFNPKVQLELSLLVWLVHLLLRRKELGFERGKGITMEI

SEQ ID NO: 53300 - protein, 64 aa, Zea mays
  Coding DNA Sequence Number=SeqID_11521
MELLSNSTRYDLQKSASMADSKDLSNVIDNDRRLTNLSVAEREELEYYVKKWEEEFQRQQAQKR

SEQ ID NO: 53301 - protein, 293 aa, Zea mays
  Coding DNA Sequence Number=SeqID_11522
  Gene Ontology: Mol. function=sequence-specific DNA binding; Cellular component=nucleus; Biological process=regulation of transcription
  Homolog annotation: Hit_ID=Q20DP7; Match level="QueryCoverage=88%, HitCoverage=82%, E-value=2e-19, Identity=31%"; Hit description=WRKY transcription factor 64
  Pfam annotation: Domain name=WRKY; Domain location=160-228; Score =28.5; E_value=2.3e-07; Accession=PF03106.6; Description=WRKY DNA -binding domain
MDFRSNDDLVMPPPPPPCGHGWEMMEAMRRQQELVMQLRALVLPLLVHGAMDGGGGGAPSAADIAVQLFDDVIGCNIGVVSTLEGCILSTGGGGPSVESVDDKSLVMRNNSAPASNNGEKAEKQARLAANSKQLNSVVVGQKRRRNNDKRSRSLVTHVPHYDGHLWRKYGQKNINGRKHPRERNCLATKTVEEQEPNADDGNSSSSAMAGEESPKYTVVYYGDHTCNDHIIHAVSTVQLPQLVASVDLGQGTEMDQTTATRAGGVQESDEADHLDLPALLENAVKAEKVMSSE

SEQ ID NO: 53302 - protein, 103 aa, Zea mays
  Coding DNA Sequence Number=SeqID_11523
  Homolog annotation: Hit_ID=Q9LEA0; Match level="QueryCoverage=59%, HitCoverage=27%, E-value=5e-08, Identity=45%"; Hit description =Carnitine racemase-like
MESSSKGMCTVERRGRVHLITMTGAGEHRLNPDLLAALRSAVAASAGAGALVLAAEGKFFSNGFDLAWAPRGAAPAWHGAMDGGLRALAGRPAGAARAHGGRR

SEQ ID NO: 53303 - protein, 461 aa, Zea mays
  Coding DNA Sequence Number=SeqID_11524
  Gene Ontology: Mol. function=protein serine/threonine kinase activity; Biological process=protein amino acid phosphorylation
  Homolog annotation: Hit_ID=Q8S1J0; Match level="QueryCoverage=81%, HitCoverage=62%, E-value=1e-152, Identity=62%"; Hit description =Putative serine/threonine protein kinase
  Pfam annotation: Domain name=Pkinase; Domain location=89-300; Score= -28.9; E_value=7.7e-07; Accession=PF00069.15; Description=Protein kinase domain
MEQWRRGGWRTGLWSTGAAVTHWPVKQWSGSALPYGRREEGGGSALPYGQIYHPLKFLHFNPYIDMLVEHRRCSHTCLKQVHIGNSPTYRLERKLGKGGFGQVYVGRRISAPRLSDRNPGSNALEVALKFEHQSSKGCNFGAPYEWQVYKYVHGDVKPENFLLGPPGTPEEKKLFLVDLGLATKWKDAGTGHHVEYDQRPDIFRGTVRYASVHAHLGRTGSRRDDLESLAYTLIFLLRGRLPWQGYQGENKGFLVCKKKMATSPESLCGICPQPFRNFVEYVVNLKFDEEPNYARCISLFDGIVGPNPDIRPINTDGAQKLVYQVGQKRGRLIVDENDDEQPKKKIRMGMPATQWISVYNARRPMKQRYHYNVADNRLVQHIQKGNEDGLFISSVASSSNLWALIMDAGTGFTSQVYELSSYFLHKEWIMEQWERNFYITALAGANNGSSLVIMSRGRAQK

SEQ ID NO: 53304 - protein, 634 aa, Zea mays
  Coding DNA Sequence Number=SeqID_11525
  Pfam annotation: Domain name=DUF247; Domain location=79-498; Score= -14.1; E_value=2.1e-09; Accession=PF03140.6; Description=Plant protein of unknown function
MDRDIAIAGNHHHLIDIAPDASMGEASGATDGSAERLGVGTGGGGGGNEKKWLRKLTSATVNTAVLRDLISRTPMLWYLGERTGTILRPCARREPVEALHAVRAVAIGPFHRADRGLPFPDDAKLPFMRYLQDQCGLDVDGYVEALCLERDRLRCEFADDGSDGPAVEILDDEAKLLEMLLLDSCFILVVSLMLSKAGTGDDADSVTRAASISKDYFILNMAVAQHADDIKLDMLVLENQVPFRAIKLLAASCPGLKLRNSVEELVLGCFDDICPKRARRAAYSAAAGEFHHVLHLFHWSRVPKDKYFVLSTPRKLLKIKKESERLFPCSMELRRSAVWFREASSSCGDLDMWFWRHPASPVAVMTVPCFHVHEYSAAVLHNLLAFEKHFYWAHGACVTAHVARMEGLIRCPQDAAMLRKRGVLASTRRTDTELVALFRELGEETVGARLPDDYGEMLDAVAGHRGRLVSGWCGGFVLHFFPSPWVAVSLAVAAALIFVPSMLQTVYTIGGPSRGARALALLGRDPLLVVASLLASDPVPLISLVMWARLQPRFVPSSDISSLLDTRLPSATHSFELLALFDDNLGLPDLVTFPKTLNTIVSTLANHGLLESAFYYFKCLRDTSLGSVCLHRTP

SEQ ID NO: 53305 - protein, 107 aa, Zea mays
  Coding DNA Sequence Number=SeqID_11526
MSEEGTNRGWRRAHMTREISGTGSEARSEATTRRGSRPSSARARAPRDGPPLQGGGAVARKRSRWGDCAAEAMAGEEARLFSGDVASALRSTEHVRNSPVHSNAFKF

SEQ ID NO: 53306 - protein, 147 aa, Zea mays
  Coding DNA Sequence Number=SeqID_11527
  Gene Ontology: Mol. function=protein tyrosine phosphatase activity; Biological process=protein amino acid dephosphorylation
  Homolog annotation: Hit_ID=UPI00006A0C02; Match level="QueryCoverage =72%, HitCoverage=74%, E-value=2e-26, Identity=58%"; Hit description =UPI00006A0C02 related cluster
MNAAAASSAPDAAAAATGEEGAKEAVDVLVQYVVLRRDLADAWPLGSVVAQGCHAAVAAVWAHRDHPDTAAYCAPDNLDRMHKACSTVTLEVKGETQLNNLAEKLAAAGVRHKLWIEQPENIPTCIATAPCPKSQVSSFFKKLKLCK

SEQ ID NO: 53307 - protein, 275 aa, Zea mays
  Coding DNA Sequence Number=SeqID_11528
  Gene Ontology: Mol. function=monooxygenase activity; Cellular component=integral to membrane; Biological process=electron transport
  Homolog annotation: Hit_ID=Q10S01; Match level="QueryCoverage=80%, HitCoverage=55%, E-value=4e-26, Identity=53%"; Hit description =Cytochrome P450 family protein, expressed
MDPVLLLLEFFTSLCFLALSPGLAANLHHFHDWATALLAGTGYNLEAKRRPRPAVLRHLRVCDPANVRHIFTSNFANYPKGHEFAEIFDVLGAGILNSDGESWRRQRRRHWVPGVRAAGGSLHARHGRCAGDDFPPPRHPHGVLEADEKAECWAREKVGCRRRTIDGFVSEMIARARRRADRVDEGASLLSSVLCHGNTAADEESTDKFLRDTTVNLLFAGRDGPATGLSWFFYLVSKNPRVGAEAPRRVVRCRCFLQGWCRLRRGHQRQWHGDC

SEQ ID NO: 53308 - protein, 158 aa, Zea mays
  Coding DNA Sequence Number=SeqID_11529
  Pfam annotation: Domain name=DnaJ; Domain location=52-85; Score=-7.4; E_value=0.023; Accession=PF00226.21; Description=DnaJ domain
MARAAASRLAAVANSSSTRELFARHLAAAAASAWTAPPRLPEPATRRVYTRDYYDVLGVSKDASAPDIKKAYYAMFNHKNSTNYPIVPVQPWYCGDLIIGDDLDLPPGAELGLITSSNDGLGMLFGSSSPFCLISKQALSLRRFTRDKLVGLIELSSS

SEQ ID NO: 53309 - protein, 124 aa, Zea mays
  Coding DNA Sequence Number=SeqID_11530
MATTADTVFRADAPCMLSPNDSLDNAKVTEAIGIRLPDIGRAIRGDIALPIFGFVIGLTGGISGRDLKEHLGRLQQSSDSRRAAMNEMMRAAEVAADENMSTMHLINHRWVREVQKQQLGGSSV

SEQ ID NO: 53310 - protein, 310 aa, Zea mays
  Coding DNA Sequence Number=SeqID_11531
  Gene Ontology: Mol. function=sequence-specific DNA binding; Cellular component=nucleus; Biological process=regulation of transcription, DNA-dependent
  Homolog annotation: Hit_ID=Q2QX57; Match level="QueryCoverage=39%, HitCoverage=31%, E-value=7e-11, Identity=36%"; Hit description=GATA zinc finger family protein, expressed
  Pfam annotation: Domain name=GATA; Domain location=92-127; Score =48.9; E_value=1.7e-11; Accession=PF00320.17; Description=GATA zinc finger
MASDEPQSQLTGLGDPKASRSDAATMVTTGGAGDGEEVMGAESPLDFVLVGTPWGLLLAPTPLASMKQDEEEVSAPPCPEKTPAAANGAKQCVQCGATETPQWRIQPTGQGALCNACRIRLRPAEALREKVHVHAHRPSAPALGPATSTAISEPPADGWISGAWMDFDAHLLKVTPPPPARRQESPSPTTEPAPEKKTRKRKPSTRRCQAASTAASRRFEFDSCRNTARRRALTSSMSGSEHACKRREAIQLRQRKHRGKEQHQAPEPGAGDGMEQRASTCLRHRHRRQRRLFDGPAPPPPLIDDDDFVD

SEQ ID NO: 53311 - protein, 225 aa, Zea mays
  Coding DNA Sequence Number=SeqID_11532
  Homolog annotation: Hit_ID=Q6QP54; Match level="QueryCoverage=52%, HitCoverage=35%, E-value=2e-07, Identity=45%"; Hit description =Putative kinase
  Subcellular localization annotation: CTP_CleavageSite=72; ConfidenceScore=5.37e-01
MAPPVTWSVRALGWARRRLLRGRGRVCLLRSRSSPSPWVGRDGDRRLRPRSSPSPGSGEAEFVVFRGRGRVRALGRARRSSSSSGAEPESEPWVGQGGVRRLPGPSPSPSPGSGEAEFLMAPEAGLGRCQPHSIEWHSSRSDAGDAVFLSDWIRCQATLALNAPAIRSVVVAIWPRLLLGEDWASGEPKLCANGGYPLRLGVLGVPLIMVPDTEAHLLLGGSRQL

SEQ ID NO: 53312 - protein, 112 aa, Zea mays
  Coding DNA Sequence Number=SeqID_11533
  Subcellular localization annotation: CTP_CleavageSite=66; ConfidenceScore=5.36e-01
MTPAHAPSSLLRALLVPHAHPLPHFAQLHPLSRSAHAASRRRRPAPAFLSIHLVGGRSKPPRAPPRDNEQSEVPECVVGDLPEQSPGEGKCPLTPLCPTYFMIHCPTLLYET

SEQ ID NO: 53313 - protein, 256 aa, Zea mays
  Coding DNA Sequence Number=SeqID_11534
  Homolog annotation: Hit_ID=Q8S136; Match level="QueryCoverage=48%, HitCoverage=48%, E-value=5e-40, Identity=62%"; Hit description =Putative uclacyanin 3
  Pfam annotation: Domain name=Cu_bind_like; Domain location=36-116; Score=119.9; E_value=7.2e-33; Accession=PF02298.8; Description =Plastocyanin-like domain
MGKMKAVACVACWAALSLINVVMAVDYVVGNPAGGWDGRTDYQSWAAAETFAPGDTLTFKYNSYHSVMEVTKSAFEACTTTDPILYDNSGSTTVALTMPGTRYFICGAPGHCLGGMKMQVQVADRPAPTTPSSPPPPPAHAKQKRHATAPSPTPMPWAPAPTPWSPAPAPAAAPPRRAGHKKKHKKRYCPPETVHAPARAPTPTVQAVEADFPFAAFAPMTAPPPPPPTSGGLAWRRATCGEATAALAALVWFMLL

SEQ ID NO: 53314 - protein, 112 aa, Zea mays
  Coding DNA Sequence Number=SeqID_11535
MSYSCSRRSAVSQYPVTPLRTLLDKLFSGDSPYVGFPPEHTTTGVMTRIDLVYNVNISAFGNHVTFVIESGENLTNNFDVLNVGGFVLYSWSWQRQGCEEQMDYDGCSGEEA

SEQ ID NO: 53315 - protein, 925 aa, Zea mays
  Coding DNA Sequence Number=SeqID_11536
  Homolog annotation: Hit_ID=Q0IEN4; Match level="QueryCoverage=50%, HitCoverage=57%, E-value=3e-29, Identity=26%"; Hit description =Breast carcinoma amplified sequence
  Pfam annotation: Domain name=WD40; Domain location=245-279; Score =0.6; E_value=31; Accession=PF00400.22; Description=WD domain, G-beta repeat
  Pfam annotation: Domain name=WD40; Domain location=422-458; Score =12.8; E_value=1.2; Accession=PF00400.22; Description=WD domain, G -beta repeat
  Pfam annotation: Domain name=WD40; Domain location=479-517; Score =3.9; E_value=13; Accession=PF00400.22; Description=WD domain, G-beta repeat
  Pfam module annotation: Pfam domain module=WD40::WD40::WD40; Domain location=245-279::422-458::479-517
MAASAMLTAEQVPNKALVKKAKRNAMDPKGAAWKPSLGLLRVDCIWGGGSVHGCDSRTGFMRDGAPAPRAGGGFFSARSLSNCMRIVSSGASTAASTLRSAGASLVNSMASHEEDASRDQVQWAGFDKLECGGGLLRQVLLLAYKSGFQVWDVEHADDVRQLESRHDGAVSFIQVLKDPIFTTESGDRFADTRPLLALACEGTHTGSGKNHDTNVPVFDGTNGAFHSIGGENLPTVLLFYSLRTHEYVHTLRFRSAVYSIRCSPRVVAISQATQIHCFDAATMEREYTVLTSPTVAQVSGYGPLGLGPRWIAYSGNPVPVPDTGRVSPQLLSLSPSVPPPGSNGSVVAYYAKESSKQLAAGIATLGEVGYNKLSKYYADFIPNGNGTIKQRSSVYKANGVTNGHLIDSEYAGTVIVRDIVSKLLIVQFRAHTSPISALCFDPSGTLLVTASVHGQNMNVFRIIPPHGTSEAGQIGTYVHLYKLQRGITNAIIKDISFSDDSDWIMISSSRGTSHLFSISPYCGSTRFRYSDNNPVENDYTVDSSVNHTAHWSQNSATSLSLSQKTLFVSGPPVTLSVVSRIRNGSNVFKGAVHGAAAFATGASTPISGAIASTFHNRMAGDIDSDGSLRMKYYLLVFSPSGSIIQYALHLSAEQDSGLDFRTSPISYGPERETDTKFVIEALQKWDVCYKRNRRDSAESFAYSDFENGENNKLLLKAMWKGTSIYPFDCSVERQKLSADENRNLYISQSELQTHVVQTPLWSKSRIHFQVMEGETLEADNADVISGEVEVEKVQTHNIESRSKNLIPVFDSLHTSRFQQTRLNAPDNSRCGLLQRQKSGISEDGRLSRRSSCSSLDCMSEGPKSSDDGAFSKYVVDDNSSAVINNPSVKFHAELVNNTGSLKSEAQLGFVNSEEDGGGGEQLPDL

SEQ ID NO: 53316 - protein, 88 aa, Zea mays
  Coding DNA Sequence Number=SeqID_11537
  Gene Ontology: Mol. function=structural constituent of ribosome; Cellular component=ribonucleoprotein complex; Biological process =translation
  Homolog annotation: Hit_ID=Q2R4A1; Match level="QueryCoverage=70%, HitCoverage=31%, E-value=7e-23, Identity=80%"; Hit description=40S ribosomal protein S5, putative, expressed
MALAEVNDISLNDYLVVTAAKHATFLPHSAGRYSKKRFRKAQCAIVERLTNLLMMHGRNNGKKVMAVYTYVAYNNSKIWKQNNCPILG

SEQ ID NO: 53317 - protein, 572 aa, Zea mays
  Coding DNA Sequence Number=SeqID_11538
  Gene Ontology: Mol. function=steroid hormone receptor activity; Cellular component=nucleus; Biological process=regulation of transcription, DNA-dependent
  Homolog annotation: Hit_ID=Q1SFD4; Match level="QueryCoverage=76%, HitCoverage=92%, E-value=1e-74, Identity=50%"; Hit description =Steroid nuclear receptor, ligand-binding
VPVGFLGKLWSFVSFVPFFVLLLLLGSIKAALVGPVTASIVFFGSSAVIIGLWPAHFIWTYYCVLKTERIGLQLKILTGLLLPLPLLLLPVLASIGSLLGGTGYGVCVPLMATFEAVGEGVTDKLTHCFTDGTVSAMAGACTVVRDVTDFCFHSYFSFMDDLIDKMGDNEEAPLDINGCAADKRSGFVEKPLHVVQRMAEEASFQMGLAYMISAVAIFDEYTNDLLYLREGSCLPRPKYRRADIMRECETEPAERQQTGHHKHRRTLPRSKTFMQTVQRLRPIQIWDWFFRSCELNGRILLSEGLITAQDMEQYITNGKCKKLDTKLPCWSPPLSLFHLSVFTHMLPVADHVQVTTLNWPKDRVLDWLLGPLLLIKDQMKKLEVTEDEEMCLRKLIMTSKNEKPSDWDDSGFPSDDNIKRGQLQSIIRRLQGIVAYMSRVPSFRRRFINLVKAMYLEAIEAGAIDGSRKVKADVADSLNDVWLEYEYGVVRQEPASGHEFFMQKSCEWFLPTSPVAPRPLPCPALDLGLQSSLPPRLARPVSLRPRLIATVKLAADPRPPPLGRLAAPRVVT

SEQ ID NO: 53318 - protein, 100 aa, Zea mays
  Coding DNA Sequence Number=SeqID_11539
MSKFLIIELNRTMCSGTNEGLDGRLERVRRGEVRFDAGVDAEANGVVGLADLPLHVAALHLLRNSASFSVATCEKPRTLAFFLCGTIHTCAFTFALLYGL

SEQ ID NO: 53319 - protein, 91 aa, Zea mays
  Coding DNA Sequence Number=SeqID_11540
MTRGGGGDTKSFYRQQKTHAAAAAAATAATTKPTGGVSKKAAVHHHKKAALATNVHPAPDENQMYSSFCGLLTIYLEYLFQNPHKVTVGAK

SEQ ID NO: 53320 - protein, 906 aa, Zea mays
  Coding DNA Sequence Number=SeqID_11541
  Gene Ontology: Cellular component=protein complex; Biological process= multicellular organismal development
  Homolog annotation: Hit_ID=Q5Z876; Match level="QueryCoverage=88%, HitCoverage=45%, E-value=0.0, Identity=78%"; Hit description =Proteasome activator subunit 4-like
MVAVVKEDTHRDYGGTGRRRRHQGWWDTVGSAGSGGVRWKSSGKGGQETGSRRATCEGNGGATMAEGGGWGGSRAGGEPGGDCGWKGRRERKLALVYLLKPKSLAFEYFEKLINFLEQFYHPSNGGRWTYSLERFLRYLVVYFEKRLQHEQFVMAVEDHDQSYLGKEERSVFVKAILKLLDRGQYSKDNSLAETVSVATSILSYIEPTLVLQFVAKNFQRALETTTATHQLKNAVTSVAFSGRALLLCSLCSSQNDDSSVVDSFSDLVVASLSNALLGMDANDPPKTIATMQLIGSIFSNLAAVSDDVPILLQSTTLSNWLDEFFSRLFSVLHNLESSSPINEGYQSSFMSGTFLVDSPYYFCMLEILLGKLSKPLFNQSLKRIAKFVNANILPGATSEVGLLCCACVHSYPEEASVYLVKPILETIMSSFEGTPTTGYVGRVVADKASTKAALSPALETAIDYYLRVLAISISYAGPTLLNYKEELNHIITSAFQSPSWKVNGAGDHLLRSLLGNLVSYYPIDQYKPFTCQPIGNIIEPWGCSKAHQDREDEMLNFPPKWHDPSHDELSFANELLQLHFQSALEDLLTICQTKVHSDTEIRPSYKDGRSLEVESAFFIAGSAGSTVGSSEMREKAAEFVHIACRYLLKERTDDSILLSLVVRVIDALVNYVSCVGSLEYQEWSSHVQAWKLESASIIEPPCNFIVPFHAQGKKRPRWALVDKANLHSTWRCSQSSYHRYRMNADVSPSVPMINLMNDLLDLSLHNYETVRSYAGRSLTKLLKRWPSLISNCVLTLTGNLRDPKAPEHVVLGSCSILISQTVLRHLTTDSVSLSSFIMGILESSHHESLKCQKAITELFVTYNIRFSGISRSFFKTPENQADKPGFLSLISQINALGFETNGLHWR

SEQ ID NO: 53321 - protein, 258 aa, Zea mays
  Coding DNA Sequence Number=SeqID_11542
  Gene Ontology: Cellular component=protein complex; Biological process= ubiquitin cycle
  Homolog annotation: Hit_ID=Q5Z876; Match level="QueryCoverage=85%, HitCoverage=19%, E-value=1e-48, Identity=58%"; Hit description =Proteasome activator subunit 4-like
  Subcellular localization annotation: CTP_CleavageSite=43; ConfidenceScore=5.69e-01
MALSSFPISLSPFHSGASFHTTPDPRTVSLPHSHNPTSPSSIVAKVREAIGIAMCVTTSNMRLSGLFGTGCSPQGLHGDVSMIEQTGNKYWSERLTDGANELAIFHFMIASLKSGRSSVLLDTIIRLVYPILSLQVREHAAGVLASLMKGIDEDLSKDFRERSYAQAQHIFVARRRNLKFSVGTIHGAVLALTASVLSVPYDMPSWLPSNVSLLARFIREPPPIRSTVTKAVAEFKRTHADTWSIQKDAFTEDELEAS

SEQ ID NO: 53322 - protein, 142 aa, Zea mays
  Coding DNA Sequence Number=SeqID_11543
MSVKETEAPTGTWKMVVSGMKVGQGLTSRGLGGGCALGQGGGGAIRWASPEKGVVLLPHVGVEAALPVEQESTGPARSTGRRVTTSLPRAEVAAPIGGGSDVHGGGHDLGESDAGVLEPNVAGVTRKPTASLKIMASGTAQR

SEQ ID NO: 53323 - protein, 244 aa, Zea mays
  Coding DNA Sequence Number=SeqID_11544
  Homolog annotation: Hit_ID=Q8MW55; Match level="QueryCoverage=41%, HitCoverage=11%, E-value=4e-08, Identity=41%"; Hit description =Precollagen-NG
MTGAPVRQTPNWTPLNHFPSLNFTNEALHQLVHEDSRRLRHSDCGATRKSESDRQSGLARGAIGNSAPPDPRARTRAKTRKTANSAPPDPRARTRAKTRKTANSAPPDPRARTRAKTRKTANSAPPDPKARTRAKTRKTANSAPPDPRARTRAKTRKTANSAPPDPRARTPPWPLPNDFRLARPRGSDSASATEGRFDPSFGGAPTSPGLGVVMRRMVFDYDYGIGEDEAVEGDFQEFQDYDEF

SEQ ID NO: 53324 - protein, 40 aa, Zea mays
  Coding DNA Sequence Number=SeqID_11545
MAVSPPIWPPSTPVLGPPRAASIDLCCEQQPRSDVVASEK

SEQ ID NO: 53325 - protein, 137 aa, Zea mays
  Coding DNA Sequence Number=SeqID_11546
MGKDKKSQSSPHRSSNKRKREPSPSSEDFGDSKYSEEEFSSESEGSPVYASPRHSRRARGLDESEVSSDEENSSDSSEEGSGGDGNDEGDGGDGGDGSDSGRRDDGGKGGDDDNDKGGDNGKGGRSSSKASGKAPLA

SEQ ID NO: 53326 - protein, 139 aa, Zea mays
  Coding DNA Sequence Number=SeqID_11547
  Homolog annotation: Hit_ID=Q8SA91; Match level="QueryCoverage=91%, HitCoverage=5%, E-value=3e-16, Identity=36%"; Hit description =Putative gag-pol polyprotein
MGHDIRRCALMDVDVKLRTGPLYHILCVSSAGAAASEHLFAFGATGRLSVWFFAWLTGRKRLQTGNNLLRKCIVLDTSCAICGADLEDASHILLRCRFTRMFWDHIGVIVPNNASLGLLRPPPPEGVPHAHAAVLLDVM

SEQ ID NO: 53327 - protein, 363 aa, Zea mays
  Coding DNA Sequence Number=SeqID_11548
  Homolog annotation: Hit_ID=Q6QP51; Match level="QueryCoverage=19%, HitCoverage=30%, E-value=8e-15, Identity=72%"; Hit description =Putative growth-regulating factor 1
  Pfam annotation: Domain name=Extensin_2; Domain location=17-348; Score=-134.7; E_value=0.048; Accession=PF04554.4; Description =Extensin-like region
MTSGQTLLRQGPRPRPHSRGEDKLLKPKSRRDRERGYSERDPSPRRKQAPSPPTDQRFEGWPLRRVRQPPQSTQAPRLLLIRGSKAGPSEGFDNRLRPLGLRAHYWSEEAPPRPTPGLGLNLDLERRTSPRPTPGLGLYLDLGRRTPPRPTPGLGLNLDLGRRTPPRPTPRARTLPRPRTTVSASPRPPGLGLYLDLGRRIASPDPQGLGLYLDLGRRSPPRPTPRARTLPRPRTTVSASPDPQGSDFTSTSDDGLRLARPPGPDSASTSEEPPPRPTSGLDRPRHRGAIITLPLASSGYGEQDQRPIWLAPVKQVMMAPRMLHDDGGSQPLTEARRRQQGSDSPDSCTSTGLKRSSDGHDIT

SEQ ID NO: 53328 - protein, 365 aa, Zea mays
  Coding DNA Sequence Number=SeqID_11549
  Pfam annotation: Domain name=Extensin_2; Domain location=21-353; Score=-121.7; E_value=0.014; Accession=PF04554.4; Description =Extensin-like region
MDGRQAPKSRRDSLDAALGSSASPDPQGLGLNLDLGRRTPPRPTPGLGLYFDLGRRTPPRPIPGLGLNLDLGRRTPPRPTPRARTRPRPRTTVSASPDPWGSDSTSTSDDGLRLARPPGLVLYLDLGRRSPPRPTPGLGLYLDLGRRTPPRLTPGLGLNLDLERQTPPRPTPRARTLPRPRTTVSASPDPRGSDSTSTSDDGLRLARPPGLVLYLDLGRRSPPRPTPRARTLPRPRTTVSASPDPQSSDSTSTSDDSLCLARPPGPDLASTSKEPPPHPTSGSDRPRHMGAIITLPLASSGYREQDRRPIWLAPVKQVMMAPRMLHDDGSSQPLTEARRRQQGSDSSDSCTSTGLKRSSDGHDIT

SEQ ID NO: 53329 - protein, 194 aa, Zea mays
  Coding DNA Sequence Number=SeqID_11550
  Gene Ontology: Mol. function=GTP binding; Cellular component =intracellular; Biological process=small GTPase mediated signal transduction
  Homolog annotation: Hit_ID=Q9ZPX1; Match level="QueryCoverage=99%, HitCoverage=100%, E-value=7e-82, Identity=78%"; Hit description =Probable ADP-ribosylation factor At2g18390
  Pfam annotation: Domain name=Arf; Domain location=2-186; Score=312.1; E_value=1e-90; Accession=PF00025.11; Description=ADP-ribosylation factor family
  Pfam annotation: Domain name=MMR_HSR1; Domain location=17-128; Score =18.8; E_value=1.9e-05; Accession=PF01926.13; Description=GTPase of unknown function
  Pfam annotation: Domain name=Miro; Domain location=18-128; Score =22.7; E_value=3.4e-05; Accession=PF08477.3; Description=Miro-like protein
  Pfam annotation: Domain name=Ras; Domain location=18-188; Score= -72.8; E_value=0.0008; Accession=PF00071.12; Description=Ras family
  Pfam module annotation: Pfam domain module=Arf::MMR_HSR1::Miro::Ras; Domain location=2-186::17-128::18-128::18-188
MGLLSIIRKIKRKEKEMRILMVGLDNSGKTTIVLKINGEDTSIISPTLGFNIKTIKYHKYSLNIWDVGGQKTIRSYWRNYFEQTDGLVWVVDSSDIRRLDDCRAELHNLLKEERLVGASLLVFANKQDIQGALKPDEIAKADSPSIFFQVLNLEVMDRSRHWKIVGCSAYTGEGLLEGFDWLVQDVASRIYVLD

SEQ ID NO: 53330 - protein, 55 aa, Zea mays
  Coding DNA Sequence Number=SeqID_11551
MEFLRGRGLRGGMWASHDLGRFGAVIAAAAETKPLHLYYIHRAARSRAITVHEID

SEQ ID NO: 53331 - protein, 362 aa, Zea mays
  Coding DNA Sequence Number=SeqID_11552
  Homolog annotation: Hit_ID=Q8LLW2; Match level="QueryCoverage=26%, HitCoverage=22%, E-value=2e-08, Identity=48%"; Hit description =Receptor-like kinase Xa21-binding protein 3
MSATAVVLAHKNSWPRDAAALDRVQAAAAAELAEHSDACSHVVLLPEVELAVVKLLLVVDERHQRERLLPVPLPLPGLALDAAYHGDRPSVFLSHSQVAGRKRTATAAVAGDGVVERTVETTTSLAAVKAWQGFRPVRQRQRRPQRHGATPRRHMQGRPDYVQVLLENDAIVSALTGSYSGVASPLNFISELDPEAKALLEVALTDANRERERRRSSRAPSILSRRHLPLASTRTMPLTKRPQSISRLLVSRASPGTGNKADDSSLQLVRRWSSRRSHNLSDVGSFKGPPWSGPSPGSGEVKATKDTLLTPKDVQLEGDSRLASLSIGQMDVTVSHHRLGGGDAPPGVQGALEAAGVTILLV

SEQ ID NO: 53332 - protein, 98 aa, Zea mays
  Coding DNA Sequence Number=SeqID_11553
MTSSGGCAGSTRNAEATQPELQRSPPLCSRSSQPMRPHHIWQLTLLAASKTTTAKAKADASISTAVDAISCWAMLAQSALPQLEDLQGASSTKITGNY

SEQ ID NO: 53333 - protein, 121 aa, Zea mays
  Coding DNA Sequence Number=SeqID_11554
MVEGLLDMNPGEILDPFGSLVGPLYVAQIVGGKWSFGARLDGSTGDGLRRWGRPPLVRDLLRSAIGGGRQPMNRRSRYQWPRLEDRANLTRAYLRHSIMIVRAGLHSVVLNPSHRPVRLYR

SEQ ID NO: 53334 - protein, 116 aa, Zea mays
  Coding DNA Sequence Number=SeqID_11555
MVEGLLDMNPGEILDPFGSLVGPLYVAQIVGGKWSFGARLDGSTGDGLRRWGRPPLVRDLLRSAIGGGRQPMNRRSRYQWPRLEDRANLTRAYLRHSIMIVRAGLHSVVLNPSHRP

SEQ ID NO: 53335 - protein, 88 aa, Zea mays
  Coding DNA Sequence Number=SeqID_11556
  Subcellular localization annotation: CTP_CleavageSite=75; ConfidenceScore=5.47e-01
MALAAGAQRFRVPVPHNKILWCYSNRSSLTNVVTGFLPADGSSSDGVPRRRGSEATTASDGVVAEIPLPISVAISSSEFDADGGGGIA

SEQ ID NO: 53336 - protein, 88 aa, Zea mays
  Coding DNA Sequence Number=SeqID_11557
  Subcellular localization annotation: CTP_CleavageSite=75; ConfidenceScore=5.13e-01
MALAAGAQRFRVPVPHNEILWCYSNRSSLTNVVTGFLPADGSSSDGVPRRRGSEATTASDGVVAEIPLPISVAISSSEFDADGGGGIA

SEQ ID NO: 53337 - protein, 383 aa, Zea mays
  Coding DNA Sequence Number=SeqID_11558
  Gene Ontology: Mol. function=metal ion binding
  Homolog annotation: Hit_ID=Q75KP7; Match level="QueryCoverage=65%, HitCoverage=66%, E-value=8e-48, Identity=45%"; Hit description =Putative RING-H2 zinc finger protein
  Pfam annotation: Domain name=PHD; Domain location=152-198; Score=0.7; E_value=0.049; Accession=PF00628.19; Description=PHD-finger
  Pfam annotation: Domain name=zf-C3HC4; Domain location=153-195; Score= 24.5; E_value=0.00037; Accession=PF00097.15; Description=Zinc finger, C3HC4 type (RING finger)
  Pfam module annotation: Pfam domain module=PHD::zf-C3HC4; Domain location=152-198::153-195
  Subcellular localization annotation: CTP_CleavageSite=94; ConfidenceScore=5.24e-01
MAPTPPTSTRPRRHHTILRPPLALALALAIVRPASPQLLQPPPGATVSSAFSPPPSPPVDGVGGRFAVTTSLLFVGLIVALFLLGFFSAFLRRRCGAGADTRGRGGGGGVGSLAASAGAAAGAGLDAAAMEALPVLTYATARAVRAGRGALECAVCLSAFDAAGEKLRLLPGCCHVFHAACVDAWLAAHVTCPVCRADLSDPAVAAAGHVLAADLAADTVVVVNVVDGPAAPAAEAAGQDATPSETAEDRFTLRLPERLRREIDEARRLRRALSASTALPSGGPLASSAAAPRTMSAARPSRRWSGLLRALSGSRRVSEPDGHWRVVPLPTGAGNGEVVQEQDDVDKYFSLTFAGFVIDGDVAAVDWHPEVFHVSTGVPAAQR

SEQ ID NO: 53338 - protein, 191 aa, Zea mays
  Coding DNA Sequence Number=SeqID_11559
MTTNQKISPADALAVNGEARGTQGTRNHAKGQNDARRAEAAPGAGPEPPGTRRGPEAAPGPRWASRGRAGGAAAGRGAGGGPPRAGEQGTERGRRARAGAGEAARRRAGGGGGIAAAGRGAGGAAAREQGAGGAAGEQGSGGKGRRCGQGAGGVAREQGKGRARVGEEEEEGEGERERRRGGELTSGSKFR

SEQ ID NO: 53339 - protein, 102 aa, Zea mays
  Coding DNA Sequence Number=SeqID_11560
MNTNFLDDLSSSCIDSHCKLGARHAAVPEPNAAVPEPNITVSEPNAALLEANAPVPEPNAAVPEPNPGRFYLSLSLNGITASVYYPQWDHCQCLLSLLGYRS

SEQ ID NO: 53340 - protein, 88 aa, Zea mays
  Coding DNA Sequence Number=SeqID_11561
MGSTSEKMYLCQDRLDVGLLTEDPLTGHMPRHGGGPSSSDLVGAGKEVIELQAGYPTPVATPSDGFPRENLRYTLGRGAKQMTYEPIT

SEQ ID NO: 53341 - protein, 112 aa, Zea mays
  Coding DNA Sequence Number=SeqID_11562
MALKASCQRFRKFCLLHRTFPFSWVMWTLAGSSQLAAADLSVRCLAINIMLGQASQRFAPMCLGPRRWMRRMHPDPVRSADDKDADAQLPSRPSCQPACCLPRCSATPQLGS

SEQ ID NO: 53342 - protein, 253 aa, Zea mays
  Coding DNA Sequence Number=SeqID_11563
MVKEKKRKQHPANSALPLGDEGEGICGRKARKEKAEATLPSQIKNKDKCREVHAKLKCLQPSERQVPRTIENTREPDETVCQPDETGPKESITGGTSSPSGLTLSSIGPVARRVGEAREVHTEAGHAAPAPALGESGGVNAADSTARPLGPRPPATRTRRWEVLPFPTGVGGGNRRWRQAGLGFGLGRAGYTPRQGANGEKEEETMRDVDGDRMSSHCRGERAQFAGWVSRGGGTVKPWWTPSLRPYRVVKIS

SEQ ID NO: 53343 - protein, 447 aa, Zea mays
  Coding DNA Sequence Number=SeqID_11564
  Gene Ontology: Mol. function=protein serine/threonine kinase activity
  Homolog annotation: Hit_ID=Q337P5; Match level="QueryCoverage=95%, HitCoverage=57%, E-value=2e-60, Identity=34%"; Hit description =Pleckstriny domain-containing protein, putative, expressed
  Pfam annotation: Domain name=DUF1336; Domain location=247-437; Score =382.3; E_value=7.4e-112; Accession=PF07059.3; Description=Protein of unknown function (DUF1336)
MGLLFAGRKVFRGMRKRDLLLRRYWRREDDGTYGGGYVISPVNQGRQSVVKHMLAIDWKFWKSYLFTSSAKYITIRMLGRVAALREFFRAKNGNCSCMEFSSGELTRDTGLPQGENQRINLEMQQENENGRLEGPTEGSLGGSNRHLSSTGSFVQLNDAADEFFDVPDESEYDQREVMFPSDESLHAADQRHAKLSTAAVFVKRLHDLAVQKRGYIDLQGAADADNGPCCYGYTLPKDSSYTVPSTWAMTDPTTFLIRGETYLHDRIKIKANSTLMQMVGADWIKSDKREDDLAGRPGGLVQVPGSTTYSLALYYMMDTPLEKVPLLERFVNGDDAFRNSRFKLIPYISKGSWIVKQSVGKKACLVGQALEINYFRGRNYLELGVDIGSSTVARGVVSLVLGYLNNLVIEMAFLVQGNTNEELPEFLLGTCRLNYLDASKAVSIDEC

SEQ ID NO: 53344 - protein, 434 aa, Zea mays
  Coding DNA Sequence Number=SeqID_11565
  Gene Ontology: Mol. function=catalytic activity; Cellular component =integral to membrane; Biological process=response to nematode
  Homolog annotation: Hit_ID=Q9AV45; Match level="QueryCoverage=81%, HitCoverage=98%, E-value=1e-148, Identity=78%"; Hit description =Putative phosphate translocator
  Pfam annotation: Domain name=DUF6; Domain location=180-347; Score= -0.8; E_value=0.073; Accession=PF00892.11; Description=Integral membrane protein DUF6
  Pfam annotation: Domain name=TPT; Domain location=205-347; Score =167.0; E_value=4.6e-47; Accession=PF03151.7; Description=Triose -phosphate Transporter family
  Pfam annotation: Domain name=UAA; Domain location=81-353; Score= -165.3; E_value=0.037; Accession=PF08449.2; Description=UAA transporter family
  Pfam module annotation: Pfam domain module=DUF6::TPT::UAA; Domain location=180-347::205-347::81-353
CPLRSLDLLPRQCQRYRVRASVYPEKVNAVSFMASSAPAGGKSPAVGGEEMSDGAGSRTGVAGALGLSVTSSVAIVICNKYLISTLGFFFATTLTSWHLMVTFFTLYVAQRLRFFEPKPIDARTVISFGLLNGISIGLLNLCLGFNSVGFYQASMTKLAIIPFTIVLETLFLSKKFSQSIKASLMVLLLGVGIASVTDLQLNLLGSIIAVLTIAATCVGQILTNQIQRRLKVSSTQLLYQSSPYQSAVLLVTGPFVDKLLTKRDVFAFSYTTQVVVFILLSCSIAVCVNFSTFLVIGTTSPVTYQVLGHLKTCLVLSFGYIILKDPFSARNVVGILIAIFGMGLYSYYSVVESRKKTEDASSLPVAAQMSEKDSAPLLGAKSSPRTENKAEETFDYMPRTAKSAFTGRSGLFFRLENLYHGAGGPDFGPIPHQE

SEQ ID NO: 53345 - protein, 280 aa, Zea mays
  Coding DNA Sequence Number=SeqID_11566
  Homolog annotation: Hit_ID=Q6QP51; Match level="QueryCoverage=71%, HitCoverage=99%, E-value=2e-43, Identity=44%"; Hit description =Putative growth-regulating factor 1
MTQQCQLSATITGQSAVGAGTAVDMAKSELAITAATDERKQRVRPAGSSSRPSALGPPSPPTDQGFEGCTLRGPAAAPEHSGPPPSPPTDQGFEGCALRGPATTPEHSGSAPITDQGFKGWPLRRARQPPQSTRAPRPLLIRGSKAGPSEGFDSRPRARRVRDDPGYVRYMAEARATLPSTARPAPAAVPTTRVKPTTAKFSLGRNRKLRLARPQASASGGDLCLARPQGSASASASEESRPRPTLGLDPSLGLGGAAASHDLRLRSTTPQGIHHYPTPS

SEQ ID NO: 53346 - protein, 541 aa, Zea mays
  Coding DNA Sequence Number=SeqID_11567
  Gene Ontology: Mol. function=transferase activity; Cellular component= membrane; Biological process=electron transport
  Homolog annotation: Hit_ID=Q7PC76; Match level="QueryCoverage=94%, HitCoverage=97%, E-value=1e-140, Identity=47%"; Hit description =Cellulose synthase-like A1
MGAAAAGGHALRAVGDVVSFPATVAAFVEALLQGWAEARAGLLVPLLRAAVLLCTAMSLIVLAEKVFLGAVSSVAKLRRRRPGRVCRCDPDEEAAAASQAYPMVLVQIPMYNEREVYQLSIEAACRLTWPVDRLIVQVLDDSTDSVIKELVKGECERWATEEGINVKYETRKDRAGYKAGNLKEGMRHAYVRACEFVAHVRRRLPAAAGLPRQNRPVPRPQPQPRARADTLEVRCPVVNANDCLLTRMQEMSMDYHFKVEQEAGSSLCNFFGYNGTAGVWRTQAIVESGGWEDRTTAEDMDLALRAGLLGWEFVYVGSIKVKSELPSTLKAYRSQQHRWSCGPALLFKKMFWQILAAERVSVWKKWYMVYDFFIARRIVGTFYTFFFFSVLIPLNILLPEAQIPVWELIYIPIAITLLNSVGTPRSIHLVILWVLFENVMALHRFKAILIGFLEADRANEWIVTQKLGNLQKLKSIARLTGSYRFKDRFHFLEVFIGLFLLASACFDYLYRDDYVYLFVLPQSIMYFAIGFQFVGLNVSED

SEQ ID NO: 53347 - protein, 369 aa, Zea mays
  Coding DNA Sequence Number=SeqID_11568
  Gene Ontology: Mol. function=ATP binding; Cellular component =membrane; Biological process=anion transport
  Homolog annotation: Hit_ID=Q6Z2T4; Match level="QueryCoverage=99%, HitCoverage=100%, E-value=1e-145, Identity=70%"; Hit description =Putative ATPase
  Pfam annotation: Domain name=ArsA_ATPase; Domain location=70-369; Score=188.3; E_value=1.9e-53; Accession=PF02374.6; Description=Anion- transporting ATPase
  Pfam annotation: Domain name=CbiA; Domain location=72-253; Score= -22.3; E_value=0.0054; Accession=PF01656.13; Description=Cobyrinic acid a,c-diamide synthase
  Pfam module annotation: Pfam domain module=ArsA_ATPase::CbiA; Domain location=70-369::72-253
  Subcellular localization annotation: CTP_CleavageSite=87; ConfidenceScore=5.41e-01
MLATASPHLQAAARRLFLAVPVNQGCSSIRLPRRCFGRYASVRAASVTAPPAKEGADDLGFLEMSSGTRRRYYMLGGKGGVGKTSCAASLAVRFANNGHPTLVVSTDPAHSLSDSFAQDLSGGTLVQVEGPDSPLFALEINPEKAREEFRTVSQKNGGTGVKDFMDSMGLGVLVEQLGELKLGELLDTPPPGLDEAIAISKVMQFLEAQEYSMFSRIVFDTAPTGHTLRLLSLPDFLDASIGKILKLRSKIASATSAIKSVFGQEVQQQDAANKLEQLRERMVKVRELFRDTESTEFIIVTIPTVMAISESSRLHSSLQKESVPDQTRALDMIRTDPELKGLNIIQAPLVDMEIRGVPALNFLGDILWK

SEQ ID NO: 53348 - protein, 153 aa, Zea mays
  Coding DNA Sequence Number=SeqID_11569
MPLWTAAHHRRLLGCGSPSPAAPPIDADTSCNTASCVRNEILCSYFREVTVDESLTCGPDLELDSRVIDGKLQIAGYKASKALFSTVACRKNILKPGVGIGPNNFKYYASEDEAAEALPAEDNSMDAVIGALLTDATSPGKQDTASEMLGSRA

SEQ ID NO: 53349 - protein, 254 aa, Zea mays
  Coding DNA Sequence Number=SeqID_11570
MASPLLKSHSQLAAAAALHSVRRADRCPATIHLGKFHDHGLRSGRSKRSGSAKVGAFPSLDVVPLMVTMVEHVDMSRDYVVTKSIWHLSDAALKSVYTFYAMFTVWGVCFFASMKASVCSTTITHTRTHVIALFCWSVHGTACLRAWVKSKQDPFYDSETYRSQGGDGTVHWYYDRVSKHARTFAQRLCLHSKAGSLATDNFADISCNAHWQQEDLEASAREELLREELLEEIEQRVGGLRELEEASKEEQLTK

SEQ ID NO: 53350 - protein, 186 aa, Zea mays
  Coding DNA Sequence Number=SeqID_11571
MALPIGSGNFLGPARIREEGTDGDGGEDKGEAGGSLGGSTKDGGDVPVHANPWLCIGFCSTTSVVPSSRPFSVPYSWTIDSMKQPSWIAQPIAELVRPPTSLMILCLLVLITFRSISHIDKVIHNVYYICTFGLVEGESESAIPTQREQYEGTVHLFIGLLRHLVPLVIGDFSVLRTFYREGDPQQ

SEQ ID NO: 53351 - protein, 194 aa, Zea mays
  Coding DNA Sequence Number=SeqID_11572
MKIEMYGRTIKEDVYYGTTDDFTDYDLSAFSEIHMERHLTDQEIVFINVLARIQANGEPFSISHFLWAKIQLTSEDTWKSLPCAPYIMFIIEQIIGYFFTHNGLDESFRVERSHFTAFVAQAHTLVGLPPIPAPQPHPAYNDISNDDEDEDEDDDEEEEIHLARTKPLHFTSSTYRGGRAIISDDTDAGGGDIP

SEQ ID NO: 53352 - protein, 617 aa, Zea mays
  Coding DNA Sequence Number=SeqID_11573
  Gene Ontology: Mol. function=protein serine/threonine kinase activity; Cellular component=nucleus; Biological process=protein amino acid phosphorylation
  Homolog annotation: Hit_ID=Q2QMH1; Match level="QueryCoverage=94%, HitCoverage=100%, E-value=0.0, Identity=83%"; Hit description=LSTK-1- like kinase, putative, expressed
  Pfam annotation: Domain name=Pkinase; Domain location=38-285; Score =146.9; E_value=5.4e-41; Accession=PF00069.15; Description=Protein kinase domain
  Pfam annotation: Domain name=Pkinase_Tyr; Domain location=38-305; Score=-41.3; E_value=6.2e-10; Accession=PF07714.7; Description =Protein tyrosine kinase
  Pfam module annotation: Pfam domain module=Pkinase::Pkinase_Tyr; Domain location=38-285::38-305
MPLLRPTSLLSAHSSLAPFDFQKRFQGLSADPKRMDQYEVLEQIGKGAFGSALLVRHKVEKKKYVLKKIRLARQTDRTRRSAHQEMQLIATVRNPFIVEYKDSWVEKGCYVCIVIGYCEGGDMAEVIKRANGNHFSEEKLCKWLVQLLMALDYLHANHILHRDVKCSNIFIARDQSIRLGDFGLAKILTSDDLASSVVGTPSYMCPELLADIPYGCCIYEMTALRPAFKAFDMQALISKITKSIVSPLPTRYSGSLLFYSNKNISHNWHMQAAELLKHVHLQPYVLQVQLKSSPSRNMSPIYQALTDKVKKMTFPSDITDSARRVARRNSLGNERTVTFCKPSPERNSISSTRSIKEYTTTQSVKELSVDSSQIDDEVTSKAIRTKTTGILRTPKSTPAKTLTTRNRLDPPKTSYSRTNHSELTSRTPLNKSAVTARRASLPLPTYRAPNSRAASVLDQLDSPDVSVNAPRIDRIAEFPLASSEDPLAPMKKNLSSAPGHDGSCSTPPFINRSITKDKYTVQVLHRGDGDNASDSSGRNATAASSGGSNDSRQQRFDTSSYQQRAEALEGLLEFSAQLLQQERYEELGILLKPFGPEKASPRETAIWLTKSFKETAS

SEQ ID NO: 53353 - protein, 563 aa, Zea mays
  Coding DNA Sequence Number=SeqID_11574
  Gene Ontology: Mol. function=drug transporter activity; Cellular component=membrane; Biological process=multidrug transport
  Homolog annotation: Hit_ID=Q6K7U1; Match level="QueryCoverage=89%, HitCoverage=69%, E-value=1e-155, Identity=59%"; Hit description =Putative pentatricopeptide (PPR) repeat-containing protein
  Pfam annotation: Domain name=PPR; Domain location=340-374; Score=6.4; E_value=1.3; Accession=PF01535.11; Description=PPR repeat
  Pfam annotation: Domain name=PPR; Domain location=375-409; Score =22.8; E_value=0.0012; Accession=PF01535.11; Description=PPR repeat
  Pfam module annotation: Pfam domain module=PPR::PPR; Domain location =340-374::375-409
  Subcellular localization annotation: CTP_CleavageSite=25; ConfidenceScore=5.20e-01
MAYLSSLHHAPYPRLLLHHRYLFFSASSPPPVVTTRRLVPTLACHGRDLLDVMPYRDSRPSGTEGSRAGPGGAPRVTNSSTVRGNATAQEAHMPMWRERTPGTPRTWKKGDRVMLQEHAEGESQEKSWRRGLTRSLESKGPMVRKSWTRDGNGMRAKESGKVGNSRDEGTGRRNACKKMKKPPDGEYAGKLRVELDMCSKRGDVMGAITLYDSAVEEGIKLGQHHYNVLLYLCSSASLGFVQPAKSGNMGSGIASIGPAQKLDPSPSRSLGGSEGDNAYASESHVQDQGKNKADLIPGGLKAQTVSIPVEDELGDYARARGFEIFDKMCSEKERVQMSEAALTAKARMALSMGDSDMAFEIVKQMKGLGLKPKLRSYGPALTAFCNSGNVEKAFEVEAHMLESGITPEEAELETLLRASVVGRRGDKVYYLLHKFRTAVRQVSHSTAELFEAWFRSPTASKVGKRKWDAGAIAKAIENNGGGWHGFGWLGRGKWTVAHSNINENGVCLACGEKLAIIDLDPKETEDFATFVAKLAIKRERKSNFENFQVIYLELLYFGLPGCT

SEQ ID NO: 53354 - protein, 66 aa, Zea mays
  Coding DNA Sequence Number=SeqID_11575
MAPPRPYVAPPSGQPGIGELIAARRSNDRWLRLEVGNVSEEPVTEDPGEQQVEVAEQELIEGKLCP

SEQ ID NO: 53355 - protein, 113 aa, Zea mays
  Coding DNA Sequence Number=SeqID_11576
MLNINAAPPPPVVRHLWCPSDHAEDATEVPRAHSCLPKIPLPQLRPETMPRPHRSSADDRRHGQVIPRLPDDRRMSLEDLHRPRILILRSDLPLRHRNSPSCSQESSAAISLR

SEQ ID NO: 53356 - protein, 260 aa, Zea mays
  Coding DNA Sequence Number=SeqID_11577
  Subcellular localization annotation: CTP_CleavageSite=11; ConfidenceScore=5.10e-01
MGRPDIKNKATQMNQSSTPPSNYLFSKSRVGVFIGNREGWWVPKYCYTPVTCYIPRIFHLTGHCSGWSTVSNERDFVEEFIAYTVWPLAHGWEVGGSIDAGDIDDRKRKSVATRGGVDEGCSKGKVVAIVGASNRFVKELVETCVEPGEVMTLLDLREASSRMLKVTDGEWHKKVPIPMAPSEDNFTSYLARCSKVFPYEQNIGAAVTAVMDKDCQESLRKKRKARCGLWSLNVRQRHSIPARRVPLLPQRFLRLRCWLL

SEQ ID NO: 53357 - protein, 64 aa, Zea mays
  Coding DNA Sequence Number=SeqID_11578
MGKNKKSQGSSHHSSDKRKREPSPPSKDFGDSEYSEEEFSSESEGSPTMEVFVSLSAWDGWGQH

SEQ ID NO: 53358 - protein, 179 aa, Zea mays
  Coding DNA Sequence Number=SeqID_11579
MAASGYSGSAPITDQGFEGWPPKEARGLLSQKPAPAKSLTASTYQPESLGPDRAPGLRPKDSAACATPTAVPLDRVSLTGNQALPKAPRRTPLRPTPRARTRAKTRKTANSAPPDPRARTRAKTRKTANSAPPDPRARTRAKTRKTANFAPPDPRARTRAKTRKTTKLRLARPQGSDSG

SEQ ID NO: 53359 - protein, 55 aa, Zea mays
  Coding DNA Sequence Number=SeqID_11580
MAPRVFFFTADLDLTSREGPRRGGEIVRSFAQGTVNDLQIPPPGRNCKSVSVLSY

SEQ ID NO: 53360 - protein, 718 aa, Zea mays
  Coding DNA Sequence Number=SeqID_11581
  Gene Ontology: Mol. function=RNA-directed DNA polymerase activity; Cellular component=intracellular; Biological process=RNA-dependent DNA replication
  Homolog annotation: Hit_ID=UPI00004C1731; Match level="QueryCoverage =99%, HitCoverage=53%, E-value=0.0, Identity=81%"; Hit description =UPI00004C1731 related cluster
  Pfam annotation: Domain name=RnaseH; Domain location=334-461; Score =6.5; E_value=1.5e-05; Accession=PF00075.14; Description=RNase H
  Pfam annotation: Domain name=rve; Domain location=463-638; Score =96.7; E_value=6.8e-26; Accession=PF00665.16; Description=Integrase core domain
  Pfam module annotation: Pfam domain module=RnaseH::rve; Domain location=334-461::463-638
MKESDQLVTSFITPFGMYCYITMPFGLRNAGATYQRRMNHVFGEHIGRTVEAYVDDIVVKTRKASDLLSDLKTTFWCLKAKGVKLNPEKCVFGVPRGMLLGFVVSERGIEANPEKIAAITNMGPIKDLKGVQRVMGFLAALSRFISRLGKRGLPLYRLLRKTERFTWTSEAEEALGNLKALLTSAPILVPPAAGEALLIYIAATTQVVSAAIVVERREEGHALPVQRPVYFISEVLSETKIRYPQIQKLLYAVILTRRKLRHYFESHPVTVVSSFPLGEIIQCREASGRIAKWAVEIMGKTISFAPRKAIKSQVLADFVAEWVDTQLPAAPIQPELWTMFFDGSLMKTGAGAGLLFISPLGKHLRYVLRLHFPVSNNVAEYEALVNGLRIAIELGVRRLDARGDSQLVIDQVMKNSHCRDPKMEACCDEVRRLEDKFFGLELNHIARRYNETADELAKIASGRTTVPPDVFSRDLHQPSVKTDDTPEPEKVSALLEKAPGCYTHLLVAIDKFSKWIEVRPLNSIRSEQAVAFFTNIIHRFGVPNSIITDNGTQFTGRKFLDFCEDHHIRVDWAAVAHPMTNGQVERANGMILQGLKPWIYNDLNKFGERWMKELPSVVWSLRTMPSRATGFTPFFLVYGVEAILPTDLEYGSPRTKAFDHRSNRTNQEDSLDQLEEARDMALLHSARYQQSLRRYHARGVRSRDLQVGDLVLRLRQDS

SEQ ID NO: 53361 - protein, 66 aa, Zea mays
  Coding DNA Sequence Number=SeqID_11582
MAQNEGSRKNPIENALARAAKVCSVWEHRTVPVRQACSGEQAALGTSTAVYGYNSPDCPVVHRTIR

SEQ ID NO: 53362 - protein, 188 aa, Zea mays
  Coding DNA Sequence Number=SeqID_11583
  Homolog annotation: Hit_ID=UPI0000D55AC3; Match level="QueryCoverage =67%, HitCoverage=74%, E-value=5e-16, Identity=35%"; Hit description =PREDICTED: similar to histidine triad protein 4
  Pfam annotation: Domain name=HIT; Domain location=58-153; Score=5.9; E_value=0.0003; Accession=PF01230.13; Description=HIT domain
MRKTFCFGGRRVARKMSERAPMVDGCVFCEIVRGAPASTTALLYSVPYHCLTYHLRSSAALAAENDDKVVAFRDINPSAFRHYLVIPIDHIPTVNSLRKTKDDHQLVSHMVKVGKDFLNQDAPNSEEHRFGFHQPPFNSIDHLHLHCLALPFIPSWRQVKYTPLGPLGGFIAAEKLLERIKPEAEAYS

SEQ ID NO: 53363 - protein, 286 aa, Zea mays
  Coding DNA Sequence Number=SeqID_11584
  Gene Ontology: Mol. function=structural molecule activity; Cellular component=protein storage vacuole; Biological process=lipid transport
  Homolog annotation: Hit_ID=Q6H7R1; Match level="QueryCoverage=99%, HitCoverage=86%, E-value=3e-64, Identity=51%"; Hit description =Putative vesicle-associated membrane protein-associated protein
  Pfam annotation: Domain name=Motile_Sperm; Domain location=8-151; Score=106.4; E_value=8.1e-29; Accession=PF00635.16; Description=MSP (Major sperm protein) domain
MWSHSKDLLEIEPLELRFPFETKKQISCSMQLTNRTDDYIGFKVKTTSPKKYCVRPNSGIVPPRSTSDVIGNSNRPTLTSFPPSSFDMGVPKITIIQMPDALCNFSVTMQAQKEAPPDMQCKDKFLVQSVVVAEGTLVKDITGDMFTKESANVVDEVKLKVVYIPPPKPPSPVHEESEEGSSPRPSLSDGINLNYQEMQTTRESDESLLFSAVKTHIDQKDYTSETSALISKLTEERNSAIQQNNKLREELDLTRREANKQNGGFSFVVVVAIALLGMLLGYIMKR

SEQ ID NO: 53364 - protein, 542 aa, Zea mays
  Coding DNA Sequence Number=SeqID_11585
  Gene Ontology: Mol. function=nucleic acid binding; Biological process= DNA integration
  Homolog annotation: Hit_ID=Q7XBC6; Match level="QueryCoverage=99%, HitCoverage=33%, E-value=0.0, Identity=85%"; Hit description =Putative copia-type pol polyprotein
  Pfam annotation: Domain name=rve; Domain location=360-510; Score =116.7; E_value=6.7e-32; Accession=PF00665.16; Description=Integrase core domain
MRRMISWTPKRTSLIKENKKHVKVKNAYSLQVEKCEKLSSELSTCREMIDNLRNENASLNAKVDSHVCNVSIPNPRDNNDDLLARIEELNISLASLRLENENLIAKAKDFDVCKVTIADLRDKNDILRAKIVELNSCKPSTSTIEHVTICTRCRNVDIDAIHDHMALIKQQNDHIAKLDAKIAEHNLENEKFKFARSMLYNGRRPGIKDGIGFQRGDNVKLNAPPKNLSNFVKGKAPMPQDNEGYILYPAGYPESKIRKIHSRKSHSGPNHAFMYKGETSSSRQPTRAKLPRKEAPIASNDHAISFKTFDASYVLTSKSGKVYASGGSSWILDSGCTNHMTGEKRMFSSYEKNQDPQRAITFGDGNQDSLDYNLLSVSQLCQMGYNCLFTDEKSQTQETLKGFLRRAQNEFGLRIKKIRSDNGTEFKNSQIEGFLEEEGIKHEFSSPYTPQQNGVVERKNRTLLDMARTMLDEYKTPDRFWAEAVNTACYAINRLYLHRILKKTSYELLTGKKPNISYFRVFGSKCFILVKRGRKSKFACPL

SEQ ID NO: 53365 - protein, 115 aa, Zea mays
  Coding DNA Sequence Number=SeqID_11586
MARSMGKDSGPGARDSSFMRDFSFGRPLPLMAQTEEDHSCSSVYYPPCRRGRGGCDEEGDEGHREKGIVLGGIAIWRGGRWHRASGGRGVEDGSGHGVGWRKRHRGWERGQAGAR

SEQ ID NO: 53366 - protein, 506 aa, Zea mays
  Coding DNA Sequence Number=SeqID_11587
  Gene Ontology: Cellular component=endoplasmic reticulum
  Homolog annotation: Hit_ID=Q2HRE8; Match level="QueryCoverage=73%, HitCoverage=92%, E-value=1e-114, Identity=49%"; Hit description =Lipopolysaccharide-modifying protein
  Pfam annotation: Domain name=DUF821; Domain location=104-505; Score =741.9; E_value=4.2e-220; Accession=PF05686.3; Description =Arabidopsis thaliana protein of unknown function (DUF821)
  Subcellular localization annotation: CTP_CleavageSite=47; ConfidenceScore=5.59e-01
MEVATAAKAPSSRLARSLAAAAPCYKGVSVFFAAVVAGALVSACWMSVSARVTPITPAATPGIARNAATGPEAPAPGRPRSTGVGASTNQTPSAGAASSAPPPREVPDCPAYFRWIHEDLRPWRGTGVTRGAVEGARRFAPRLRVAVVAGRLYVARYGRRRCFQTRAAFTQWGILQLLRRYPGRVPDLDLMFDCEDLPVVGAGERHGAQPQPPPPPLFRYCGSEATLDIAFPDWSFWGWPELNIKPWEALQREINEANAVVNWTDRAPYAYWKGNPKVGAERLLLLRCNASGERDWNARVYAQDWGEEVRHGFRGSDLSKQCTHRYRIYIEGRGWSVSEKYILACESVALMVRPRFHDFFSRGLSPLRHYWPVRGDRGMCRSIKHAVDWGNAHADRAQEMAGNASRFIREELTMDRVYDYMFHLLTEYARLLRYRPAVPRGAAEVTVESMIRGRRGLERQFMVDTLAASASGDGPCRLKPAYSPEELQALRRARADAVRQVEAWEI

SEQ ID NO: 53367 - protein, 93 aa, Zea mays
  Coding DNA Sequence Number=SeqID_11588
  Subcellular localization annotation: CTP_CleavageSite=87; ConfidenceScore=5.78e-01
MTAWINTVLLALASPELLVATVQRTPSSTAFVTSVMRPCLAVVSSGKSFIGDPLSRPLSFRSLRSAYPPQSASIASSTRLALALRPVAAAVER

SEQ ID NO: 53368 - protein, 103 aa, Zea mays
  Coding DNA Sequence Number=SeqID_11589
MGAQAHASFNRRAGCCVRATAPPLAPLPRLLDCGTGTVTRGNPVDDPAVPARRDGTGKGDTLKRILLREGNRLRASLLIRGSKAGPSEGVNSRLRLLGLRAHY

SEQ ID NO: 53369 - protein, 171 aa, Zea mays
  Coding DNA Sequence Number=SeqID_11590
MWQSGPTTGNNFFAECLTHSAKPRKHSAKADTRQRKLDELYIGNGFFAEYFLSGTRQRKVAVAALGNGDGAFAECPQSGTRQRLSLCRVCTVLTLGKEAPRGPLYQSIFNKIRANKAQLTYDDHERALKLLHALDHRVLEVKVSAIIESPNYETLTMDELFSKLMSIEIDH

SEQ ID NO: 53370 - protein, 46 aa, Zea mays
  Coding DNA Sequence Number=SeqID_11591
MAMMGSTSEKMYLCQVKKQQTFVASVQRWYQKKSTKTKAARGKVLR

SEQ ID NO: 53371 - protein, 130 aa, Zea mays
  Coding DNA Sequence Number=SeqID_11592
  Gene Ontology: Mol. function=electron carrier activity; Cellular component=mitochondrion; Biological process=electron transport
  Homolog annotation: Hit_ID=Q2QSG2; Match level="QueryCoverage=99%, HitCoverage=8%, E-value=1e-37, Identity=62%"; Hit description =Retrotransposon protein, putative, Ty1-copia subclass
  Subcellular localization annotation: CTP_CleavageSite=54; ConfidenceScore=5.12e-01
MTACKPCSTSMNTQAKLSSDGSPVPESTLYRNLVGALRYLTFTRPNITYAVQVCLYMYDPREPHLTAVKRILRYLHGTVDLELFVARASSPHTLTIYTDADWVESPDTHRSTLGYVVFLGVCLISWSSKR

SEQ ID NO: 53372 - protein, 352 aa, Zea mays
  Coding DNA Sequence Number=SeqID_11593
  Homolog annotation: Hit_ID=UPI0000E49153; Match level="QueryCoverage =60%, HitCoverage=34%, E-value=1e-09, Identity=22%"; Hit description =PREDICTED: similar to telomeric protein RIF1, partial
MDRQVAEIASEPDRAAAYARLLLLQRGCADDASSAAELAAELPSTLLPLLLRDAAADDEAVAASALKCLGFALYHPVLVSTISAQMTQLVLDTLVHIIMSTRMKSACNLGVWCFSVQQLNPLIIEDRADPMLIAIVHALDNPFGSLSTTFEAAQAIMKLGGQSPKRMRDLSSLWVPPVYRRLLSADKAERDMVERCLIKVSCVILPPQPLLSKAVASDLEQKLLSCMVNMLDDPSKKVQTVKSWGWIVSLLGPDAVNNRPLLNKLIKVPEQMFTDLNPQVQVATMATEIVAQQTVISPLKPIEQASAQENQHAECSPKLSLPRIRSLSYMEMVSPAVYVTALSLSMISQYTV

SEQ ID NO: 53373 - protein, 189 aa, Zea mays
  Coding DNA Sequence Number=SeqID_11594
MNKDLVALAHVLIRDRLNRLHAGLAHITVSTGDENRYDAFENLLRDVAAAAREVRELVPRSQGGTTAAASCGCGLRRLRWNFRGCHTIFLDGGAPVDMTWDLHGWLFHAHAPAVELPHSSSSCVVFTFQARGASEAKLWTVDGCLRDGDEPDKLPVTPTGRRQKAAAGGASGQGFCLLIQGFRGFSKNI

SEQ ID NO: 53374 - protein, 153 aa, Zea mays
  Coding DNA Sequence Number=SeqID_11595
  Subcellular localization annotation: CTP_CleavageSite=37; ConfidenceScore=5.28e-01
MRPPIDMPTPLDVLASGKDTTVDALLSAPRRKRTLVAASAVAAAAAEFVRVAKKQRQLALSSLDTLPTSASSRSCAACSCGHGRGCGASACVTRRWLTLLGSIRASEQTCLPQCIVKLYHTVRSFVLLTGNEDFRIKKSPFDQESIQYRDVAN

SEQ ID NO: 53375 - protein, 144 aa, Zea mays
  Coding DNA Sequence Number=SeqID_11596
  Gene Ontology: Mol. function=DNA binding; Biological process=DNA integration
  Homolog annotation: Hit_ID=UPI00004C1731; Match level="QueryCoverage =53%, HitCoverage=5%, E-value=2e-33, Identity=92%"; Hit description =UPI00004C1731 related cluster
MDERATLGGLESEDDAKPSHGFLAVLSSLWGRGYLTHRLRIRFPKDKGVRRPKQPGQLRRLTGPARRGSGCGLTTLGAVQTSTEGAAAPSALFPPSAKSGLASEGDTGGRISTSKEDTSTALGPSQPGSPLGPRPEQTPQLATP

SEQ ID NO: 53376 - protein, 168 aa, Zea mays
  Coding DNA Sequence Number=SeqID_11597
  Gene Ontology: Mol. function=carboxyl- and carbamoyltransferase activity; Cellular component=ornithine carbamoyltransferase complex; Biological process=amino acid metabolic process
  Homolog annotation: Hit_ID=Q8SA97; Match level="QueryCoverage=66%, HitCoverage=21%, E-value=4e-22, Identity=53%"; Hit description =Ornithine carbamoyltransferase
MAPPVDMAGLCPRLGGVEAPPKPRSSLSSVAEVESDPPGRARRRLSAEARAESEPWGRAKRSSPSSGAEPESEPWVGRSGVRRLPGLSPSPSPGSGGAEFAVFRDLARIRALGRAKRSFLWCLRSGLTACQPHSVKWHRSRSGVGGAVLLSGRSVERRSDGGHFGSAG

SEQ ID NO: 53377 - protein, 94 aa, Zea mays
  Coding DNA Sequence Number=SeqID_11598
  Subcellular localization annotation: CTP_CleavageSite=76; ConfidenceScore=5.28e-01
MALVLSLPCCCSPFLPLSARQVAAARRARHLFDAMPSQVAPQQPLRGGCPTLPRHGARRAPSTLLRSPAIDGAFVFAPHVQQPRLRFDMDEMCE

SEQ ID NO: 53378 - protein, 108 aa, Zea mays
  Coding DNA Sequence Number=SeqID_11599
  Gene Ontology: Mol. function=galactosyltransferase activity; Cellular component=membrane; Biological process=protein amino acid glycosylation
  Homolog annotation: Hit_ID=Q2R3F9; Match level="QueryCoverage=68%, HitCoverage=60%, E-value=2e-20, Identity=61%"; Hit description=LGC1, putative
  Subcellular localization annotation: CTP_CleavageSite=41; ConfidenceScore=5.38e-01
MGIYNRQFTGGWCNRTASGNTLFPLAALSSFLLVTVRNTCRCAQSDVKVDCKGFNTTLSVDPAKLKEIGGGVCLINGGAPLAPGQGVTFSYAWSNQFGFRPVSSTVTC

SEQ ID NO: 53379 - protein, 81 aa, Zea mays
  Coding DNA Sequence Number=SeqID_11600
MEARRASRYRVHGRRTRRPRNPKPGVQKKTCKVKIKSISRLSLLEYDLNSNANLIGTFGGPIVQELTCYVVESSTNMDLNL

SEQ ID NO: 53380 - protein, 70 aa, Zea mays
  Coding DNA Sequence Number=SeqID_11601
MKLWKETSRSSKTTTSSRCGLAATPSRLPVKAATFGIAYGWCADDMGEALELLFEATDGGEVLHQHGLFG

SEQ ID NO: 53381 - protein, 123 aa, Zea mays
  Coding DNA Sequence Number=SeqID_11602
MAACQYDDHRTAAGAPRPSRRRLRQMRCGWGWQARRGAAARVDRRARSCQRGLGARGRPERDAGRRARGRASWALQPGGGKGMRRGQPTGSVLSGRAGWSVGGLEHLSHSHGVASDLKRLHLT

SEQ ID NO: 53382 - protein, 101 aa, Zea mays
  Coding DNA Sequence Number=SeqID_11603
MAPLALRQDALRVKTPWEEQPWFHADVLLRGYIGWNTRRAVQVMDKVFPKALNADLTAVKAELAGLTDKSASTWRLPSRTSRPRPSAQISEARFPTLRLEV

SEQ ID NO: 53383 - protein, 442 aa, Zea mays
  Coding DNA Sequence Number=SeqID_11604
  Gene Ontology: Mol. function=hydrolase activity, hydrolyzing O -glycosyl compounds; Cellular component=anchored to membrane; Biological process=carbohydrate metabolic process
  Homolog annotation: Hit_ID=P52409; Match level="QueryCoverage=93%, HitCoverage=94%, E-value=5e-97, Identity=44%"; Hit description =Glucan endo-1,3-beta-glucosidase precursor (EC 3.2.1.39) ((1->3) -beta- glucan ...
  Homolog annotation: Hit description=endohydrolase) ((1->3)-beta -glucanase)
  Pfam annotation: Domain name=Glyco_hydro_17; Domain location=29-338; Score=209.7; E_value=6.6e-60; Accession=PF00332.9; Description =Glycosyl hydrolases family 17
  Pfam annotation: Domain name=X8; Domain location=356-441; Score =173.2; E_value=6.4e-49; Accession=PF07983.3; Description=X8 domain
  Pfam module annotation: Pfam domain module=Glyco_hydro_17::X8; Domain location=29-338::356-441
MTLCTVLLQILLPTLLLVSAITGADASGIGVNYGTRGTTLPAPADVARFLARDTIFDRVRLLDADPVLLRAFAGTGLAVDVTVPNGVVPHLLNLTFARRWVRDNVTPYAGATNISRLLVGDEVTTEANRTLLLALVPAMQNLHTALVAASLHGRVKVSTTHSLGVLTTTEQPSAARFRDGYDAAIVRPLLRFLRATGAPFMVNAYPFYALANDSSLDFALFRVNDGVMDQGTGLVSTPCTRPSGGWASGTSTSPCRRPGGHRPGEDWEVGVGADLARDYNSNAIRHLGSGVGTPLMPNRTFEVSIFSLFDENLKPGPVSERNFGLFRGDMTPVYDVGIFTDPETLEPVRAKVTSRKWCVPEPAADEMVLQENIDFACGQKGVDCTAIRPGGVCYEPDTVQAHAAYAMNLYFQANGQHAFDCDFGQTGIVTTADPSYGGCKFM

SEQ ID NO: 53384 - protein, 135 aa, Zea mays
  Coding DNA Sequence Number=SeqID_11605
  Gene Ontology: Mol. function=acyl-CoA binding
  Homolog annotation: Hit_ID=Q4L0H4; Match level="QueryCoverage=91%, HitCoverage=35%, E-value=2e-36, Identity=56%"; Hit description =Membrane acyl-CoA binding protein
  Pfam annotation: Domain name=Ank; Domain location=95-127; Score=33.5; E_value=7.6e-07; Accession=PF00023.20; Description=Ankyrin repeat
MPTEEAMQGYITIVQDLFPNWDAGASAKRKDEDSIASASASKGPMGPVFSSLMYEEDEGNESELGDIHVSAREGATDDIVKLLAAGVEVNVRDTEGRSPLHWAVDRGHLSAVEVLANANADLNAKIYLMGNHTAG

SEQ ID NO: 53385 - protein, 74 aa, Zea mays
  Coding DNA Sequence Number=SeqID_11606
MAASGYSGSAPITDQGSPETPCSVPIEGGSGAAPRITGFCQIVDSVNITAQELCPDRAPAYRLFAWRNDQHPPN

SEQ ID NO: 53386 - protein, 105 aa, Zea mays
  Coding DNA Sequence Number=SeqID_11607
MEATAVAAADVKSEVESKCGRRIPEIAALVTTRDLCLRWPEIRARPPVDPCHAEPLLKWSNNDIDEFIAFDSVYGPQVLMTWKFNGLNDVTSLPCRFKNIDMLRS

SEQ ID NO: 53387 - protein, 143 aa, Zea mays
  Coding DNA Sequence Number=SeqID_11608
MPVLPSQADGTGGYNPAGEDDRDYELRSRGSATLGTNALDNLVSRSRRSSSTHSDHSSTAATPNPSPPPSPQSSTAPAPQPPAMVDPTMKDVMEMLKSITTEMYTMKADMATLKEKPASTLDTTVVGRPEGPRDLDHPPNCRN

SEQ ID NO: 53388 - protein, 138 aa, Zea mays
  Coding DNA Sequence Number=SeqID_11609
  Homolog annotation: Hit_ID=Q6K9G7; Match level="QueryCoverage=28%, HitCoverage=16%, E-value=6e-10, Identity=62%"; Hit description =Kinetochore protein-like
MEDGDESAAAALGLSPQLFVNEVHGIIADISAEAFEAAAAPGVVGAAKAAEKAMDLPAASLDVPYVVEWRLLADSLSAATHISVSACLRSIAGLNAVHHVVKDRLDKRMANWEKFCLRHCFDVPEGFVADENVHNLEK

SEQ ID NO: 53389 - protein, 219 aa, Zea mays
  Coding DNA Sequence Number=SeqID_11610
  Gene Ontology: Mol. function=DNA binding; Cellular component=nucleus
  Subcellular localization annotation: CTP_CleavageSite=45; ConfidenceScore=5.11e-01
MGANGHPPASTVAQNGSHSGGGGGGGGGVNPSNGGTGAALRHDPGLAREWSTEEQTILDELLVKYASDLPVVRYAKVAMKLPEKTVRDVALRCRWMNEKVSDSSSKPPVHMVGRPNVPPYPLPVLPMDDDEISSKAIGGPTGEILETNAHVLGQISSNLSNMQIQDNISLLCQTRDNILRVLKEINDAPDIMKQMPPLPVKINEELVNSLLPRPTVPMQ

SEQ ID NO: 53390 - protein, 173 aa, Zea mays
  Coding DNA Sequence Number=SeqID_11611
MKQKDMELQAMLDGVLEASGCEKLIKCLSEYSKLYSDKDDDPKEFIDRFLKFSITRNELGPSIQTHVQKKLQMWIETQGFMDNAAQVCEQNSGESAKFMSEDSLRANDLGFQLYHGVQDEDDVKCAMDEGLPLLDLNIRGCAAIIVLFIPSVDAYLRSGQQVSGTCRLRDPTP

SEQ ID NO: 53391 - protein, 61 aa, Zea mays
  Coding DNA Sequence Number=SeqID_11612
MTLNFYFFLNLLPDRGALVERLEQEPYQSGLATDELFLAARRTELGENGVAVALFEIGVGD

SEQ ID NO: 53392 - protein, 910 aa, Zea mays
  Coding DNA Sequence Number=SeqID_11613
  Gene Ontology: Mol. function=zinc ion binding; Biological process =regulation of transcription
  Homolog annotation: Hit_ID=Q1SCV3; Match level="QueryCoverage=73%, HitCoverage=82%, E-value=1e-117, Identity=35%"; Hit description =Octicosapeptide/Phox/Bem1p; Plant regulator RWP-RK
  Pfam annotation: Domain name=PB1; Domain location=808-890; Score =74.4; E_value=3.6e-19; Accession=PF00564.15; Description=PB1 domain
  Pfam annotation: Domain name=RWP-RK; Domain location=540-598; Score =8.2; E_value=0.0016; Accession=PF02042.6; Description=RWP-RK domain
  Pfam module annotation: Pfam domain module=PB1::RWP-RK; Domain location=808-890::540-598
  Subcellular localization annotation: CTP_CleavageSite=46; ConfidenceScore=5.32e-01
MPDPRRITAFLGFPYHVPALVRPRAHTPMGDRRTGSRHYASARTLSVGAPSSSPSRQCGGKKTVLFFISCPELNTVLQIHISLLGVDKDLCLNEWSKTMDVPTPPNRAGCNSNISNIGSPMQSFDDPFGGAAMTSFDGYSELSSPSVADHIFSLLNDPSSVQHMFALWSSSGSSPRASAVREDMSFDTYPGPMDVTASLAQRINSASVFNPTEVDRGLKDSDGLVPNNGSQQGSSIIPRSVGNILADRMLMALSLFRKSLSDGVLAQVWMPVEHNGRVVLSTSEQPYLLDQDLAGYREVSRNFLFSVKEEPGLHLGLPGRVFISGVPEWTSSVTYYSKPEYLRMEHALLHEIRGSLAMPVYDPSKGSCCAVLELVTNKEKPDFDAEMDIVYSENQKYASTEILDVLRAICHAHMLPLALTWIPTSNGTANGFCVAKNIRLDSQPGKSVLRIHESACYVNDAKMQGFLHACAERHLEKGQGIAGRALKSNLPFFSPDIREYSIEDYPLAHHALNCKGCGEQQMLLNSLSSTMQRICKSLRTVSEAETDSVSATEPMDAAMSLGGEPYCTVMKSQLNLILLRHSQQHGISRWPSRKINKVNRSLKKIEKVIKSVHGVDRSLQYDPATGSLVPATSLPDKMPTSSAGVKTVEEKSSPEPGQDFSSPDGWQRESSQLHASSIPTRVGDEVQMLAINNEGSRNYASGIANIAQHSNSEDAHGPLYPVGAVNSSRTGETGYIDSPTSLHMDSVEGQTTVRDSRSVQQADVTMATKEQTLPSTSGTTDSSSGSASSQPAFKGNPGRALKVSSSDALTVKATCNGDTVRFKFLPAMGWYHLLEEVAKRFKLATGAFQLKYKDDEDEWVILANDADLQECVDVLDSIGSRSVKLQVRDLPCLVSSSGSSSCCLQVEGSA

SEQ ID NO: 53393 - protein, 131 aa, Zea mays
  Coding DNA Sequence Number=SeqID_11614
  Gene Ontology: Mol. function=GDP-L-fucose synthase activity; Biological process=cellular metabolic process
  Homolog annotation: Hit_ID=Q67WR2; Match level="QueryCoverage=59%, HitCoverage=23%, E-value=1e-15, Identity=60%"; Hit description =Probable GDP-L-fucose synthase 1
MDASNIGGHEDHIARALGVGGEEGLKVSLAGEVKLGVGVGHDAGEDKHEEATHDGLTDKIVAPDDEDLCVLVDEEGRVCMARGCGAGRGRATVMQGEGEGVGVALTSGCDGRSGRWTLGVCMVEGGGSGGR

SEQ ID NO: 53394 - protein, 440 aa, Zea mays
  Coding DNA Sequence Number=SeqID_11615
  Gene Ontology: Mol. function=phosphoric monoester hydrolase activity; Cellular component=chromosome, pericentric region
  Homolog annotation: Hit_ID=Q6VEY3; Match level="QueryCoverage=98%, HitCoverage=100%, E-value=1e-135, Identity=58%"; Hit description=CTD- phosphatase-like protein
  Pfam annotation: Domain name=NIF; Domain location=258-433; Score =217.9; E_value=2.4e-62; Accession=PF03031.8; Description=NLI interacting factor-like phosphatase
MVKLPALRMKRMFHGDDCANEFKIRTMKSMKVSHFHVSELEQSAMSNLSDKTPQDEPDPTIQLADQDIRVTEASGLHDLIGGKSMLEDLTSEVIDSPNSEGDSSANYDDNKSVLHAVNYVGKEFADDGVDSSFQNFCFSDHEANWGLNECCRLMDIYSPDDDFSYLLDSPPDLLPSYTGFCDEFVSIDALMNMSSRCGIFPLIESATEASVDNKPCSSEVDLCFNNSEVLEWLNPNLLEGDLPDLVDFAELNSNATPAKKEQWTRNVTLVLDLDETLVHSTMKHCDDADFTFSMFYDMKEHVVYVKKRPHVHMFLQRMVEMFEVVIFTASQSVYADQLLDMLDPEKKLFSKRFFRESCLITDSGYRKDLTVVGVDLAKVAIIDNTPQVFELQVNNGIPIESWYSNPLDEALPQLIPFLETLAVTDDVRAYHCQEVWQYNR

SEQ ID NO: 53395 - protein, 157 aa, Zea mays
  Coding DNA Sequence Number=SeqID_11616
  Homolog annotation: Hit_ID=Q6QP51; Match level="QueryCoverage=32%, HitCoverage=23%, E-value=3e-11, Identity=66%"; Hit description =Putative growth-regulating factor 1
  Subcellular localization annotation: CTP_CleavageSite=77; ConfidenceScore=5.60e-01
MKRLAGTPNPRSWKETKLTMYPGGFKNVKRNGRSPNGSRTRNGRPANHSPRRINSAAGRGGASSRRSGRRFAFAVMTASEKGPGKGDTPKRILPHEGTRLRASLLIRGSKAGPSKGFDSRLRSRGPYTHYWSEVRRSAPRKGSTTASGYSGSAPTTD

SEQ ID NO: 53396 - protein, 133 aa, Zea mays
  Coding DNA Sequence Number=SeqID_11617
MAAENMDMRVYVYVVGPRKAEDESRLYGLLEMEMASEESGLGVLANAKKPTVPFHPIPSHTDTAPCRAECRCRRKKVPDGRVQSVRQDLDAATAACRWRQGQALQSYGWTTNASLFPWIYAAALPSHPPSASL

SEQ ID NO: 53397 - protein, 167 aa, Zea mays
  Coding DNA Sequence Number=SeqID_11618
MARGSNIKYENPKFVFPSWLCAFVVLYTTFLPISHSQVPNPPPPPRRGIHTCNCNYEPTKSSRAPTAPNRAASEIQQGLEEPGETPSEEEGQQQPEEEGQQQAGGGGEIVSGCRGICDDNPVEAGGAAARLPDPIPAQDLIEDILEDYNIDMHHLTRSGLLKIGLFV

SEQ ID NO: 53398 - protein, 145 aa, Zea mays
  Coding DNA Sequence Number=SeqID_11619
  Gene Ontology: Mol. function=protein binding; Cellular component =intracellular; Biological process=small GTPase mediated signal transduction
  Homolog annotation: Hit_ID=Q6ZH85; Match level="QueryCoverage=78%, HitCoverage=23%, E-value=3e-36, Identity=65%"; Hit description =Putative leucine-rich protein
  Pfam annotation: Domain name=LRR_1; Domain location=26-49; Score=3.6; E_value=61; Accession=PF00560.23; Description=Leucine Rich Repeat
  Pfam annotation: Domain name=LRR_1; Domain location=3-24; Score=7.4; E_value=12; Accession=PF00560.23; Description=Leucine Rich Repeat
  Pfam annotation: Domain name=LRR_1; Domain location=51-72; Score =18.3; E_value=0.028; Accession=PF00560.23; Description=Leucine Rich Repeat
  Pfam annotation: Domain name=LRR_1; Domain location=73-93; Score=5.6; E_value=25; Accession=PF00560.23; Description=Leucine Rich Repeat
  Pfam module annotation: Pfam domain module=LRR_1::LRR_1::LRR_1::LRR _1; Domain location=26-49::3-24::51-72::73-93
MTSLYLLDAHFNELCGLPSAFGKLTSLEILNLSSTFNDLKELSSSFGDLLNLRELDLSNNQIHALPNTFGRLKLEKLNLEQNPLAMPPEVIVNKGVNAVKEYMLKRWLDILLEEQSLEVSSTPKAGASAGGSAGEKRPLPPARGR

SEQ ID NO: 53399 - protein, 414 aa, Zea mays
  Coding DNA Sequence Number=SeqID_11620
  Gene Ontology: Mol. function=signal transducer activity; Cellular component=heterotrimeric G-protein complex; Biological process =signal transduction
  Homolog annotation: Hit_ID=P49178; Match level="QueryCoverage=99%, HitCoverage=100%, E-value=0.0, Identity=84%"; Hit description =Guanine nucleotide-binding protein subunit beta
  Pfam annotation: Domain name=WD40; Domain location=132-170; Score =23.6; E_value=0.0007; Accession=PF00400.22; Description=WD domain, G- beta repeat
  Pfam annotation: Domain name=WD40; Domain location=181-220; Score =35.3; E_value=2.1e-07; Accession=PF00400.22; Description=WD domain, G-beta repeat
  Pfam annotation: Domain name=WD40; Domain location=228-268; Score =34.0; E_value=5.3e-07; Accession=PF00400.22; Description=WD domain, G-beta repeat
  Pfam annotation: Domain name=WD40; Domain location=273-311; Score =45.9; E_value=1.3e-10; Accession=PF00400.22; Description=WD domain, G-beta repeat
  Pfam annotation: Domain name=WD40; Domain location=322-360; Score =14.3; E_value=0.43; Accession=PF00400.22; Description=WD domain, G -beta repeat
  Pfam annotation: Domain name=WD40; Domain location=368-406; Score =24.1; E_value=0.0005; Accession=PF00400.22; Description=WD domain, G- beta repeat
  Pfam annotation: Domain name=WD40; Domain location=91-128; Score =24.3; E_value=0.00043; Accession=PF00400.22; Description=WD domain, G-beta repeat
  Pfam module annotation: Pfam domain module=WD40::WD40::WD40::WD40::WD4 0::WD40::WD40; Domain location=132-170::181-220::228-268::273 -311::322-360::368-406::91-128
MASVAELKEKHAAATASVNSLRERLRQRRETLLDTDVARYSKSQGRVPHLATKWFLTILIWHCIRNYISLTVTECVVTGKGSRIKVCKHLSTTGMGPSDHQYVYSLDWTPEKNWIVSASQDGRLIVWNALTSQKTHAIKLHCPWVMACAFAPNGQSVACGGLDSACSIFNLNSQADRDGNMPVSRILTGHKGYVSSCQYVPDQETRLITSSGDQTCVLWDVTTGQRISIFGGEFPSGHTADVQSVSINSSNTNMFVSGSCDTTVRLWDIRIASRAVRTYHGHEDDVNSVKFFPDGHRFGTGSDDGTCRLFDMRTGHQLQVYSREPDRNSNELPTVTSIAFSISGRLLFAGYSNGDCYVWDTLLAEVVLNLGNLQNSHDGRISCLGMSSDGSALCTGSWDKNLKIWAFSGHRKIV

SEQ ID NO: 53400 - protein, 238 aa, Zea mays
  Coding DNA Sequence Number=SeqID_11621
  Homolog annotation: Hit_ID=Q8RYX7; Match level="QueryCoverage=40%, HitCoverage=30%, E-value=4e-08, Identity=56%"; Hit description =Putative heat shock protein
MVWKQMWGRERMEQKTIDVVDDRVLGKAPRRDLSPAERPELRRGDGEVHPVAPGTRAGGQHGEVPEEGLSLERAPGEGRVHRCPGRAITDADVLGTLLVQNPSLRVLSMGAPTLAPPPKTPRVLSPARPSLHSSNTPLFSCWSRIACAREGTGVRTRQDAETQCTITQGRAHDTAGFRAARCPWGCESVPEAGVVRAVISLSPVVMQCERTTASILGQTAMSASRPRQPTPLARVRRT

SEQ ID NO: 53401 - protein, 77 aa, Zea mays
  Coding DNA Sequence Number=SeqID_11622
MWFGEEDWGKRDELQQNEAKCEWSHLNVDASSSTTGGEMTQESYAYAATPTRGWPPPMLQQSKQLQQCRLAASRTRP

SEQ ID NO: 53402 - protein, 249 aa, Zea mays
  Coding DNA Sequence Number=SeqID_11623
  Homolog annotation: Hit_ID=Q6QP51; Match level="QueryCoverage=24%, HitCoverage=28%, E-value=5e-17, Identity=67%"; Hit description =Putative growth-regulating factor 1
MQVACNRTTETHPFDFDASSMEAQAHTSWSGKGDISKGILLREGSGPRALLLIRGSKAGPSEGFNSRPEHSGFRLITDQRFEGWPLGRVRQPPQSTRAPHPLLIRGSKAGPSKGSTAAPEHAERGMTLGTSDTWPRLGLRSRGELSASPDPRARPPPRPRKVVSASPDPRARPQPRPQKVVSVSPDPRARPQPRPRPREESRPRPTPASASEGISASPDLGLRPTTPQGDNTEPRFFPFVFRLAPTHLG

SEQ ID NO: 53403 - protein, 461 aa, Zea mays
  Coding DNA Sequence Number=SeqID_11624
  Gene Ontology: Mol. function=hydrolase activity, hydrolyzing O -glycosyl compounds; Cellular component=anchored to membrane; Biological process=carbohydrate metabolic process
  Homolog annotation: Hit_ID=Q7Y179; Match level="QueryCoverage=95%, HitCoverage=96%, E-value=0.0, Identity=73%"; Hit description =Putative beta 1,3-glucanase
  Pfam annotation: Domain name=Glyco_hydro_17; Domain location=29-349; Score=357.5; E_value=2.1e-104; Accession=PF00332.9; Description =Glycosyl hydrolases family 17
  Pfam annotation: Domain name=X8; Domain location=371-456; Score =162.8; E_value=8.6e-46; Accession=PF07983.3; Description=X8 domain
  Pfam module annotation: Pfam domain module=Glyco_hydro_17::X8; Domain location=29-349::371-456
MGAAARKPAAALLPIWLCLVCVSRAQPYIGVNYGEVADNLPSPDKTARLLKSTSISKVRLYGVDAGLIRALAGSGISVVVGVANGEIPTLAADPAAASRWLAANVLPFVPATTISAVAVGNEVLESGDAALAAALLPAMQNLRAAAAAAGDGAAGIRFSTVNTMGVMAQSEPPSAGAFHPDVAPQLQQILGFLSKTGAPFMVNPYPWFAYQSDPRPETLAFCLFQPNAGRVDGGSKVRYANMFDAQLDAVKSALVRAGYGGVDIVVAETGWPTRGDAGEPGATVENARAYVSNLVAHLRSGAGTPLMPGRSVDTYLFALYDEDLKPGPTSERSFGLYHTDLTMAYDAGLTSNSNAGGGTGTAAPAQPKAGGWCVARDGASDAELQADLDYACSQVGVDCGAIQPGGACFEPNTVHAHAAYAMNQLYQAAGRQPWNCDFRASATLTSENPSYGACVYTGGGQ

SEQ ID NO: 53404 - protein, 58 aa, Zea mays
  Coding DNA Sequence Number=SeqID_11625
MVSHSSYGGYKCGHCTTAVGVSEAFYAKAVYLARIKNSIRIICFSQLMRLLDPCCYIE

SEQ ID NO: 53405 - protein, 196 aa, Zea mays
  Coding DNA Sequence Number=SeqID_11626
MGQGTLAATNQLLVRGFSCLFFGFLDQTVIYAGTNIHSHLQSERLNRGRARLVGGRGEPRPRAAPRTRQQGRERVGAGARAAGRAPWPDSGRAERHDAGPDGFARAWEGCRGEGRVRDAGPGRRGHARTSADAGGRPGREPRRGHGSEQAALDEPRTVRRGACAGTAGGNTSPGEPWTALGARAFPSLLWVSAPMP

SEQ ID NO: 53406 - protein, 152 aa, Zea mays
  Coding DNA Sequence Number=SeqID_11627
MVEVHVARRGDRFRGFLRLLAAEISTTTDSVSGSRFTRGRSPLTGRWLWRGCVWPCAISAKEKREAGLRDWDSVGASARSGSEIAPPRSRAIGDGGAAEGGQPSVAGILRRVEDGGPPGSDSDGATRASEGADHMGPTCKRLGSSAQIKLLA

SEQ ID NO: 53407 - protein, 277 aa, Zea mays
  Coding DNA Sequence Number=SeqID_11628
  Homolog annotation: Hit_ID=Q6QP54; Match level="QueryCoverage=24%, HitCoverage=24%, E-value=8e-08, Identity=47%"; Hit description =Putative kinase
MAPPVNVAGLRPRLGDMEAPPKLRSSLSSVAEAESEPLGRARRRSSAEARAESEPWGRAKRIGVAQAALSFCQAGQWSGEVTAVTSALPGGARQDKAIPSDGVGPAAAHTPAEPRTAILGTKTTAIQCYAYERTSGSGDLDHDRFGQRKPIHAGKKSSDGAVVMARVVGSAKEKREAGLRDWDSVGASARSGSEIAPPRSRAIGDGGAAEGGQPSVAGILRRVEDGGPPGSDSDGATRASEGADHMGLTFKRLVSRWADQAQSAHVGGSSAQIKLLA

SEQ ID NO: 53408 - protein, 442 aa, Zea mays
  Coding DNA Sequence Number=SeqID_11629
  Gene Ontology: Cellular component=chloroplast inner membrane
  Homolog annotation: Hit_ID=Q7F0B4; Match level="QueryCoverage=99%, HitCoverage=99%, E-value=1e-162, Identity=69%"; Hit description =Chloroplast lumen common protein family-like protein
  Subcellular localization annotation: CTP_CleavageSite=57; ConfidenceScore=5.19e-01
MAFSCAGARLHGRTGVGGAKCRPGAALLGRRGTCFRPTAWRWSTARGIRADLPPPPRASADGAATSGPDVVVPEAGDATEEVAAVVQPVVLPEKLDVDDGGNGKLPPAAGGGGDGENGGGSGGGGDGDEEEDEFGPILSFDQVVQEAEKRGVSLPSLPTDIVEAAKSVGIQKLLLLRYLDMQASAWPLGPAIRSCSLLRNRMLVDPAFLFKIGTEIVIDTCCATFAEVQKRGEEFWSEFELYAADMLVGVVVNVALVGMLAPYARFGSRSASEGLLGRVRHAYDALPSSVFEAERPGYKFSVQQRIGTYFFKGILYGSVGFFCGLVGQGIANLIMTAKRGPISDFLVSVGIIAYFDRSVKKSDDDVPVPPLLKTSALWGAFLAVSSNTRYQIINGLERLVEASPVGKRVPAASLAFTVGVRFANNVYGGMQFVDWARMSGCQ

SEQ ID NO: 53409 - protein, 51 aa, Zea mays
  Coding DNA Sequence Number=SeqID_11630
MLRGFIPNGKGYSRRVILVHKEFPEEEDEIQEVVSEEESALVPAHQVMGAI

SEQ ID NO: 53410 - protein, 469 aa, Zea mays
  Coding DNA Sequence Number=SeqID_11631
  Gene Ontology: Mol. function=transferase activity, transferring hexosyl groups; Cellular component=cytoplasm; Biological process =metabolic process
  Homolog annotation: Hit_ID=Q8H3X8; Match level="QueryCoverage=95%, HitCoverage=95%, E-value=1e-150, Identity=62%"; Hit description =Putative UDP-glucosyltransferase
  Pfam annotation: Domain name=UDPGT; Domain location=17-465; Score =5.0; E_value=7.1e-11; Accession=PF00201.9; Description=UDP -glucoronosyl and UDP-glucosyl transferase
MGSIGGHTTTATADRRRRVLFFPLPYQGHINPMFQLAGLLHLRGFSVTVFHTDFNAPDKSRHPAYDFVPVPVRGCLPKGSSDALQVTVERILAVNRACEAPFRERLASLLAREDVACLVADAHLLTLLDVARGLGVPTLVLRTGSAACLRMFAAFPALCDKGYQPAQGTNAHALIHLETPVTELPPYRVRDLPSTTSACHGVISEVISRLVTAVTTSSGLILNTMDALECGELASLRRDFGVPVFDIGPLHMLSPAASSSLLLQDRGCLEWLDAQAPASVLYVSFGSLASMSAAELVETAWGIANSGYTFLWVLRPGLVRGSQTSEAAPPLPDGFDAATRGRGMVVSWAPQEEVLAHPAVGAFWTHCGWNSTLESLCAGVPVIARPCFGDQMGNARYVDHVWRTGLTLDGVLERGEVEAAVAALMAPGEPGDGLRRRARELESSAADCMTKDGSSCTNVDKLVDHILTL

SEQ ID NO: 53411 - protein, 115 aa, Zea mays
  Coding DNA Sequence Number=SeqID_11632
MKAKLHHQQKSRSTMDQALSLQEADDLNRVLTLQVTALVPTISGMGDHVSGQVRGKVNALLHSALSRFGQIETCDFENSLLETQEFQFAVIIALNSSTNQNHKEILPPILKSNIS

SEQ ID NO: 53412 - protein, 159 aa, Zea mays
  Coding DNA Sequence Number=SeqID_11633
MAKGYPCFNPSRTPEINGPGAFFPNSAATGRAAALHPPPGEPNSGVLKREIQISQTLHNAGIRMNWEGRSVPVIGDLRVLPIAGEVWQQRVHIGEKFLTPPWFICEIDSTQGLFDSRRALRVPCRRLEHTKPRNPPRRPSLPLWILGQCGGVWWRPNKP

SEQ ID NO: 53413 - protein, 126 aa, Zea mays
  Coding DNA Sequence Number=SeqID_11634
MAKGYPCFNPSRTPEINGPGAFFPNSAATGRAAALHLPAGEPNSGVLKREIQIGQTLHNAGIRMNWEGRSVPVIGDLRVLPTRVKFWWRRVHIGEKFLTPPWFICEIDSTHGLFTSQRALRVPAAD

SEQ ID NO: 53414 - protein, 87 aa, Zea mays
  Coding DNA Sequence Number=SeqID_11635
MGGVTISRGENKAGRRHSEAPNESLGRQAGSEAVVLPPGQHNRLVAVAAGGYGYSHRGTGARSPRLNASQFPRCSMDAREAATCVSG

SEQ ID NO: 53415 - protein, 67 aa, Zea mays
  Coding DNA Sequence Number=SeqID_11636
MEGTDEDCFPGEVSGWRPWTSIKGRALAMEQGAKSMQGGGAELPAARHVEEEDREKKKKVAARGVGE

SEQ ID NO: 53416 - protein, 84 aa, Zea mays
  Coding DNA Sequence Number=SeqID_11637
MDGARRATQEKQRSSSARLERRAKKAPAMARAKLGAAGLGAVLEMAEKEKSKRHGRERRELGGCEEDKDDFRKINRESGQDKRA

SEQ ID NO: 53417 - protein, 192 aa, Zea mays
  Coding DNA Sequence Number=SeqID_11638
MCAGAALAQCARGKRKVRGRCQEGGRNRGRAPDDVIFRCHRLRNWSVLADFPWRAEAEAKGSSVRPCRSGCNSVGVWTKRQLMGCVIILARDDVEIPCCTHRDQSPCFVLMRKFSEALAELSLDVRYSRAEWPPVGFVAQLVAEAELGRDGECARRLDPGSGEAERLHPWARSHFGRGEEIVPEGPSARLVV

SEQ ID NO: 53418 - protein, 79 aa, Zea mays
  Coding DNA Sequence Number=SeqID_11639
  Subcellular localization annotation: CTP_CleavageSite=40; ConfidenceScore=5.13e-01
MPPPPSPPSDRVHLHGPISSILALDPPPTPTPQRRLRHLVVHVVSPMLELLGLAKYGATRRREDVKCQGCFSILTCLVY

SEQ ID NO: 53419 - protein, 429 aa, Zea mays
  Coding DNA Sequence Number=SeqID_11640
  Gene Ontology: Biological process=protein localization
  Homolog annotation: Hit_ID=Q6K796; Match level="QueryCoverage=99%, HitCoverage=10%, E-value=2e-43, Identity=30%"; Hit description =Vacuolar protein sorting 13C protein-like
MVRDINLVIGMNMVRGETIIQDVEGLSFELRRSLRDLRHQLPVVEAAIKVDVLKATLSNREYEIISECALSNFSETPHPVPTLDDPRYGTSTTPSHVSASSSESIHVLSEGAETWIANKFSVSINLVELSLHSGSTRDSPLASVQASGAWLFYKSNTRGENFMYATLKGFSVFDDREGTKDELRLAIGKSASVRDTSSVDGYDNPNELDSGERRIQKDLGLEPIPSMLILDAIFRKSSSSVSVCVQRPKFLVALDFLLAVIEFFVPSAQSLLSNDEDKDLLHMITPVVLNDQIYFQEHSTFSLSPQKPLIVDNERFDHFVYDGKGGKLYLLDSEGKILSSPCTESFIHVLGCKRLQFRNVTIVNGEYLDSCISLGDDSCYSASRNDHVYLVREDDGSLSTPSKEIRGDSVKNGSADISTEFIMELQVLL

SEQ ID NO: 53420 - protein, 700 aa, Zea mays
  Coding DNA Sequence Number=SeqID_11641
  Homolog annotation: Hit_ID=Q6K796; Match level="QueryCoverage=89%, HitCoverage=15%, E-value=2e-62, Identity=28%"; Hit description =Vacuolar protein sorting 13C protein-like
MDIAAPKITVPTKFRPDDVHETKLLLDLGNLVLRTEEIWDAYTSEEQDIYLNFNLVLSDVSAFLVDGDYHWNETSDEKNLLPVIDKCGIALKLQQGVGNREAVWQHRYLRLVGPFLYVFENLMSTTYKQWFSLRGKQVHQILEDTGALILLFDNDEGRKIWQNRLQGAIYRASGSAISSFPGVALPSEAHSFKGNFLDVADTEKLFVAGILDELKICFSCGYEVELSMKGGNLLIGTILGSLEIEDQYYYPGSPVPRFLARSFINSMQTQELPSLSRKNSAGPRNTPLMKNDSEENFFEASDDFDEFETPMHQKRTISDYFSTQKFLPTSVPSLQPPTFKRIPDLIPDTELQTGKFTLEGSGTFNSFVKAQIVIYDQHSPQYNSLDNRVVVTVATLSFFCHRPTVIAIMEFMNAINLANGSDTDKDKSTYPATVEDSAIEESKSDLESEPSIKPLLAKGKSRIVFHLTSSMAEAQILLMNENGDRLATLSQNNLSTDIKVFTSSFSIKAALGNLKISDDSLLSSHPYFWVCDMRNPGGRSFVEIDFSSYNVGDEDYCGYDYSLVGQLSEVRIVYLNRFVQEIISYFMGLVPKSSDAVVKLKDNKTNSEKWVSKTDMEGSPALKLDVSFSRPIIVMPRETNSNDFLELDVLYITVQNEFQWIGGDKNEMSTVHLDILTVTLERGANMEIKGRRHNKAFTRI

SEQ ID NO: 53421 - protein, 159 aa, Zea mays
  Coding DNA Sequence Number=SeqID_11642
MSEDHAKREIITGDKPMGSGRTLSRESGDKYKEESSSSIKSLRKGDKKKKKMKKVVYYETDSSSPSMYGAESTTSKRDKSKNESDRDDDKKGKKKMEKKRYHKKKGGEAHMWREWDSDESFTDSSSDEDATNIAIIKGLLFPNVGHKCLMAKDDKKKKM

SEQ ID NO: 53422 - protein, 199 aa, Zea mays
  Coding DNA Sequence Number=SeqID_11643
  Gene Ontology: Mol. function=transition metal ion binding
  Homolog annotation: Hit_ID=Q6K796; Match level="QueryCoverage=84%, HitCoverage=5%, E-value=3e-34, Identity=40%"; Hit description =Vacuolar protein sorting 13C protein-like
MLEDQVAFLLQKYLGNYVRGLSKEALKISVWRGDVELTNMQLKPEALNSLKLPAEPATQVEGCSEDAVQEAKRSRVREMEIKLLERQQQLKSELSSSWLGSFIGTVIGNIKLSIGNIHIRYEDVESNPGHPFAAGLVLSKLSAVTVDDLGKETFATGGDLDRVKKSVELESLAVYFDSDSSSWIVDKPWEDLLPSEWSQ

SEQ ID NO: 53423 - protein, 598 aa, Zea mays
  Coding DNA Sequence Number=SeqID_11644
  Gene Ontology: Mol. function=oxidoreductase activity, acting on single donors with incorporation of molecular oxygen, incorporation of two atoms of oxygen; Cellular component=plastoglobule; Biological process=abscisic ...
  Gene Ontology: Biological process=acid biosynthetic process
  Homolog annotation: Hit_ID=Q6YVJ0; Match level="QueryCoverage=80%, HitCoverage=81%, E-value=1e-167, Identity=80%"; Hit description =Putative 9-cis-epoxycarotenoid dioxygenase
  Pfam annotation: Domain name=RPE65; Domain location=131-590; Score =384.3; E_value=1.8e-112; Accession=PF03055.6; Description=Retinal pigment epithelial membrane protein
  Subcellular localization annotation: CTP_CleavageSite=50; ConfidenceScore=5.23e-01
MERTLITSNLCLSAHASRSSRRVHYIPPSASAAAHNSSYRKKSAPSLPPSAAASATVVTAPPSTDNVQSTAPKQTGRQELEDLVAAKTSTSRTARAPSQARARARAEPRRRPAPAATSLPMAFCSALEEAINTFVDPPALRPSVDPRNVLSTNFAPVDELPPTPCPVVRGAIPRCLAGGRLHPQRAQPAAPPPWAAPPLRRRRHAALAPPPDGGVPAVVGPRPLLALRADMNPAEGVGLANTSLAFFGGRLYALGESDLPYTVRVDPATGEVTTHGRCDFGGRLFMGHDRSPEERPRHRRGLRVPLRPPCPPFVTYFRFDPAGNKGPDVPIFSVQQPSFLHDFAVTERYAIFPEIQIVMQPMGMVTGGAPVGSDSGKVPRLGVLPKYATDESEMRWFEVPGFNMMHSLNAWEEADGEELVLVAPNVLSVEHALERMELVHSCVEKVRMNLRTGAVSRTPLSAGNLDFGVIHPGYLGRRNRYGYLGIGDPMPKISGVAKLDLDRAGTGDCTVARRDFGPGCFAGEPFFVPDDVEGDGNEDDGYLVCYVHNERTGENQFVVMDARSPQLDIVAEVQLPARVPYGFHGMFVTQAELQAQQQ

SEQ ID NO: 53424 - protein, 314 aa, Zea mays
  Coding DNA Sequence Number=SeqID_11645
  Homolog annotation: Hit_ID=Q010J2; Match level="QueryCoverage=48%, HitCoverage=71%, E-value=2e-12, Identity=32%"; Hit description=[I] KOG3146 Dolichyl pyrophosphate phosphatase and related acid phosphatases
  Pfam annotation: Domain name=PAP2; Domain location=160-278; Score =74.2; E_value=4.2e-19; Accession=PF01569.12; Description=PAP2 superfamily
  Subcellular localization annotation: CTP_CleavageSite=66; ConfidenceScore=5.54e-01
MPCLLFLLAPPPRPCLADSVSRSPLPNKYRFFLPQTRRRPSPRLGDGVRMAEMTRVWSGGEPLEVGVSMESDPIVGGEAPSRSRWEASRWAPVEAALNRMIDSNQGLSRLRNFVAKLKKGCIEPKSLPKGTKAPGYSGSSIYRERPLLYLRKAIWKRDAEIMWVLLGAVGNSLLSLVLKKMLNHERPAPALRSDPGMPSSHAQSIFYAATVLALSLYYWLGTNYLTMILGPATLSLAAYLSWLRVSRGLHTLNQVMVGAVVGSAVGALWFVLWHWLVQEAFASSVLVRVAVILGSSAFCVSFVVYMIRHWLKDE

SEQ ID NO: 53425 - protein, 192 aa, Zea mays
  Coding DNA Sequence Number=SeqID_11646
MGADGNQRSGWPRREKRQGEGTQDIPGEDDSWWGDMGRELEAANPDQTQGWRGGGGEDETYLARLMGSGAIRGRRRRQLIYARCGLTRRGARKESLHGWSRLYASIWTVGRSGAGRGWRAVEPARRVATAWVRVSEGTEERDGEEEDKKEEKCSNSGGGGYAPAQGGKRRRTQLSLLAEFVKGKLGLHLVPK

SEQ ID NO: 53426 - protein, 101 aa, Zea mays
  Coding DNA Sequence Number=SeqID_11647
MQMQKVSLSVNNPWPRYNNLLDARRHRAVDDETATAATAICARQYLKASRMNWKEESGFYGLWMKNECEGRDGSWKIGLFRDILEMFDAAICCSKQAQAQM

SEQ ID NO: 53427 - protein, 107 aa, Zea mays
  Coding DNA Sequence Number=SeqID_11648
  Gene Ontology: Mol. function=protein binding
  Homolog annotation: Hit_ID=Q7Y180; Match level="QueryCoverage=98%, HitCoverage=39%, E-value=6e-24, Identity=66%"; Hit description =Putative acidic nuclear phosphoprotein
MAAADEDDATWERAISAATKATSAPKILTLDGAVKSSTGRLPSAALIGRFAASLEEFSVTGAALSSLTGLPASRRFGASPSPTTVSRGPLRSPLSRRPAVPRCATSI

SEQ ID NO: 53428 - protein, 391 aa, Zea mays
  Coding DNA Sequence Number=SeqID_11649
  Homolog annotation: Hit_ID=Q9FJZ1; Match level="QueryCoverage=18%, HitCoverage=18%, E-value=1e-13, Identity=56%"; Hit description =Arabidopsis thaliana genomic DNA, chromosome 5, TAC clone:K1F13
MGAPGVGTVRILSEEILSEGDEVDLVTQDGEGGGAQQPALGFPLFSVEAQRLRDPDPVSKYQILQGGMITHYVLTGSPAQVQKSTSKPPPSPPDKGTPVPVAPVRTQTSPASLYATPESTTLPDSPSSFPGTWSPYIINHKRRGASLAKTSRGDVGSGGSQPKLQVMLSALPKGGEPTAAEEPEFAFQQSENGQTEGDSGVEEAPIYGKNEMLLKDKGSMSAKNEQEQPEFEFQRGSLEASVRSVNVGRPLIAGAPKNDESDTFLELQDLISVSSHTEADGAGTQERWWKPSSPLGTSVGTPGAEFYDAFEAEETDYSSMDPGAELCQQITVSQLVAAAIAQGFARSEVESEMETVLAAKNFEIARLSDRVQYYEAANREMSQRNQEAIGK

SEQ ID NO: 53429 - protein, 75 aa, Zea mays
  Coding DNA Sequence Number=SeqID_11650
MWPYYTRRGISSLCDATTPKGFGPEASRTSFALFDYFDSGILKTTRVHVSGKADRAEGLLRLRDTDTSLITFRDK

SEQ ID NO: 53430 - protein, 49 aa, Zea mays
  Coding DNA Sequence Number=SeqID_11651
MVGRIWPAGAYGDRSTAQWRAPAAAKPPRYAREGEGSSPEQGRGTAALA

SEQ ID NO: 53431 - protein, 136 aa, Zea mays
  Coding DNA Sequence Number=SeqID_11652
MEEARSVRGSSRAPREQASSIHAQGAAAARREQPRAPGEQQPRAGEQQPRPGSSSRAQGEGAAARRGREQPRAPGEQQPRAGSSSGAQGAAARRGREQPRAQEQSHAHRGSCRARTGGSCRAPKAQSTRQFGLRAR

SEQ ID NO: 53432 - protein, 177 aa, Zea mays
  Coding DNA Sequence Number=SeqID_11653
  Subcellular localization annotation: CTP_CleavageSite=21; ConfidenceScore=5.24e-01
MKKTSSLSCTLSSGTVMPPVSPSALSTSMGLNLPPDIPRHGGTGIGSTAVDSFYWDEIILHSCSSVEELAGNIKARTSVALEVVAGCIGKLLVASARAYYLSAFASYWIDGQTAHAAGVKKILCNFTCVAVKKIRAHTDGDGVKKICEAAEKVLIPTGEKVVRGFDGCHHVVVAVAW

SEQ ID NO: 53433 - protein, 33 aa, Zea mays
  Coding DNA Sequence Number=SeqID_11654
MEASSAGMNPSFKQGKNLMTWALLVAPYGGLEA

SEQ ID NO: 53434 - protein, 187 aa, Zea mays
  Coding DNA Sequence Number=SeqID_11655
  Gene Ontology: Mol. function=transcription factor activity; Cellular component=nucleus; Biological process=regulation of transcription, DNA-dependent
  Homolog annotation: Hit_ID=Q2QWM8; Match level="QueryCoverage=95%, HitCoverage=41%, E-value=1e-63, Identity=66%"; Hit description=Plant protein family protein, expressed
  Pfam annotation: Domain name=DUF246; Domain location=75-185; Score= -162.3; E_value=3.4e-05; Accession=PF03138.5; Description=Plant protein family
MAKPRGAPKLLYPRHRRLLRKVSYGTNVLYALTWAIEDSQVSNDQLWASNGYGYHACVTPTSRYKVQGKSDSYMTVRSNGGLNQMRTGICDMVAVARLVNATLVIPQLDKRSFWQDTSTFKDIFDEPHFIKALEGDVHIVSDLPGSLQSAPRARKHFTSWSGASYYEEVKELWKNQKFVQNELRMSR

SEQ ID NO: 53435 - protein, 156 aa, Zea mays
  Coding DNA Sequence Number=SeqID_11656
MGRGAWRWERRGLGVGGSVSVRVVGAEGVSPAVVSMEKRNMAQRSRKRADHGVQGAPGWAAGGAWHGMGCARAAAERWARRRARAGAWASRSARSGWTAARRALGRERLLGCAGWAGRGRWARQAAGKEGARRGTAGPGGVEKRAAGPPRGGGRDG

SEQ ID NO: 53436 - protein, 138 aa, Zea mays
  Coding DNA Sequence Number=SeqID_11657
  Pfam annotation: Domain name=GETHR; Domain location=77-100; Score =16.5; E_value=0.098; Accession=PF05671.2; Description=GETHR pentapeptide repeat (5 copies)
MGGQQGRHRAGTELLKLEDDDGDDAEVNAAGSKARSWLGGLYSVDSSAAMTAAATHTTSPRHNSTTTMNRGAHRKLETERGEMDRGNSKLGELHTTSTRREIGRGSCTARTRSKQGPDTMELDDSRARQGRMRALEQK

SEQ ID NO: 53437 - protein, 70 aa, Zea mays
  Coding DNA Sequence Number=SeqID_11658
MDVCQMFDQGLQLKVVVVRANIESNCDAEYGATCSMVTVSTVAKSSCCVAKFRFNDIGYVRKIKSVDRIR

SEQ ID NO: 53438 - protein, 110 aa, Zea mays
  Coding DNA Sequence Number=SeqID_11659
MTEAQGRDRATVAELWLRKNHSGERGPDRQERGRAHQRVSREVDGKAKLTVALDGAQAQWRPRNKRWMSAGGGGGSQFVWAERGSWAGGANGRGEVGEQGTRFKRGAGAR

SEQ ID NO: 53439 - protein, 192 aa, Zea mays
  Coding DNA Sequence Number=SeqID_11660
  Subcellular localization annotation: CTP_CleavageSite=52; ConfidenceScore=5.06e-01
MGEDWGREAAGWAPWKRAELSELAAGSSSAMVRSLARQRARHVVGKDRAPQSASSRRGKVRRRAGTAPRELEARTTVGEGARLGAASMGDGGHGRELGGKGNQQAAERKKRPSSQTGAPGRCEQRGARHQGPPSRGAAALEPWAPSAEGRKWRSGWRSLHHVGDKEAGEEEISGMKSGDRDRDRLWDIFFLF

SEQ ID NO: 53440 - protein, 63 aa, Zea mays
  Coding DNA Sequence Number=SeqID_11661
MARVACTLRGKRMDSGVSVLSVGVYPDSKQRSFVVSVQSWYQKRSQIRDRGCGRMLASQFEKH

SEQ ID NO: 53441 - protein, 128 aa, Zea mays
  Coding DNA Sequence Number=SeqID_11662
  Homolog annotation: Hit_ID=Q9LU57; Match level="QueryCoverage=96%, HitCoverage=43%, E-value=4e-31, Identity=52%"; Hit description =Arabidopsis thaliana genomic DNA, chromosome 5, P1 clone:MWD22
MEIFIHVEQRYWMEFNKWEHFVNDDCTRSFVSLEVTRTGLPEITRQILMVDEVYRLHGLPEFYTNPRPHISLVWALGDVSGKLKQALKDIEKYQSSMSSLQKCNVRCKFSRVVCKVGKKVHDICKVAD

SEQ ID NO: 53442 - protein, 141 aa, Zea mays
  Coding DNA Sequence Number=SeqID_11663
  Subcellular localization annotation: CTP_CleavageSite=38; ConfidenceScore=5.37e-01
MALPISPFSCCSWRSTTSWGLALFRQCSVSRMFISLVVVGSKPGCGLPPALGFKDDHQSCVGGKRAGLRPPLSSASRMFNSLAGVGSELSCLLRLPHELMACLFLQHSEERMFTILVKEANSGYATPARPQASSIVVHPTL

SEQ ID NO: 53443 - protein, 184 aa, Zea mays
  Coding DNA Sequence Number=SeqID_11664
MPTVGPDPRGKAPDPCTCRPVLRGKVQDPREYNPDLRVGSRTPLRGLYVADSWDPLFSHGCRLRQLGHMRPVDLPQSLADATTEPSKARPVNTSQHNGLRFRRTGEEWRSRAPPTSSAAVTAVQYSGARVGVWALVCLGAKSPAGSDWEHHAPRDAAGIGSGDCTPLDRAAMARIRMKVLIQWK

SEQ ID NO: 53444 - protein, 68 aa, Zea mays
  Coding DNA Sequence Number=SeqID_11665
MWPTARDLAGDVQAILQTAYLSIPLPNSTLVLQDALCPSIITRTLPGRLPLHANAAQIADIMAQGRLH

SEQ ID NO: 53445 - protein, 809 aa, Zea mays
  Coding DNA Sequence Number=SeqID_11666
  Gene Ontology: Mol. function=3-dehydroquinate dehydratase activity; Cellular component=integral to membrane; Biological process=aromatic amino acid family biosynthetic process
  Homolog annotation: Hit_ID=Q6R5L8; Match level="QueryCoverage=77%, HitCoverage=93%, E-value=0.0, Identity=71%"; Hit description=Iron transport protein 2
  Pfam annotation: Domain name=OPT; Domain location=184-793; Score =486.2; E_value=4e-143; Accession=PF03169.6; Description=OPT oligopeptide transporter protein
MEEGVGGDNSLDQFINNDLRIIPCDQNAPSQSVNNGSSAAPIDLEEAAATDNTAAPTSDGDVKKHKRVCTSKVWQDFDPLYRTVDGRILITVYYSSYSYSILVIWTSGDMPRTTTPQGLLIYNGLVESEALIDSSSCSSRTAMEINPADEIDKCEAGGGAEPQPADPEPDAAAAVEQQQPWREQLTARGLVAAALIGSMYTVVVMKLNLTTGFVPTMNVSAALLAFLALRGWTGALSRLGVAGARPFTRQENTVVQTCAVACYSLALCGFGSFMLGLNRRTYEAAGVNTPGNVPGSVKEPGFGWIAGFLVASSFGGLLTLIPLRKALVIDYKLTYPSGTATAVLINGFHTPQGDKNAEKQVRAFLKYFGISFLWSFFQWFYTGGNACGFAQFPTFGLKAWKHSMTYVGAGMICPHLVNLSALLGAVLSWGILWPLISRRKGYWYPADVPESSMTSLYGYKSFVCIALIMGDGIYHLVKVLGVTAKSLHERSKLRRSNNRVADEDNAAAIDSLRRDEVFNRDSIPAWLAYAGYAVTSAVAAVAIPAMFRQVRWYYVVAAYALAPVLGFSNSYGAGLTDINMGYSYGQLALFVLAAWAGRDDGVVAGLVGCGLVKQLVLISADLMHDFKTAHLTLTSPRSMLAAQAVGAAMGCVVTPLTFLLFYRAFDVGNPDGYWKAPFALIYRNMALLGAQGFSALPTHCLPLSAGFFALAVLANVMKDVLPPRYARYVPLPTAMAVPFLVGASFAIDMVVGTVVVFAWHWIDGNETTLLVPAVASGLICGDGVWTFPSSLLSLAKIKPPICLKFTPGS

SEQ ID NO: 53446 - protein, 158 aa, Zea mays
  Coding DNA Sequence Number=SeqID_11667
  Gene Ontology: Mol. function=RNA-directed DNA polymerase activity; Biological process=RNA-dependent DNA replication
  Homolog annotation: Hit_ID=UPI00004C1732; Match level="QueryCoverage =99%, HitCoverage=13%, E-value=1e-53, Identity=55%"; Hit description =UPI00004C1732 related cluster
MSGIPREVAKHSLDIRANSRPVRQHMCRFDEEKRRVIGKEIHKLLAADSSRKCFILSGATYQRCMNHMFDDHIGSMVEAYVDDIVVKTRKADNLVADLETAFAFLRAKSVRLNPEKCVFGVPRGMLLGFNVSERGIEANPGKVSAITGMGPIKDVKGV

SEQ ID NO: 53447 - protein, 168 aa, Zea mays
  Coding DNA Sequence Number=SeqID_11668
MDSLGYFPAGQGRAAGADIVPRPDGEVLKRSSSVGIDQFGSCTFTPKTGKTKEKVVELAPYTKNKSGGGRPVTHRDFECVERQVLSLAFAIELGEHTRDTFVVEIEKEAEELVGPVSEQEIEIGVELRGGHTHLNHVFSQMGLSYMEHTTCPKRWRKTLTRDPAESQM

SEQ ID NO: 53448 - protein, 32 aa, Zea mays
  Coding DNA Sequence Number=SeqID_11669
MAVRLTGSEGGPEKGGVGFERSLRSQRGYNVT

SEQ ID NO: 53449 - protein, 95 aa, Zea mays
  Coding DNA Sequence Number=SeqID_11670
MHALTTLCAYHPLEMATHPIGLFPAAKEEDPMWKDRVDHAKEDAKVTITDQEDLVVDLSTELVEKDLQTEQMNAQIRELEERVEERNHTIEVLEN

SEQ ID NO: 53450 - protein, 42 aa, Zea mays
  Coding DNA Sequence Number=SeqID_11671
MNFLLPSPSPPQTLPRWPGCPHRCFVHRCDAHAIGCCDTRLL

SEQ ID NO: 53451 - protein, 367 aa, Zea mays
  Coding DNA Sequence Number=SeqID_11672
  Homolog annotation: Hit_ID=O81395; Match level="QueryCoverage=21%, HitCoverage=15%, E-value=1e-36, Identity=95%"; Hit description =Bifunctional dihydrofolate reductase-thymidylate synthase (DHFR-TS) [Includes: ...
  Homolog annotation: Hit description=Dihydrofolate reductase (EC 1.5.1.3); Thymidylate synthase (EC 2.1.1.45)]
  Pfam annotation: Domain name=DHFR_1; Domain location=1-156; Score =48.4; E_value=2.5e-11; Accession=PF00186.9; Description =Dihydrofolate reductase
MGIGKDGVLPWKLPGDLKFFKELTLTTSDLVKKNAVIMERKTWESIPVKSRPLPGRLNVILTRSGTFDFATVENVVICGTHLTASDAATDARLRQIEVDTGSRLTAIESAVQLFDCWRPRVDSSLDAMKTNLDRLCSEASRMEVVGFQGVFGGFPGVLGSPGSGATSSGLLGSPPSFAPTGAVPVRPSATVDHSDAYRFGPSYENYLRDSGLRYPDCRWPLPGHGKRRILLAVVTFDVPVQNGIYEPIHVAPKIVAVQWWIVRLLSRAPSCPRHRNFSQPPDLPATDIDRPVATSSILFFLAFDGSPRHAMLPGGSLLLHPDFQAPIFTSDTTPRTSCPPPPSLLPVLHGFALARAGRARGLAPRLA

SEQ ID NO: 53452 - protein, 878 aa, Zea mays
  Coding DNA Sequence Number=SeqID_11673
  Gene Ontology: Cellular component=mitochondrion
  Homolog annotation: Hit_ID=Q6K624; Match level="QueryCoverage=87%, HitCoverage=85%, E-value=1e-75, Identity=33%"; Hit description=BRI1 -KD interacting protein 135
MAEDAPPAAPVMTPEEVQAETELRMRDIGQRFGAIPEDPDELLRLLEEAEIWLSRVDQSPPESMYNALRPTMAVLITNELLEHPDPNVKVALTSCLTEVTRITAPEAPYDDDVMKDVFKRVVETFAELDDMNSPSFARRVSILDSVARESDDVHAELASFLLQNLTKEAQETLPASFGLAERVLGLCRDKLKPVFHELLKATLLDEYSNVVTMLFQDASDAGENNVDASGKDMSLTERGSISPVIEILTGDEHGIYTVITGMYIQDCRVWLEQKSEALNPAISKGSYIDHNITCEISKQLKVNFSESLFLMSHDQETSKVDRNVNCLGQEGTSPSSTPTTAISNGGAPIDNVKSPDEPDSSKQKQELTSGDEQTPDSSKQKQELTSGDEQTPNSSKQKPELTFLDKQTKSSEQLVSCDVEVQEPVTVGTEKLSDINSKKDHKLGSSTGSEMTEQPKVVKDNESLVASELSPETNDGDKKQLTESGNITADESSKPIDTKPASVKPKRGRPPAAKSQEKKPVGKKQASNLKSPKLDPVTDSVGRATRQLNNDVAKSSSTKAVDGESGKKQHKTSMKFQKEDAASDKDTDDDISLKEMVSPTRIDKSKGQQEDRGTSSKRKRLLEAQDTPVSKKNKMLDKNLIGSRIKVWWPDDKMFYAGVVESFDASSKKHKVSYDDGDVEVLALKKERWEFIAEEQGADPDVASNMPRGRKAKGSSVQQMEGKTGTPQSDVKNSPKKRGRPKGVRSSNNMPNADSSVTPARLKGKSVEKDTEETPKTGSNSKKEGAKPSRSTGKAKDSVVKASSKDEADSTDNSKDAAASEDKDSKDEVKSSEAIDGSKTNGLSTKRKPDENEGESSEEEKASTKTTTRKKRRRKSRN

SEQ ID NO: 53453 - protein, 1371 aa, Zea mays
  Coding DNA Sequence Number=SeqID_11674
  Gene Ontology: Mol. function=nucleic acid binding; Cellular component= chromatin; Biological process=DNA integration
  Homolog annotation: Hit_ID=Q7XEA3; Match level="QueryCoverage=99%, HitCoverage=77%, E-value=0.0, Identity=46%"; Hit description =Retrotransposon protein, putative, Ty1-copia subclass
  Pfam annotation: Domain name=RVT_2; Domain location=880-1136; Score =529.9; E_value=2.8e-156; Accession=PF07727.4; Description=Reverse transcriptase (RNA-dependent
  Pfam annotation: Domain name=rve; Domain location=510-673; Score =172.5; E_value=1e-48; Accession=PF00665.16; Description=Integrase core domain
  Pfam annotation: Domain name=zf-CCHC; Domain location=250-267; Score =15.6; E_value=0.0026; Accession=PF00098.13; Description=Zinc knuckle
  Pfam module annotation: Pfam domain module=RVT_2::rve::zf-CCHC; Domain location=880-1136::510-673::250-267
MGDTSTKSTVKESSIMWPMLTSDNYTEWAMLMQCNYEALEIWEVITPGDKPKRAQDRQAMSVLLRSVPKEMWQTLGRKNTVKEAWEAVKTMRVGADRVKEFKEGESVDDFGMRITNLVGNLKILGETIDDFWVVKKFLRVAPSRFSQIVVSIEMFVDLKTLTVEELVGRLRAVEERFDDKIDQIVDKAGWLLLAEEVWLEKHKHRFHPGNKAGGSGGSSVSSKGKAIARSDGGASGQIRLTSMGTPRRKGRCRNCGIYGHWAEDYKRPKKEKKEVAQPEANVAIGGGDHCGALMVATCDIEQEPSQVHLTEKVTPVLVPDGVWVLDTGASNHMTGNRSVLSQLNEGVKGSVKFGDGSKVRIQGMGSVVIQDRQKGHKVLTDVYFIPELKSNIVSLGQLEEKGFKYVGENGRLCVYDQEKTLLISAPRVGNKLYLAKFGLDSPVCLQAQVDDVSWRWHARFGHLHFKALSDLKSKNMVTGLPTVTRVEKVCDGCALGKLHRSPFPKMSSYRAEKGLELVHADLCGHISPKSLGGASYFLLVVDDHSKYMWVELLKSKDQALEYFKKIKNRAEVECDGKLKALRIDRGGEFNSNLFSIFCSEGGIKHYTTTPYTPQQNGVVERRNQSVVEMARCLLKTMALPSDFWGEAICTAVYVLNRCPTKSLNNMTPYEAWHGRKPNVKHMRIFGCVAYVKLVGPGLTKLSDRSAKMIFIGYESGTKGYRFFNPATSKLVVGRDAIFDENVSWDWANAAGNTDQLSGEFIVHYEDSDSNPTIGDPEPTEQSAEDAVSEDQGGAADYDQAAPGTPVTPQSSVAQGHVFVTPPSQDSAFSDQGPHRYRLMSELLDTTDEVQDYEYSGMCLLAADGPASVEAALEEGCWRDAMIAELKSIEQNKTWAYANLPKDHKAIGLKWVFKVKKDPSGKIVKHKARLVVKGYAQVQGVDYDEVFAPVARMETVRLLLALAAQGEWQVLHMDVKSAFLNGNLEEEVYVHPPPGFSDPKHSGKVLRLKKALYGLKQAPRAWNARLDQELKFLGFNRSVEDHAVYRRGTGNSLILVGVYVDDLIICGPDSKNIVVFKQQMKKSFDMSDLGLLTYYLGLEVKQRPGEITVCQSAYAKKIVEISGMKGCNPADTPMEQHIKLLPGKSELVANATKYRSLVGSLRYLVNSRPDLAYSVGMISRFMETPNSEHWGAMKRIIRYVAGTTKLGCKYVKGALSDLVGFTDSDHAGDLEKRKSTSGVLFFYGGNAVSWSSQKQKVVFLSSCESEYIAAATGAYQGVWLSRLVADITCSDVKKFKLFIDNRSAEELSKNPVFHKRSKHIDTRYHYIRECVADGVVEVQHVSTEDQLADILTKPLARIRFAEMRRQLGVVNI

SEQ ID NO: 53454 - protein, 68 aa, Zea mays
  Coding DNA Sequence Number=SeqID_11675
  Subcellular localization annotation: CTP_CleavageSite=58; ConfidenceScore=5.58e-01
MDHWIHRIPLPSALIPRVGTSRRRSTPASPRRRPVRDFPVFPTATNRCTVRRYLWNAQCDMHGKSAAV

SEQ ID NO: 53455 - protein, 95 aa, Zea mays
  Coding DNA Sequence Number=SeqID_11676
MSHRPWHGVRRCRASPGDRPFDVVVIRKLDDELRDIVADVLGSRLAMHGREVPTVSATQEDTHGENLHDPHCVDHKAAEVDGDVAPVLIGKEVPA

SEQ ID NO: 53456 - protein, 112 aa, Zea mays
  Coding DNA Sequence Number=SeqID_11677
MAVPKGRARQLPKRTTVTVPEVHMWWLLSKAPVGDGSQGARAAGPQEARIAAVARSVHRQRHLPDVSVTVRPSTSNYFRAPTSRTPLRQRGSFDDDLLRSSGFEASDDDDLI

SEQ ID NO: 53457 - protein, 194 aa, Zea mays
  Coding DNA Sequence Number=SeqID_11678
MRDMTSIVVVQPLAEVVVDIAVLKVVKEAVSDRGGFVLPSWAQDGQRSPSLVKRALLVVPSGGWFRHRPKQYYCCNEVLVGLVKGRRGVRPSIFHDTTIMELLEVRDLTPRGGLNCTLFTWLSIMRDWCRGIGPPEVCQASFHHVLLVPGVEALPSRVVPLIVGAVVVGAVGEEVVTCGQEMSHGPRITESGEV

SEQ ID NO: 53458 - protein, 145 aa, Zea mays
  Coding DNA Sequence Number=SeqID_11679
  Gene Ontology: Mol. function=metal ion binding; Biological process =metal ion transport
  Homolog annotation: Hit_ID=Q9C9A3; Match level="QueryCoverage=82%, HitCoverage=81%, E-value=2e-14, Identity=38%"; Hit description =Putative isoprenylated protein; 28702-28078
  Pfam annotation: Domain name=HMA; Domain location=26-88; Score=58.7; E_value=1.9e-14; Accession=PF00403.16; Description=Heavy-metal -associated domain
MDEENDGSTQSHTVCFFLSSAKSITVEMKVYMHCDACERKVRRTISKVEGVGTVEVDREENKVTVTGDFEPEKVVRKIRKKTGKKAEILVREENEEDEGNGEETYVPYPLLYPDADIPDEFQTYRPERWNFHYFDDENSQACTVM

SEQ ID NO: 53459 - protein, 386 aa, Zea mays
  Coding DNA Sequence Number=SeqID_11680
  Gene Ontology: Mol. function=aminopeptidase activity; Cellular component=integral to membrane; Biological process=aromatic compound metabolic process
  Homolog annotation: Hit_ID=Q6YSE8; Match level="QueryCoverage=91%, HitCoverage=98%, E-value=1e-137, Identity=70%"; Hit description =Putative membrane protein
  Pfam annotation: Domain name=Abhydrolase_1; Domain location=150-380; Score=-11.6; E_value=0.063; Accession=PF00561.10; Description =alphabeta hydrolase fold
  Pfam annotation: Domain name=BAAT_C; Domain location=177-341; Score= -84.7; E_value=0.059; Accession=PF08840.1; Description=BAAT  Acyl-CoA thioester hydrolase C t
  Pfam annotation: Domain name=Peptidase_S9; Domain location=136-342; Score=-26.0; E_value=1e-05; Accession=PF00326.11; Description=Prolyl oligopeptidase family
  Pfam module annotation: Pfam domain module=Abhydrolase_1::BAAT _C::Peptidase_S9; Domain location=150-380::177-341::136-342
MAGWLKALAYSAGGVAVAGLAALVALQERLVYVPVLPGLARSYPITPARLGLIYEDVWLRAADGVRLHSWFIRHSPSYRGSDWLGAGKGYLEPGVGFWSPRVGMDACPSCLAPGLQSNSPAILVYSSEIGQDNIAHRLEFVRLMMQRLQCNVFMLSYRGYGESDGYPSQKGITYDAQAALDHLAQRNDIDTTRIVIFGRSLGGAVGAVLAKNNPDKVATLILENTFTSILDMAGIMLPFLRWFIGGSSSKGPKLLNCVVRSPWNTLDIVGEVKQPILFLSGLQDELVPPPHMKMLYDKASDHNRNCRFVDFPSGMHMDTWMSGGDRYWRTIQLFLDQYAPGVQNHDASFKSEITEDVFGTFLKMWLYDSPIDRLSVEVRPCFNLTG

SEQ ID NO: 53460 - protein, 247 aa, Zea mays
  Coding DNA Sequence Number=SeqID_11681
  Homolog annotation: Hit_ID=Q9LHC4; Match level="QueryCoverage=49%, HitCoverage=48%, E-value=1e-46, Identity=72%"; Hit description =Arabidopsis thaliana genomic DNA, chromosome 3, BAC clone: T13O13
MVGDRRNQHDGQGRRCHCGNHSETGNGEGNAAVGGEGDGRVRRGVVRTCEDDDAARRGSGGGALGPDLRSGGLAAAAVLLVNDRQKCGKISLGVTNYDAEFERLTLGSTLELKCNSELTPFDLLGEKDAQHKGKLTSKWKPTTKGTLKRTYRVRSTDEGRRVLKEIASVLSQDDHFVDASSHKGCQVRRESAHGESVCCYNVRALFDELPTPHLLLEITPFPAGQLTDNDYRKAERLEMVLRLSASI

SEQ ID NO: 53461 - protein, 329 aa, Zea mays
  Coding DNA Sequence Number=SeqID_11682
  Gene Ontology: Mol. function=molecular_function; Cellular component =anchored to membrane; Biological process=biological_process
  Homolog annotation: Hit_ID=Q9FLU2; Match level="QueryCoverage=67%, HitCoverage=90%, E-value=3e-87, Identity=64%"; Hit description =Thaumatin-like protein
  Pfam annotation: Domain name=Thaumatin; Domain location=32-246; Score= 291.5; E_value=1.6e-84; Accession=PF00314.8; Description=Thaumatin family
MGEPRARRLCLLALVLVQWHHVSVAMTFTISNYCPHPIWPGTLAGAGTSQLSTTGFKLEPGQTAQLAAPAGWSGRIWARTGCVFDAEGAGVCQTGDCGGRVECRGSGATPPATLFEVTLGQGGGQLDFYDVSLVDGYNLPVVAIPRARQGACNATGCMADLNRSCPTELQVDCGGGAIACRSACEAFGQDRYCCSGAYGTPDACHPTVYSSIFKSACPRAYSYAYDDSTSTFTCKALDYTIAFCLPTSGIKKSDAMFLGAQMDGQSTGDGSAGAPPIYSNNGGYKPPIYNYGGGGSRWPATTTSSASSKRCMQPWLLLVLVSFSLKALG

SEQ ID NO: 53462 - protein, 223 aa, Zea mays
  Coding DNA Sequence Number=SeqID_11683
  Homolog annotation: Hit_ID=Q1SV83; Match level="QueryCoverage=51%, HitCoverage=26%, E-value=6e-18, Identity=42%"; Hit description=IMP dehydrogenase/GMP reductase
  Pfam annotation: Domain name=ATG16; Domain location=22-128; Score= -50.3; E_value=0.076; Accession=PF08614.1; Description=Autophagy protein 16 (ATG16)
MWIASRLFLAAAALLMAVLLLVAGPVAAQDAAVEGVAPPAEEIAANARAKEAAVLAAELVQLRAKISALESRIAEQNLEFKTKNDAIETLNMIVKEKSQKIATMQNEVTSLEAKGSLAAEEQASKANALAIELKKQTEKLKKDITEQKIKKAALEARAGNADKKVQELNMKLEKLREFHGMKNDTNLGGTRCLYIEKMGTQICLDEDFNLVVSAYIHILNLLS

SEQ ID NO: 53463 - protein, 412 aa, Zea mays
  Coding DNA Sequence Number=SeqID_11684
  Gene Ontology: Mol. function=DNA binding; Cellular component=nucleus; Biological process=regulation of transcription
  Homolog annotation: Hit_ID=Q9ZQ25; Match level="QueryCoverage=48%, HitCoverage=56%, E-value=1e-70, Identity=68%"; Hit description=NAM (No apical meristem)-like protein
  Pfam annotation: Domain name=NAM; Domain location=34-170; Score =306.2; E_value=5.8e-89; Accession=PF02365.6; Description=No apical meristem (NAM) protein
MAEGPCVLHTTGCMEASAAAGGGRESNKKEEESLPPGFRFHPTDEELITYYLRRKIADGRFTARAIAEVDLNKSEPWDLPEKAKLGEKEWYFFSLRDRKYPTGVRTNRATNAGYWKTTGKDKEIYTAGHQLPAAATTPELVGMKKTLVFYKGRAPRGEKTNWVMHEYRLHSKSLPKSNKVHARTCLRTLRMSGWCCRVFAKSAAAKKYPSNNAHALARSSHHHPYALDVFPPLLPTLLQQDPFVARRHHHHHPYMPPADLAELARFARGTPGLHPHIQPHPGTSSSAPYMNPAVAAPPFTLSGGGRLNLNLGATPAMPSSPPALHAMSMAMMSGQTEPSCASTGRQYHQVMAGEHHQQKQMATAAAAGLGGCVIVPGADGGFGADSAAGARYQGLDVEQLVERYWPAGGYQV

SEQ ID NO: 53464 - protein, 80 aa, Zea mays
  Coding DNA Sequence Number=SeqID_11685
MGKSKKGGSSSHHSGDMRKREPTPPSEDFDDSEYSEEEFSSESEGSPVHASPLASSDDSDDSQGIAADDSDDSLVGRETT

SEQ ID NO: 53465 - protein, 167 aa, Zea mays
  Coding DNA Sequence Number=SeqID_11686
  Subcellular localization annotation: CTP_CleavageSite=47; ConfidenceScore=5.21e-01
MAQKTLSILVPSDPFVPHALRWPQLHVRRNREPALPRPRCGSPAPARSAAVPGAFGPAPTYLGAPAARLLCPLNPPSPRGPAPRARLAPPSRRGRPRGGPALGAPRRARPSAMWPGDQPTRAVPRPPARPRCLLAARSVARAQLGPGVRAARSWRVSVNEMETQLIN

SEQ ID NO: 53466 - protein, 62 aa, Zea mays
  Coding DNA Sequence Number=SeqID_11687
  Subcellular localization annotation: CTP_CleavageSite=17; ConfidenceScore=5.25e-01
MAAPVVACSPALRVQVKAAVNAALFRVPASLSFPRQRNKLQVYLRFEGEEYRRDAKVNAQSA

SEQ ID NO: 53467 - protein, 72 aa, Zea mays
  Coding DNA Sequence Number=SeqID_11688
MKELFRIRRVRIDGKLTLCLGKLRDADGARQRDAQAESAHASKPGERGRSKTTGDGYTRTDGAEDSYGGQAD

SEQ ID NO: 53468 - protein, 313 aa, Zea mays
  Coding DNA Sequence Number=SeqID_11689
  Gene Ontology: Mol. function=catalytic activity; Cellular component =intracellular; Biological process=metabolic process
  Homolog annotation: Hit_ID=Q10A88; Match level="QueryCoverage=28%, HitCoverage=22%, E-value=6e-37, Identity=78%"; Hit description =Rhodanese-like domain containing protein, expressed
MELAATRVGGDNCRPEHDVGFGSGVEHGACGDHGAASGVHVDERGLEDQAEVGAPAAPAEELRVELAAVAVQAHGGAGREQLGEGVLGGCAKWEHARVERERPVAVPGAEEGGYHGGVGHGVWARHFAEHPGGAVPLLAVGIEDEEGASEDGVGGGQATTARLGMYLVREAAVAAPEQGGIGELVGGSDGGVGSENAAEDEPEFVPLQEEEEEEEDARFVVVTFYKFVPLFDPHAEVARHLNFLQGRDIHGRIYLNEKGINAQYSGPHKDAVAYADWVKKHHQFSDMLVQTSPAVTGHAFPRLKLRYKPSLVQ

SEQ ID NO: 53469 - protein, 109 aa, Zea mays
  Coding DNA Sequence Number=SeqID_11690
MVPTHVKRHSSLPTGPPERAGPRIQGRNKNSAPLPVPHGADPAASQGRCLHSTADCPPDPTTGFVPRLLCSHPARRTHATPHACFAPGQPCDFAHVAGAEGAIHVPRIN

SEQ ID NO: 53470 - protein, 138 aa, Zea mays
  Coding DNA Sequence Number=SeqID_11691
AALTLEKIGSKFVLSDGEPLVFLPLVVLLSRGCEDSPCNRLLHVGIFPHLSNAVQPLSSSPEQQRSTPAPSICASPHRGVTSSASPHSSSIHRARRAPAQPCRVSKPAIDARLCFRVAGTQSFSPRQSACLTVTGTPR

SEQ ID NO: 53471 - protein, 168 aa, Zea mays
  Coding DNA Sequence Number=SeqID_11692
MELNSRCQGPRGSITVVALGLLVRRWLQRVRWQMLKATLVAVDLGTQGRTLALSDGHQQPRQPVVSKCEHGACPTGNKHQLYDSGGREGAPLVIDKGALLSSTTFRYRLPQGRLRWSLLRSAPGVHPCALLSSRWHLWDPDGCTHANPMCGGCPSYLKGSKIKSRNHI

SEQ ID NO: 53472 - protein, 220 aa, Zea mays
  Coding DNA Sequence Number=SeqID_11693
  Subcellular localization annotation: CTP_CleavageSite=56; ConfidenceScore=5.13e-01
MRWLFFTFAGRLSFLIAPGSLRFRCLAGLRKRRVGNAEMRINNGEAGRRRAGGEVMDDMAAGCGCGARGKETTATLGAYQLLDCGLRACAAKGRLEGGEASPKGDPISALLFDLVGDALTKIFSKAFWRGQKSKCPTGYFKTVQQVALVRAHSLRESIAIRKKQRMIMECAARGLKRTQKPVTKLDISSKSPCPNPIPSSTVSLLATKYHLSSLSGLQFL

SEQ ID NO: 53473 - protein, 576 aa, Zea mays
  Coding DNA Sequence Number=SeqID_11694
  Homolog annotation: Hit_ID=Q9FM80; Match level="QueryCoverage=58%, HitCoverage=68%, E-value=1e-124, Identity=64%"; Hit description =Arabidopsis thaliana genomic DNA, chromosome 5, P1 clone:MDF20
  Pfam annotation: Domain name=mTERF; Domain location=174-486; Score =50.1; E_value=7.2e-12; Accession=PF02536.5; Description=mTERF
  Subcellular localization annotation: CTP_CleavageSite=37; ConfidenceScore=5.38e-01
MALQLQLPRPLAAARPSILLPSPAHGASASATPLHARAGGVAFSLQTNVRLLKPNRRVRRSRDPYYDLDEDDEEEAEFDEDDEDDEEGYESDDDLSGLEYPGVLYSNSPRASSKKPETVVTSCLNSNTPGLQTPVVKENWEGRQTKTHDKYGSPGRSKSMHPRSKVGRSSTDLKNMDREVELKNASISRSLFQKLQEEYDFDDKWLPLIDYLCTFGLKESHFTYIYERHMACFQISQASAEERLDFLLNAGVKSKDMKRILVRQPQILEYTLGNLKSHVDFLVSIGVPNRRIGQIISAAPSMFSYSVEQSLKPTVRYLIEEVGIEESDVGKVVQLSPQILVQKIDSAWKSRSLFLSKELDAPKHSIVKMVTKHPQLLHYSIEDGILPRLNFLRSIGMRNSDILKVLTSLTQVLSLSLEDNLKPKYLYLVNDLKNEVQSLTKYPMYLSLSLDQRIRPRHRFLVSLKKAPKGPFPLSSFVPTDERFCQRWAGTSLEAYHTFRQRLLLTSFAEKSGRKTLVSRRVYTASLTIAYTYRPYHLPNGEKSSPNSLNQLQMDDNLREMHYCQSPEWLDGHLVT

SEQ ID NO: 53474 - protein, 755 aa, Zea mays
  Coding DNA Sequence Number=SeqID_11695
  Gene Ontology: Mol. function=nucleic acid binding; Cellular component= chromosome, pericentric region; Biological process=regulation of transcription, DNA-dependent
  Homolog annotation: Hit_ID=Q8W121; Match level="QueryCoverage=98%, HitCoverage=98%, E-value=0.0, Identity=89%"; Hit description =Chromatin complex subunit A101
  Pfam annotation: Domain name=DEAD; Domain location=217-385; Score= -18.5; E_value=0.0002; Accession=PF00270.19; Description=DEADDEAH box helicase
  Pfam annotation: Domain name=Helicase_C; Domain location=570-652; Score=42.2; E_value=1.8e-09; Accession=PF00271.21; Description =Helicase conserved C-terminal domain
  Pfam annotation: Domain name=ResIII; Domain location=213-379; Score= -19.6; E_value=0.002; Accession=PF04851.6; Description=Type III restriction enzyme, res subunit
  Pfam annotation: Domain name=SNF2_N; Domain location=219-514; Score =387.2; E_value=2.5e-113; Accession=PF00176.13; Description=SNF2 family N-terminal domain
  Pfam module annotation: Pfam domain module=DEAD::Helicase _C::ResIII::SNF2_N; Domain location=217-385::570-652::213-379::219-514
MGTLSMSDASPIPAKNWDASPVKLEAQGGDAILGMKEEERLLELVKDEQADGILDSLPIDLEAKNGDASLITEAMKKEEEQLEDTRIKVQEEEEARKREEAARLAFDPETQYNKLDELLTKTQLFSEFLLENMDRIADESVETQAEQPQVEEKKKGRGRKRKAKPQYNDKKAKTAVAAMLTRSREERLAEDSTLSEEERWEKEQANLVPLLTGGKLKSYQIKGVKWLISLWQNGLNGILADQMGLGKTIQTIGFLAHLKGKGMHGPYLIIAPLSTLSNWVNEISRFTPSLVSIIYHGGKAARAEIRRKFMPTNVGPDFPIVVTSYEMAMFDAKFLAAYKWKYVVVDEGHRLKNAKCLLLKQLKRIPMDNKLLLTGTPLQNNLAELWSLLNFILPDIFSSHQEFESWFDFSGGNEETDEKKRLHVVSKLHAILRPFLLRRMKEDVEQMLPRKKEIIIYANMTEQQKQIQHHLIEKTFDNYLHEESDIILKRPGIRARLHNLMIQLRKNCNHPDLLESPVDSTGLYPPVEKLLEQCGKFQLFDRLLNFLMAQKHKVLVFSQWTKVLDIIEYYLDSKGHAVCRIDGNVKLEERRRQIAEFNDVNSSMRIFLLSTRAGGLGINLTAADTCILYDSDWGRMMKRAFGKLKLEHVVIGKGQFEQDRAKPSALDVIPPTHPNLEGELLALLKDEQTEEDRIVQTDISDEDLQRLMDRSDLMGPPPGAGGANAASPLVPLKGPGWEVVVPAKSGGGMLSSLTS

SEQ ID NO: 53475 - protein, 135 aa, Zea mays
  Coding DNA Sequence Number=SeqID_11696
  Homolog annotation: Hit_ID=Q6QP54; Match level="QueryCoverage=45%, HitCoverage=21%, E-value=5e-14, Identity=78%"; Hit description =Putative kinase
MALPVDVAGLCPRSGDVEAPPKPRSSLSSMAEAEAEPVGWARRRLFGRGQGGVRALGSGEAELHSRLSLLDLEEEVLLLESTLVSPPRLTHDERCFLPATCVAFATLARMTVPRLSLGRRPPSATEDVLPFSDDP

SEQ ID NO: 53476 - protein, 160 aa, Zea mays
  Coding DNA Sequence Number=SeqID_11697
MAIYRSPKQYRKHTEYMISGQRQRYPTELLEISRRSSLSIAALPHLVLIARHASGLRPSATLLHLPWPAFAAAGRRSRRRCRRFTTTVTRSSPSSRRPRCSRSLQPRHVQSEGSGVGGDGLDDATEIEEPEQWLSGGGRRPPDVLEVATAATRPSRGPRG

SEQ ID NO: 53477 - protein, 156 aa, Zea mays
  Coding DNA Sequence Number=SeqID_11698
  Gene Ontology: Mol. function=protein-methionine-S-oxide reductase activity; Biological process=protein metabolic process
  Homolog annotation: Hit_ID=Q84Z01; Match level="QueryCoverage=85%, HitCoverage=22%, E-value=5e-34, Identity=56%"; Hit description =Putative CSLC9
MRIEPKSPNLPPLPAAAQAHPALLLLHALLHRAAADHVRPGLGGVLRAGAHVAPQRAAGARLVPFRRPVPAVREHHMSVTKFNAMVLGLFQLRGAYEWVVTEKSGRPSERAARTTPTKRREEEAGTAEAARRRRRRYDRMYKKEPALLLLTDAARM

SEQ ID NO: 53478 - protein, 583 aa, Zea mays
  Coding DNA Sequence Number=SeqID_11699
  Gene Ontology: Mol. function=transcription factor activity; Cellular component=nucleus; Biological process=regulation of transcription, DNA-dependent
  Homolog annotation: Hit_ID=Q10EE7; Match level="QueryCoverage=57%, HitCoverage=46%, E-value=1e-98, Identity=58%"; Hit description=AP2 domain containing protein, expressed
  Pfam annotation: Domain name=AP2; Domain location=265-335; Score =127.3; E_value=4.4e-35; Accession=PF00847.10; Description=AP2 domain
  Pfam annotation: Domain name=AP2; Domain location=346-412; Score =97.0; E_value=5.6e-26; Accession=PF00847.10; Description=AP2 domain
  Pfam module annotation: Pfam domain module=AP2::AP2; Domain location =265-335::346-412
MTNNNNGGNDTNAAASGWLGFSLSPHMDEHQLQLQQQQQHGLFFPSVTAGAAASYGLGGGLATSASPYYTPQLASMPLKSDGSLCIMEALRRSDQQDHHGPKLEDFLGAAAAQSQAMALSLDNPAAASSFYYYYYGGGGGGGPGHHHGSFLQPPCVDLYGGASAGSQLVADDEAAATATAMASWVAARAENGALLAAAGQPHQHALALSISSGSSPSSCVTAHPSSEYGAAAAASMDGGRKRGGAAGQKQPVHHRKSIDTFGQRTSQYRGVTRHRWTGRYEAHLWDNSCKKEGQSRKGRQGGYDMEEKAARAYDLAALKYWGPSTHINFPLEDYQEELEEMKNMTRQEYVAHLRRHHQHGRWQARIGRVSGNKDLYLGTFGTQEEAAEAYDVAAIKFRGLNAVTNFDLTRYDADRIMASSTLLPPDLARRRKDDDPDCGVTAAAAALVQQAAAAAAAAAPPPPPRDGSQHQHHHDVLSGEACFSVLHDLVATAADGGHHHSNAAQHVPVSSAASSLLTSIGNGNYREGSPDRGLSMLFSKPPPAHAASAKPVSPLGSWASTAASARAAVSIAHMPVFAAWTDA

SEQ ID NO: 53479 - protein, 193 aa, Zea mays
  Coding DNA Sequence Number=SeqID_11700
MGLCMSRGETTPTRAAPPPSKDTALVLMPSGEMREYPPHTATAARVLQDASASASADWFLCDADRVGFEGPVPALGGAEALRAGQIYFVLPAAARRRGLRREDVAALAVRASAALSARHSCARGKRSRRCGAVAPLVFAPPPPPEDEEEEHGRWETFVAARKAPPVRRHSRPTSRRSRSARWRVSSEGSDWRG

SEQ ID NO: 53480 - protein, 579 aa, Zea mays
  Coding DNA Sequence Number=SeqID_11701
  Gene Ontology: Mol. function=transferase activity, transferring glycosyl groups; Cellular component=membrane; Biological process =cell wall biogenesis
  Homolog annotation: Hit_ID=Q6YUI8; Match level="QueryCoverage=82%, HitCoverage=83%, E-value=1e-171, Identity=64%"; Hit description =Putative xyloglucan fucosyltransferase
  Pfam annotation: Domain name=XG_FTase; Domain location=63-553; Score =529.5; E_value=3.6e-156; Accession=PF03254.4; Description=Xyloglucan fucosyltransferase
MASGAARMVSKPVDDDLKAAAAAPEPWLGREKAGCSRGALLVGGLLLACFVLGRESASSMPWLQIDVAKAKLTDTTNGTAGVAPPLTPFQLQGLPRTLPVGRDELFGGLLPAGMDRRACRSRYEAWRYYKHFPYAASAHLQSKLRAYEARHRRCAPGTPLYAKAVEQLRSGRSAEGLECTYVVWLPFDGLGNRMLSMVSGFLYALLTGRVFLAALPAAGSGDLFCEPFPGTTWRLPVEDFPVPDLVPRGQSIERSYTRLLDAKAVGPAANATALGVPPYVYLSLGWQLKDPLFFCGEHQQVLRDVNWLLLYSDLYFAPSLYGVAEFQDELRRLFPSKESVSHLLSRYLLHPTNPVWRLATTYYRSYLAPAKRRIGVQIRMFGFGSIPVDDMYSQILACSRQEHVLPETDDDATGGNEAAAAASSEDGSNSTAILVASLYADYYERLRRRYYEHPAKGGERVAVFQPSHEERQATDNMAHNQRALAEIYLLSFCEELLTSGRSTFGYVSSSLAGVRPTILLTADGHKVPEPPCRRAVSMEPCNLTPPLRVHCQGKPVDKEDLARHLRVCEDSKVSVKLFD

SEQ ID NO: 53481 - protein, 526 aa, Zea mays
  Coding DNA Sequence Number=SeqID_11702
  Homolog annotation: Hit_ID=Q2R4W1; Match level="QueryCoverage=50%, HitCoverage=56%, E-value=3e-15, Identity=31%"; Hit description =Expressed protein
  Pfam annotation: Domain name=DUF1719; Domain location=110-351; Score =237.0; E_value=4e-68; Accession=PF08224.2; Description=Domain of unknown function (DUF1719)
MAEAVGSALVQGAVSQILSNLIDGHEEERGEKSKDDTETNLERLEMAHIRLGAALETSERWRGVTADNASLLRWRRNLKRAARECDAMLHECKRRVLEDEATEREASRGRLAFPRRAARAARALVSSALGLNNLQPSRAAVRRFEWYADGAGEFLRFVELGCCAPRCRVPSAADAFVRNLAAGRKLQHVVELGDRCTFFLLWLPFFISDPPAEERGVEVVLFFIQKDGLAPQNSFYFSVTLQLSESTDVLGVAVECLDLYTPLFGSRVETVRNMLTRLPAQDLSCSWAPFLDSRQKRHWENLHSCVSQWHRPDPSCCRQHELHCGSSSNTSTPPDVSLLASVIGVHLQCQVALQDEGSLQYLTAGLLFAPHAGSSQDLRPAADDDSASSAVVVSHHSSDDEHRRAHAGVTLAQVEEVTLPMAVDYFRRYADAPVYRMLWKARHGAAYIQVAKAASGTETQSARRGGSRARSAAMRRRQEEEEPYVIPHFLSLWAAHAPSRLQGSIARWMRKEKENRLAPSQMRLEF

SEQ ID NO: 53482 - protein, 103 aa, Zea mays
  Coding DNA Sequence Number=SeqID_11703
  Gene Ontology: Mol. function=transferase activity, transferring glycosyl groups; Cellular component=chloroplast; Biological process =glucan biosynthetic process
  Homolog annotation: Hit_ID=O48899; Match level="QueryCoverage=86%, HitCoverage=12%, E-value=4e-36, Identity=78%"; Hit description =Starch synthase isoform zSTSII-1
MDESEKGDRGCGPVDEFPYMNLPQDYLQHVELYDPVSVEHANILDVGLKMADRVVTVSRGYLWELKTMESGWGLHDIIRSNDWKINGIVNDINALDSNYFCII

SEQ ID NO: 53483 - protein, 237 aa, Zea mays
  Coding DNA Sequence Number=SeqID_11704
MARPRLRARAWAAPALSGRGPVPDRTSAVAERAALARAGNRHAAKAGRAEDGTATHRPAMGPGHRPPCPHRGRGWPPRQRLGRAAARHGRATAPAPGPGSRAPPAPGPGSRTPWPGHRARASARATAPAPRPGSRHTPRAMAGRRACAAGARHRARAWPPWSPLLAGPPAGEPGLGAARAWLRLGPPQPRRTSPRPLALGLPAPPPGDHAYAHLGRRTRHREPPPGVAGYCGKGMSS

SEQ ID NO: 53484 - protein, 462 aa, Zea mays
  Coding DNA Sequence Number=SeqID_11705
  Gene Ontology: Mol. function=transferase activity, transferring glycosyl groups; Biological process=metabolic process
  Homolog annotation: Hit_ID=Q6Z478; Match level="QueryCoverage=98%, HitCoverage=95%, E-value=1e-119, Identity=52%"; Hit description =Putative flavonol 3-O-glucosyltransferase
  Pfam annotation: Domain name=UDPGT; Domain location=7-462; Score= -53.6; E_value=6.3e-08; Accession=PF00201.9; Description=UDP -glucoronosyl and UDP-glucosyl transferase
MPMLEAGKRLLGSVGGGRALSVTVLVMRPPTEHEARGLESVIRRAEEAAAGLDVRFHRLPGVEAPAGCAGPVEFISRVVELHAPHVRAAVAGLACPVAALLLDLFCTPLLDVARDLVAPAVPPPAYVYFTCSAAALSFFLRLPAMCDEVAGEFGDMDGAADIPGLPPVPPLALPTPIMRRELPECKWYAYHGRRFADADGILVNTAAELEPGVLSAIARRGAGCPAAPALYPVGPVVSFAPPTEPPHPCVRWLETQPAASVVLLCFGSRGFFGAAQAREVARGLERSGHRFLWVLRGPPAPGTWSPVDADLAELLPEGFVERTRGRGLVWPAAVPQKEVLAHAAVGGFVTHCGWNSVLESLWFGVPMVPWPLYAEQHLNAFTLVAAMGVAVAIDVDRRRGNFVEAAELERAVRALMGGDNEEGRKAREKAAEMQAGCRKAVEDGGSSTATLTKLSNALCRND

SEQ ID NO: 53485 - protein, 571 aa, Zea mays
  Coding DNA Sequence Number=SeqID_11706
  Gene Ontology: Mol. function=protein serine/threonine kinase activity; Cellular component=phragmoplast; Biological process =protein amino acid phosphorylation
  Homolog annotation: Hit_ID=Q5SNF8; Match level="QueryCoverage=82%, HitCoverage=79%, E-value=0.0, Identity=87%"; Hit description =Putative serine/threonine kinase 38
  Pfam annotation: Domain name=Pkinase; Domain location=109-443; Score =269.1; E_value=8.6e-78; Accession=PF00069.15; Description=Protein kinase domain
  Pfam annotation: Domain name=Pkinase_C; Domain location=461-507; Score=9.0; E_value=0.058; Accession=PF00433.14; Description=Protein kinase C terminal domain
  Pfam annotation: Domain name=Pkinase_Tyr; Domain location=109-421; Score=16.1; E_value=1.8e-13; Accession=PF07714.7; Description =Protein tyrosine kinase
  Pfam module annotation: Pfam domain module=Pkinase::Pkinase _C::Pkinase_Tyr; Domain location=109-443::461-507::109-421
MADAPAAAIPAAEPLAAVAEEGEGEAAAEAVGSTLTMERVAAAKKFIESHYRSQMKNIQERKERRFRLERQLASSQVPKEQQINLMKDLERKETEYMRLKRHKICVDDFELLTIIGRGAFGEVRLCRERTSGNIYAMKKLKKSDMVVRGQVEHVRAERNLLAEVASHHCIVKLYYSFQDTEYLYLIMEYLPGGDIMTLLMREDTLTEHVARFYVAETILAIESIHKHNYIHRDIKPDNLLLDKNGHMKLSDFGLCKPIDCSKLSTLNEDEPMSDDNLRESMDIDSSLSDTANGRRWRSQHEQLQHWQMNRRKLAFSTVGTPDYIAPEVLLKKGYGMECDWWSLGAIMYEMLVGYPPFYADDPITTCRKGSLLSYHQNKAKSAQKAALSLFLADIIVHWRNHLKFPEDAKLSNEARDLISRLLCDVDHRIGSAGADQIKAHPWFRGVAWDKLYEMEAAFKPQVNDELDTQNFMKFEELMNLVSPTSLFSVAVGKSSSQNRLWTFKEEVQSSRALERTSITAVSAVCPRQISELNQHANAWMMWLQLDNLLIFSQVSAFSIVGKRFVEIHQSF

SEQ ID NO: 53486 - protein, 110 aa, Zea mays
  Coding DNA Sequence Number=SeqID_11707
MPHRRGRASTPLSRDRAGATPAPGPIRARGEMGERRMASSLRRGCPREMNKEAKRKRNKGITPEFDAYLEEKNYTPKFRVLQLTLVVLTSPQVKDRYHRMRQMKDVVMSS

SEQ ID NO: 53487 - protein, 334 aa, Zea mays
  Coding DNA Sequence Number=SeqID_11708
MSMESPESRACIFSIAELITQHESRPIDPQAVVHTRARVPTDPAQLDTGSGHHAHAQRERDDHGRHGHHHPPLLRAAGHRRRFLAAGPRHDGEHGQAEAGEEAEDDERHVGAVQQGRRGQRGARLPLLAGEVDEQHERGGRGEEADGLHGLAHALGLRVLLLVAARILLVARRLDVDRVAGRGRRRARRCGSRRRSRFWCCRRRRRRRSRGRLRLRGRPPAELRVVVLAQQAGPVVEGAGEAEHAGDEAAVAVGGGSEGGRELVEEIHELQCSLRHTSPLHFTVPTALPLPLISCLATHLFMETPMPDHMHARMDMDMERPVYLHFVVVGFLDD

SEQ ID NO: 53488 - protein, 68 aa, Zea mays
  Coding DNA Sequence Number=SeqID_11709
MACPFHLRMPQTPLGNDTGLTDTSPLIVAPKHGFGQDATTTSWANNLFASHSPAEESVHNSNQPGDRR

SEQ ID NO: 53489 - protein, 215 aa, Zea mays
  Coding DNA Sequence Number=SeqID_11710
  Gene Ontology: Mol. function=RNA-directed DNA polymerase activity; Cellular component=mitochondrion; Biological process=RNA-dependent DNA replication
  Homolog annotation: Hit_ID=UPI00004C1731; Match level="QueryCoverage =93%, HitCoverage=14%, E-value=1e-94, Identity=83%"; Hit description =UPI00004C1731 related cluster
  Pfam annotation: Domain name=rve; Domain location=76-208; Score=88.5; E_value=2e-23; Accession=PF00665.16; Description=Integrase core domain
  Subcellular localization annotation: CTP_CleavageSite=68; ConfidenceScore=5.19e-01
MSVYTGLSGATAEQRLLRRQWSPASAFNSRARRSQAHANRHTGHSTVHVRIVRTCEGCQFYARQTHLPAQALQTIPLTWPFAVWGLDLVGPLQKAPGGYTHLLVAIDKFSKWIEVRPLNSIRSEQAVAFFTNIIHRFGVPNSIITDNGTQFTGRKFLDFCEDHHIRVDWAAVAHPMTNGQVERANGMILQELKPRIYNDLNKFGKRWMKELPSVI

SEQ ID NO: 53490 - protein, 82 aa, Zea mays
  Coding DNA Sequence Number=SeqID_11711
MARVACTLRGKRLEATLESLFFSRNLFSLQVFVCELYLLNPAILALLMKGASLLECNIGRLQLSSYLNAVPLRAVVLFCLSL

SEQ ID NO: 53491 - protein, 227 aa, Zea mays
  Coding DNA Sequence Number=SeqID_11712
  Homolog annotation: Hit_ID=Q6QP51; Match level="QueryCoverage=32%, HitCoverage=41%, E-value=3e-16, Identity=67%"; Hit description =Putative growth-regulating factor 1
MQAACNCTKGMHPFDFDASGMAAQAHTSCNWRDSYYVRKTLPPLTPMSRLLDCETGAATRGTPAHGPAVPAKRTGHGSVSRGRRRDSRYGQKWTGSNGGGTGKGDTPKGILLREGSRPRALLLIRGSKTGPSEGFDSRLRALGLRAHYWSEVQRLAPRKGSTAASGHSGSAPTTDQGFEGWPPEGFDSRLRTRRARDDSRYVRYMAEARATLPRYPRTFPRPAGAIL

SEQ ID NO: 53492 - protein, 178 aa, Zea mays
  Coding DNA Sequence Number=SeqID_11713
  Gene Ontology: Mol. function=microtubule binding; Cellular component =cortical microtubule, transverse to long axis; Biological process =positive regulation of microtubule polymerization
  Homolog annotation: Hit_ID=Q6I569; Match level="QueryCoverage=93%, HitCoverage=29%, E-value=2e-54, Identity=64%"; Hit description =Putative microtubule-associated protein
MSMLLFNRFILGENISYFQSEKLGGTLMEQLAKIEPVLEDLRHRRDGRVKEFKAIQSKIVRLQAEISGAIDHGDPAAPVVDENDLSSKRLGELKEHLNDLQTEKNGRLQKIDIQTNSIHEMCNIMSIDLKMALKDVHSSYAELGGSKPMSISNNSLDKLSKKVHVLNHEKKQRLRKVA

SEQ ID NO: 53493 - protein, 92 aa, Zea mays
  Coding DNA Sequence Number=SeqID_11714
MACSLPFALGRLAPCARVFRGIICAAAQHGATYGTGAPRRLACDPHVFICAQQLCGHVVVSLGCLSFTCARTEGFAWGLGRLAHMHTVSMVR

SEQ ID NO: 53494 - protein, 97 aa, Zea mays
  Coding DNA Sequence Number=SeqID_11715
MKKVTLEEDPAEASGDGAAAPGSTSRKSLRARKGDNTHLSPIAERGKRRTNVVEGDQRATIVDRRIERPPSSVTKPRKDHHTLGVSCLALQSTQELE

SEQ ID NO: 53495 - protein, 341 aa, Zea mays
  Coding DNA Sequence Number=SeqID_11716
  Gene Ontology: Mol. function=transferase activity, transferring hexosyl groups; Cellular component=cytoplasm; Biological process =metabolic process
  Homolog annotation: Hit_ID=Q6H7J1; Match level="QueryCoverage=89%, HitCoverage=58%, E-value=1e-81, Identity=50%"; Hit description =Putative indole-3-acetate beta-glucosyltransferase
  Pfam annotation: Domain name=UDPGT; Domain location=1-331; Score= -144.5; E_value=0.0024; Accession=PF00201.9; Description=UDP -glucoronosyl and UDP-glucosyl transferase
TPISSSSTDSDEQDARTVRGLHILPAQVELRVEELPWLVGDSATRRSRFAFWLQTLHRARGLRWVLVNSFPAEAGCPAAAAAAAGDEDEDDGAHRQQGPRVIPVGAALLPAGGIGERTKQQQQCVNINKSPSMWRADSTCIGWLDAQRARSVVYVSFGSWVGSIGPGKVRELALGLEATGRPFLWALKRDPSWRAGLPDGFAGRVAGRGKLVDWAPQQDVLRHAAVGCYLTHCGWNSTLEAIQHGVRLLCYPVSGDQFINCAYITGLWKIGLRLGGMMRDDVRAGVERVMDDGGHLQEKVWALRERVVTPEARRGADRNVRSFVDEITRDHPLVVQLYSVL

SEQ ID NO: 53496 - protein, 546 aa, Zea mays
  Coding DNA Sequence Number=SeqID_11717
  Gene Ontology: Mol. function=transferase activity; Cellular component= nucleus; Biological process=protein kinase C activation
  Homolog annotation: Hit_ID=Q75HW7; Match level="QueryCoverage=97%, HitCoverage=96%, E-value=0.0, Identity=68%"; Hit description =Putative pentatricopeptide repeat-containing protein
  Pfam annotation: Domain name=PPR; Domain location=152-186; Score =13.3; E_value=0.2; Accession=PF01535.11; Description=PPR repeat
  Pfam annotation: Domain name=PPR; Domain location=214-248; Score =41.7; E_value=2.5e-09; Accession=PF01535.11; Description=PPR repeat
  Pfam annotation: Domain name=PPR; Domain location=284-318; Score =24.5; E_value=0.00038; Accession=PF01535.11; Description=PPR repeat
  Pfam annotation: Domain name=PPR; Domain location=420-453; Score=0.1; E_value=7.4; Accession=PF01535.11; Description=PPR repeat
  Pfam annotation: Domain name=PPR; Domain location=74-108; Score=21.4; E_value=0.0033; Accession=PF01535.11; Description=PPR repeat
  Pfam module annotation: Pfam domain module=PPR::PPR::PPR::PPR::PPR; Domain location=152-186::214-248::284-318::420-453::74-108
MAARSLWQLEDAIIARLRTCATFRDLLRAHGLAVRLCLSQSSYVATQIVHICNAHGRAAHAARVFAQIPAPNLHLHNAMIKAYAQNHLHRDAVEVYVRMLRCLPHPSTAGFSVGDRFTYPFLLKACGALAASRLGRQVHAHVARSGCESHAVVQNSLIEMYTRCGDLSTARKAFDGMREKDVVSWNTLISAHARMGQMRRARELFYSMPDKTVVSWTALVSGYTAVGDFTGAVEVFRLMQMEGFEPDDVSIVAVLPACAQLGALELGRWIYAYCSKHGMLGKVYICNALMEMYAKCGCIEEALQLFHGMSEKDVISWSTAIGGLAAHGRAREAVRLFEVMDREGRGDAKWHHIRGALVGLLPRGPRGRRPALLGSNEGRLWCGNPASSTMAASSTSSAGQGESKRALDTIRGMPVPPDGKIWGSLLSACRSHGDVETAVVAAERLVELEPGDVGNLVMLANVYGAAGRWGEVASTRKEIRSRSTRKTPGCSMIEVDNVVREFVAGQDLGPELGGIATVLDILASKLADDEELVDSDCGDAIVFVSG

SEQ ID NO: 53497 - protein, 270 aa, Zea mays
  Coding DNA Sequence Number=SeqID_11718
  Gene Ontology: Mol. function=calcium ion binding; Cellular component =membrane; Biological process=protein folding
  Homolog annotation: Hit_ID=Q54CQ1; Match level="QueryCoverage=89%, HitCoverage=58%, E-value=7e-28, Identity=28%"; Hit description =Putative ATPase
  Pfam annotation: Domain name=AFG1_ATPase; Domain location=1-255; Score=-40.6; E_value=9.5e-11; Accession=PF03969.6; Description=AFG1 -like ATPase
PFNWRKKRIHFHDFMLNVHSRLQMHKGVSDPLDVVAAEISDEAIILCLDEFMERCIVHAIGSAVDYRQLGSAEQGFYFVGKHYSTLLKQKLQSLIGDEKPSPQTVEVIMGRKLQVPLGANGCAYFPFEDLCDKPLGAADYFGLFKKFHTLALDGIPKLGSSNRTAAYRFVTLIDVMYENKARLLCTAEAGPVGLFENIVTVAEARKVSPRSSRSQKSDDTDLCVDNELGFAKDRTISRLTEINSREYLEDFEMRLRQQQQLPLQGLDKRW

SEQ ID NO: 53498 - protein, 452 aa, Zea mays
  Coding DNA Sequence Number=SeqID_11719
  Gene Ontology: Mol. function=serine carboxypeptidase activity; Cellular component=cellulose and pectin-containing cell wall; Biological process=proteolysis
  Homolog annotation: Hit_ID=Q9LEY1; Match level="QueryCoverage=91%, HitCoverage=92%, E-value=2e-97, Identity=41%"; Hit description =Serine-type carboxypeptidase II-like protein
  Pfam annotation: Domain name=Peptidase_S10; Domain location=44-442; Score=423.5; E_value=3e-124; Accession=PF00450.12; Description =Serine carboxypeptidase
  Subcellular localization annotation: CTP_CleavageSite=16; ConfidenceScore=5.13e-01
MAVAMASALLMLALATASAAVSGAGAPWRSRRPRPEADLVTGLPGQPAVGFSHYAGYVDVTSGGGGGKALFYWFFEAEREPDKKPLLLWLNGAANLLFLEAPVGVGFSYANRTSDLRRLGDRVTAQDSYAFLLGWLDRFPEFKGRDLYIAGESYAGHYVPQLAELIYEGNKGASRDRAISIKGFMIGNAVLNDATDQLGMVEYAWSHAIISDELYSAVRRDCDSFKEEADGGRPGKGCSPALRAFLGAYDDIDIYSIYTPTCLLSNLSSASAAAGSARPRPARLVAAPRLLSKHEEWHRLMKRVPAGYDPCTEAEVIRKWNDSPATVLPILKKLMGAGLRVWVYSGDTDGRVPVTSTRYSINTMGLRPRPRQRAASRSAASAGGAAAEWGGWRAWYYRQQVAGWAVEYEEGLTLVTVRGAGHQVPLFAPDRSLAMLYHFLRGQALPAARSSG

SEQ ID NO: 53499 - protein, 183 aa, Zea mays
  Coding DNA Sequence Number=SeqID_11720
  Gene Ontology: Mol. function=endopeptidase Clp activity; Cellular component=mitochondrion; Biological process=proteolysis
  Homolog annotation: Hit_ID=Q0FAL8; Match level="QueryCoverage=79%, HitCoverage=71%, E-value=7e-46, Identity=61%"; Hit description =Protease subunit of ATP-dependent Clp protease
  Pfam annotation: Domain name=CLP_protease; Domain location=31-183; Score=307.8; E_value=2e-89; Accession=PF00574.13; Description=Clp protease
MLRRLAAVAQRDLLLLFPARPRRWLRRGYTPRREYGLVPMLLFLESENPAKPVHLYINSPGGVVTAGLAIYDTMQYIRSPVTTLCIGQAASMASLLLAAGASGERRALPNARVMIHQPSGGASGQASDIAIHAKEILKVRDRLNKIYAKHTGQAIDRIEQCMERDMFMDPEEAHDWGLIDEVT

SEQ ID NO: 53500 - protein, 84 aa, Zea mays
  Coding DNA Sequence Number=SeqID_11721
MSVTFGTPENYKTEFLRFKADRVRGGIRIPTCLTQSLKLMKSPHTECVSRSIRNRLWASMMVHQGYGKVSWCKTVNDTGKYIFQ

SEQ ID NO: 53501 - protein, 238 aa, Zea mays
  Coding DNA Sequence Number=SeqID_11722
  Homolog annotation: Hit_ID=P51567; Match level="QueryCoverage=18%, HitCoverage=10%, E-value=3e-08, Identity=63%"; Hit description =Serine/threonine-protein kinase AFC2
MAATPDRVNADLRRCLTVDTPPPPQLFDPCQRFRICEAFWRVFDVATPVGFHAVIAGAGVRGWAIDAWWRQVFRCFKGGGVLALCCGTTSMADLVAAAIHQMPRSSSGLRRWSKREADGGAGSPQGTGFGRAPLVSRCYFEATLCTQVARGGASPPWREDDHDGHFVFDLGENTHRYKILSRMGEGLGFLQSVVSSSAGYLRYYSNEEGYELDFFVGLEVKPGPIVKCVLGHDFILHF

SEQ ID NO: 53502 - protein, 227 aa, Zea mays
  Coding DNA Sequence Number=SeqID_11723
  Gene Ontology: Mol. function=electron carrier activity; Cellular component=anchored to membrane; Biological process=electron transport
  Homolog annotation: Hit_ID=Q5QN41; Match level="QueryCoverage=56%, HitCoverage=59%, E-value=1e-37, Identity=50%"; Hit description =Phytocyanin protein-like
  Pfam annotation: Domain name=Cu_bind_like; Domain location=36-119; Score=60.9; E_value=4.1e-15; Accession=PF02298.8; Description =Plastocyanin-like domain
MARRIAGVAALNLLSVLMAATCAAGRDFYVGGRAGWAPNPAEPFNAWAERNRFQVNDTLVFRYSKDADAVLLVSQGHYDACNAAQPAQRLDGGDSRFVFDHSGPYYFISPDAARCRAGERLVVVVLAVRGDGDGDGTPSSSPPPVATPAPSALPTPPPPPHHVPGKNASSPSQGPAPSPALAPAPAPDANGTSSSPPSPSSAVAAFRGGFLLACLLSVTAGAAIILV

SEQ ID NO: 53503 - protein, 861 aa, Zea mays
  Coding DNA Sequence Number=SeqID_11724
MERPALESLIGKPPPPATPSARAIAVEVDAALNRFFLLSGNMELLIMESLIGKPTPPATPGARAAAAEVYAALDRFFLLSGNMEHEAMESLIGKPPSSRHLYVGRQPRPLSNMERPTMESLIGKSPFPATPGARATAAAADVYVALDRFFLISGNMERLTLESMMIGKPTSPTTPGARATATAAEVYATLDRFLILSSNMERPTLESMNDWQAPLLPPPLAPRATAAEVYVALYRFFLLSGNMEHLALESPMIDKPTPPATPGARAIAVEVYTALDRIFHLSGNMERPTLESLMIGKPIPPATPGALATPADVYAALDRFFLLFGNMERPTLESLMIGKPTPPATPGAWATAFEVYAALDRFFLLSSNMERPAPESLMIGNPSPPATPGAAWATAAEVDAALDRFFLARTDLLGIVSQIDELISDAFKCQTVSERATKEIEFFSGFLTDTKASFKHWSSRLKQALETGLVKTEAFSKNTPGMCLNIAAKDQDMPTSERFQSVVTTELAMNGLKVLQLSGSSTSSIARSTISRATAAEVYEVLDRFFLLSSNMERLTLESMMIGKPTSPATPGAQATATEVYTALDYFFLLSGNMERPTLQSLMIDKPTPPTPLAPGRQPPRSTWCSTASFSSMATWSAGTGIPDDWQAHSSHHPLAPGRQPPRSTCARPLLSPLWQHGALGTGILMIGKHTPPATPRARATGAYVYMTLDRFFLLSDNMERPALESLMIGKPTPPTTPGARATAVEVYAVLARFFLLSGNMERPALESLMIGKPTPPTTHGARATAVEVYEALDRFFLLSGNMECPALESLMIGNPLLPPPLALGRQPPRSTRRSTASSSPAPTSWALFLMLPPPLGSLAL

SEQ ID NO: 53504 - protein, 375 aa, Zea mays
  Coding DNA Sequence Number=SeqID_11725
  Pfam annotation: Domain name=VQ; Domain location=94-124; Score=37.1; E_value=6.2e-08; Accession=PF05678.4; Description=VQ motif
MRRERLVPLPQPDGMAQPPQKSNYTVARVENDDSHTHILPSSVLTRSLPPRREAKPNLPKTTFFMDAGAATAARERPAPPSPVPVPQASPDPSNPFPTTFVQADTTSFKQVVQILTGTPETAVVAASGGTQASPPAPQKAAPAPPGPKKPAFKALRAAEQHEEPQDALPPAPGRRRLSPPRAAPPAPDSPRVGSRRAGSSMLDLPSLALGSPVTPLPPLPGSQEAAAAEDRAIAEKGFYLHPSPRGNAGAGADLQPPPRLLPLFPVQSPSPTGRSPHVVILVFVTVIRRIREGLIDHRIPVLLLVPDELYVADFSLAFSPFLALSMCLLLTWFGGGKLVDEAVKTQLGVSQAKWTLKLTLSIAEVWLEKGVISIR

SEQ ID NO: 53505 - protein, 121 aa, Zea mays
  Coding DNA Sequence Number=SeqID_11726
  Homolog annotation: Hit_ID=Q8S0S6; Match level="QueryCoverage=37%, HitCoverage=14%, E-value=4e-13, Identity=71%"; Hit description =Gibberellin 2-oxidase
MQRILLHDGYGSCSSSGELSSACLLWLVRLMSAYPSGLIRSVALTQTSTGNWGQGRQQAPRHACIIVQLYIDPQIISVLRANGTSGLEVALRDGAWASVPLDGDAFFVNVGDTLQFVLHAS

SEQ ID NO: 53506 - protein, 318 aa, Zea mays
  Coding DNA Sequence Number=SeqID_11727
  Gene Ontology: Mol. function=protein serine/threonine kinase activity; Cellular component=membrane; Biological process=protein amino acid phosphorylation
  Homolog annotation: Hit_ID=Q2HTT4; Match level="QueryCoverage=97%, HitCoverage=66%, E-value=1e-112, Identity=60%"; Hit description =Protein kinase
  Pfam annotation: Domain name=Pkinase; Domain location=21-277; Score =204.9; E_value=1.9e-58; Accession=PF00069.15; Description=Protein kinase domain
  Pfam annotation: Domain name=Pkinase_Tyr; Domain location=21-277; Score=185.3; E_value=1.5e-52; Accession=PF07714.7; Description =Protein tyrosine kinase
  Pfam module annotation: Pfam domain module=Pkinase::Pkinase_Tyr; Domain location=21-277::21-277
MVRMNQAVQTTFDWTLDPSKLLVGHRFASGACSRLYKGFYDEKPVAIKFIRQPDDDDNGKTAAKLEKQYNSEINSLSHLYHRNVIKLVAAYKCPPVFYIITEFLPGGSLRSYLNNTENHPIPLEKTISIALDIARGLEYVHSQGIVHRDIKPENILFDEDSCVKVADFGIACEETLCDVLVEDEGTYRWMAPEMIKQKAYNRKVDVYSFGLVMWEMVSGRVPYENLTPFQVAYAVANRNLRPTISPECPSALGPLIEQCCALQPDKRPDFWQIVKVLEQSHSILSQGGCLDAQKSGTCQDPKKRLMQWIQKLKPTHGA

SEQ ID NO: 53507 - protein, 463 aa, Zea mays
  Coding DNA Sequence Number=SeqID_11728
  Gene Ontology: Mol. function=acetylglucosaminyltransferase activity; Cellular component=membrane; Biological process=isopeptide cross -linking via N6-(L-isoglutamyl)-L-lysine
  Homolog annotation: Hit_ID=Q1EP29; Match level="QueryCoverage=74%, HitCoverage=83%, E-value=1e-140, Identity=68%"; Hit description =Glycosyl transferase family 14 protein
  Pfam annotation: Domain name=Branch; Domain location=117-342; Score =395.6; E_value=7.3e-116; Accession=PF02485.11; Description=Core-2I -Branching enzyme
  Subcellular localization annotation: CTP_CleavageSite=19; ConfidenceScore=5.48e-01
MHGNNGSGEQHSPRSPKSSASPRGGGGGGGAAKLPSSAAAWLVDSRWALSAALSLLLFLAVALAVTSFSSSSSPYIVSPSSFFSSLPVPVPASRAAAANHSQSQSPPPPPGAGVPRLAYLISGSKGDLDRLWRALHALYHPRNQYVVHLDREAPVAERLELAARVANATVFRRAGNVHVIRRANMVTYRGPTMVSNTLHACAVLLRRGGAWDWFINLSASDYPLMTQDDILHVFSTVPRNVNFIEHTGYLGWKEGQRARPLIVDPGLYGSKKQDIFWVSQKRELPTAFKLFTGSAWVALTRDFVEYTVWGWDNLPRTLLMYYANFVSSPEGYFQTLLCNAPRFVPTVANHDLHHIQWDVPPRQHPHPLALADMPAMLASGAPFARKFPRDDPVLDAIDDGLLARPRTANATAAFVPGGWCGADAECRAVDNDWVLRPGPGAQRFRRLIDRIVRSEAFPNRQCK

SEQ ID NO: 53508 - protein, 267 aa, Zea mays
  Coding DNA Sequence Number=SeqID_11729
MERPALESLMIGKPTPPASPGAWATAVEPPKVDVALDRFFLARTDLLGIVSQIDELISDAFKCQTVSKRATKEIKFFSGFLKDTKASFKHWSSRLKKALETGLVKTEAFSKNTPGMCLNTAAKDPSDTLVPSPAMSESYKILKDLSSRYDIYGLNESNTEDPLEWSGSSTSSIARSTISRAIAAEVYTAIDRFFLLSSNMERQALEFMMIGKPTSPATPGARVTAAKVYVALDHFFLLSGNMERPAVESLMIDKPTPLPPLAPTDSH

SEQ ID NO: 53509 - protein, 150 aa, Zea mays
  Coding DNA Sequence Number=SeqID_11730
MAIPLLLPPLAPRATATEVDVALDRFFLARTDLLGIVSQIDELISDVFKCQTVSKRATEEIEFFSAFLTDTKASFKATAAEVYEVLDRFFLLSGNMERPTLESMMIGKPTSPATPGAHFCRLLDSCDGLRSDHMSAKLLKQANSSSSGSQ

SEQ ID NO: 53510 - protein, 94 aa, Zea mays
  Coding DNA Sequence Number=SeqID_11731
  Subcellular localization annotation: CTP_CleavageSite=37; ConfidenceScore=5.43e-01
MTISSKFELLPNSSDNSGQPRTSPKSPVHRQSVKKLRCLAAAQDRRARLEAEENPQWYPIPKGTPVAISRCLKMQRHSQSSKEGAAAMALQSYI

SEQ ID NO: 53511 - protein, 290 aa, Zea mays
  Coding DNA Sequence Number=SeqID_11732
  Gene Ontology: Mol. function=metal ion binding
  Homolog annotation: Hit_ID=Q2QY21; Match level="QueryCoverage=63%, HitCoverage=33%, E-value=4e-26, Identity=60%"; Hit description=Kelch motif family protein
MLGHHEHGMSRPHPGARAHVQRVRRRPRHPSSGHGHPSGDVEHAAGAHARAAVPPAQGLRDDAPCFGRRVVLLDRGGAHRASRHVDPRAHGGRRELAPREQRRRARSLRARQRVHPQRGATVDQVHVPPHRHGERVRKRSAAAVRGQGQRGDLERGRGGVEVEEKFESGGGGHSEEAWAEDIQQELVGESRDGGFGLGILDVGGREGDRDGGVAGGVGGDAGPREPREGARVAALRGHGFLADAGAGIARTGARAGGARESRERSHGEAVDAYFTLLWSSKDIRFNTKLI

SEQ ID NO: 53512 - protein, 57 aa, Zea mays
  Coding DNA Sequence Number=SeqID_11733
MAPGMEGSQSDRAEADLVLGGCCSQTREKCCYVQKLVSVILSKGASVVFIYRQAINL

SEQ ID NO: 53513 - protein, 436 aa, Zea mays
  Coding DNA Sequence Number=SeqID_11734
  Gene Ontology: Mol. function=protein dimerization activity; Cellular component=nucleus; Biological process=regulation of transcription, DNA-dependent
  Homolog annotation: Hit_ID=Q69IL4; Match level="QueryCoverage=67%, HitCoverage=78%, E-value=2e-68, Identity=53%"; Hit description =Transcription factor RF2a
  Pfam annotation: Domain name=bZIP_1; Domain location=245-307; Score =27.4; E_value=5.1e-05; Accession=PF00170.11; Description=bZIP transcription factor
  Pfam annotation: Domain name=bZIP_2; Domain location=243-297; Score =31.7; E_value=2.5e-06; Accession=PF07716.5; Description=Basic region leucine zipper
  Pfam module annotation: Pfam domain module=bZIP_1::bZIP_2; Domain location=245-307::243-297
MSYINLPSLQVLHAPSSSKVVLHESPTLKSADKKKARKKRKKGVSFEILAGNNMNMDKTPIAGDGGGDAGGGGGGSGNGPEMQSSLDAVAPSPTPHTELDISSMPDTPLRKPGHRRALSEIIGLPDDLDLGGPGAGDAPALSDENEEELFSMFLDVDKLNSRCGASESEPSCAMAGGPGEATETSAAASGAAQGQMHHHNRHSMDASSSIDAEHLFGTTVTEGVSPAEAKKAMSAANLAELALIDPKKAKRIINNRQSAARSKERKMRYIAELERKVQFMQREATALATQLALLQRDTAGLTVENGDLKIRLESTEQQIHLQDALNGALKSEMQRLKMATGQAGNQMMNFAEPPHTFGGANQQVFHHPGQAVPPFLVAMQQQQQLLLPHMNQPLHPLQSQQLHQAATLSIDMEGLPAAPPGQWQWGGDTWSESSSS

SEQ ID NO: 53514 - protein, 267 aa, Zea mays
  Coding DNA Sequence Number=SeqID_11735
  Gene Ontology: Mol. function=protein binding; Cellular component =integral to membrane; Biological process=defense response to fungus
  Homolog annotation: Hit_ID=Q7F810; Match level="QueryCoverage=89%, HitCoverage=27%, E-value=9e-51, Identity=43%"; Hit description =Similar to Lycopersicon esculentum disease resistance protein
  Pfam annotation: Domain name=LRRNT_2; Domain location=44-86; Score =34.1; E_value=4.7e-07; Accession=PF08263.3; Description=Leucine rich repeat N-terminal domain
  Pfam annotation: Domain name=LRR_1; Domain location=117-141; Score =12.3; E_value=1.4; Accession=PF00560.23; Description=Leucine Rich Repeat
  Pfam annotation: Domain name=LRR_1; Domain location=143-165; Score =11.3; E_value=2.2; Accession=PF00560.23; Description=Leucine Rich Repeat
  Pfam annotation: Domain name=LRR_1; Domain location=198-220; Score =2.5; E_value=96; Accession=PF00560.23; Description=Leucine Rich Repeat
  Pfam annotation: Domain name=LRR_1; Domain location=226-248; Score =6.3; E_value=19; Accession=PF00560.23; Description=Leucine Rich Repeat
  Pfam annotation: Domain name=LRR_1; Domain location=250-266; Score =1.1; E_value=1.8e+02; Accession=PF00560.23; Description=Leucine Rich Repeat
  Pfam annotation: Domain name=LRR_1; Domain location=92-115; Score =8.0; E_value=9; Accession=PF00560.23; Description=Leucine Rich Repeat
  Pfam module annotation: Pfam domain module=LRRNT_2::LRR_1::LRR_1::LRR_ 1::LRR_1::LRR_1::LRR_1; Domain location=44-86::117-141::143-165::198 -220::226-248::250-266::92-115
  Subcellular localization annotation: CTP_CleavageSite=79; ConfidenceScore=5.55e-01
MVSRTSNQQLLLSLFVVLGIHQLSCSLATSSNQTTKPPAAAPCRPDQSSALLRLRRSISTTTDSTCTLASWRNGTDCCRWEGVACAAAADGRVTTLDLGECGLQSDGLHPALFDLTSLRYLDLSTNTFNESELPAAGFERLTELTHLNLSYTDFVGKIPHGMRRLSKLGDNDYSLPLGDGRWPIVEPDIGALVANLSNLKELHLGNVDLSGNGAAWCSAFANSTPQLQVLSLQNTHIDAPICESLSAIRSLTKINLNYNKVFLGLVW

SEQ ID NO: 53515 - protein, 37 aa, Zea mays
  Coding DNA Sequence Number=SeqID_11736
MLSYNHYLLISLTLYMSPHREEQVVPEDDYYEEFDEV

SEQ ID NO: 53516 - protein, 91 aa, Zea mays
  Coding DNA Sequence Number=SeqID_11737
MGKKGATTGHHGTGSRAPWGDLGLQLAVPEGEASQRRGARVQVPREKSIGRRAMDAGELTARARTRGGAAPMEERNSAVEVAGRRGVVHME

SEQ ID NO: 53517 - protein, 43 aa, Zea mays
  Coding DNA Sequence Number=SeqID_11738
MRPSLAIIELVNAFALSPSRREPRHVHLMVVVAEIPISVIMMT

SEQ ID NO: 53518 - protein, 223 aa, Zea mays
  Coding DNA Sequence Number=SeqID_11739
  Subcellular localization annotation: CTP_CleavageSite=29; ConfidenceScore=5.16e-01
MAMLDDGDPATVAMAGRATGRTGRPRATRCAGTPGSAREGERRAQAGCASRQTAICREPHRDGLGHGCSTTARREQGPGSVARAVEKTRRRWDRGQGRESGVWRRRRAAVAKTRLGARGKRAGTRGPTGRAGRCPQARACNELGWASDRGATRWAKRGRWPSRPLTPCAGVGCWRTGATRPRWAVASRGGEKGGLGAGERLGRAGAQRAGLREGLHAEERERG

SEQ ID NO: 53519 - protein, 208 aa, Zea mays
  Coding DNA Sequence Number=SeqID_11740
  Subcellular localization annotation: CTP_CleavageSite=42; ConfidenceScore=5.03e-01
MARLGRTAKVLRRFTTSLLLMTSVVHGGAWTQNTTNCWRRLRCDERRWRCSTTAIRPRWPRLAGPRDARGGRPSCTPRAAPAARRALRRDAGLSWRRGTTGSGGLRVVPDCDLQRTSSGRARPWLQHDCAPRAGPGVGRARNGEDKEARGPRPGEVEGDGRRRGWPGSFFGGVGAGNRVFGEEDVQRRLKRGWELGEACRRAWASRVR

SEQ ID NO: 53520 - protein, 291 aa, Zea mays
  Coding DNA Sequence Number=SeqID_11741
  Homolog annotation: Hit_ID=Q6QP54; Match level="QueryCoverage=26%, HitCoverage=30%, E-value=1e-14, Identity=80%"; Hit description =Putative kinase
  Subcellular localization annotation: CTP_CleavageSite=28; ConfidenceScore=5.06e-01
MQSACNRAKWAHPSDSNAPSMEAQAHTSCNRRAGCYMRATAPPLAPLPRLLDCGTGYRDSRQPCGPGKGDTPKGILLREGNGPRAPLLIRGSKAGPSKGFNSRLRALGLRAHYWSEGSDSGSAPEDDELRFARPQGSDSGSALEDDELGFARPQGSDSGSSPEDDETPHRPTLGLGLGLSPGRRRTPLHPTPGLGLGLSPGRRRTPLRPTPGLGLSPGLSRRSLPCSTQGLGLDLDLGGASTSPNPGLGPTTSQEAPSLPYPKLTQATGNKTGVPSGSLRQTSNDGAPHAP

SEQ ID NO: 53521 - protein, 302 aa, Zea mays
  Coding DNA Sequence Number=SeqID_11742
  Subcellular localization annotation: CTP_CleavageSite=70; ConfidenceScore=5.31e-01
MDPPLRHARQVGPPAVDLRSVCASSSKPAKHFLAASFSRTPACILLPPSELEQSTPRLESELASALVTLVAEVLVVGGDLGQSCREPHPRSSPPFPLHASAGHHPSSPGASARNPPWPTSHIPSRPALPQVRRSLLDAQIHDTPAPAFAGVNTVEASTPTSIPAFELEQASWRALFHGFAPSWLLGAWRQEGPFYLLPNAGASPSRPPASAPPWWSAGTYTISGRWPLLPAASPLGFLSAVESAWTCSVLHRPAMVEVTEPSLPAGQHQSLGLRLAQAANAAPALFLGTQRPAFCRSSTLLF

SEQ ID NO: 53522 - protein, 358 aa, Zea mays
  Coding DNA Sequence Number=SeqID_11743
  Gene Ontology: Mol. function=RNA-directed DNA polymerase activity; Cellular component=mitochondrion; Biological process=RNA-dependent DNA replication
  Homolog annotation: Hit_ID=UPI00004C1731; Match level="QueryCoverage =52%, HitCoverage=13%, E-value=1e-106, Identity=97%"; Hit description= UPI00004C1731 related cluster
  Pfam annotation: Domain name=rve; Domain location=174-333; Score =113.6; E_value=5.8e-31; Accession=PF00665.16; Description=Integrase core domain
  Subcellular localization annotation: CTP_CleavageSite=44; ConfidenceScore=5.09e-01
MAPCILCDDGGSQPPYGSKRTSARIQPLRQLSLRQAPSLLRRPRHHTSWVPKSLRLPQWHGPLREGWPRGDEDEIRARLKLLAPSPAWTLVTPYCKRTRPGRGTNTKAAGFPPLSRRSPAASLSPFALGLALDPSGLGHAATFTRRPRDPPGLETPTSRERRRSRKKLALQTIPITWSFAVWGLDLVDPLQKAPGGYTHLLVAIDKFSKWIEVRPLNSIRSEQAVAFFTNIIHRFGVPNSIITDNGTQFTGRKFLDFCEDHHIRVDWAAVAHPMMNGQVERANGMILQGLKPRIYNDLNKFGKRWMKELPSVVWSLRTTPSRATGFTPFFLVYGAEAILPTDLEYGSPRMRAYTDQSN

SEQ ID NO: 53523 - protein, 175 aa, Zea mays
  Coding DNA Sequence Number=SeqID_11744
MGLGVCGSLCRGGLPLGEECDDEEDNVGFYCDYDYGFCCLYKEQERQCQEQEQQDSSPSPQQEVESGSGVADDLDQKYYPGLSTDSSEGVIVSTVGEGNLRMSSMVNLVVVLNTKLEHTLDKLGNARAEIAELHASARSAAIRRMGPSFLSRFNTLIACRPVVIMVMAPLTAGPR

SEQ ID NO: 53524 - protein, 147 aa, Zea mays
  Coding DNA Sequence Number=SeqID_11745
  Subcellular localization annotation: CTP_CleavageSite=42; ConfidenceScore=5.45e-01
MWPTRQPLSLPCARSLCLLGPCSQSSPSQQTPSMVGVSRGPRCRSHRSSYGLNHHDCQLIKPCAGHLLPIFPAVSIGCTQIHEGGQREENQNQGGVGSTVDPHPRRHSVPWVHAGGSSGSGECGVDLGRRRPLLHHRQFLAGVGMPP

SEQ ID NO: 53525 - protein, 186 aa, Zea mays
  Coding DNA Sequence Number=SeqID_11746
MAFMRGGSTRGRCTWRGGLTTALDCSGEQSRKQQGSTQEIRGPGRFLTSRGSDRVTGQRRRSSGCTRTTPVSADQTDRRGGGHTEGCPEKLMARRSLPWLWTGHGRNGGHGTGGGRRWAVEEVLSSHGQSEREGERVGQRAQMEEGRWASRAWGSKGALGLDRGWRTRGRGRVHSREIVGEMLGTR

SEQ ID NO: 53526 - protein, 51 aa, Zea mays
  Coding DNA Sequence Number=SeqID_11747
MSCDSRLHEKRVKHAMIIEDWDRATGVGNTWQGRRGRGMGGVDANLRVLIE

SEQ ID NO: 53527 - protein, 87 aa, Zea mays
  Coding DNA Sequence Number=SeqID_11748
MVYDPLESYQEIRLPHMFVCTTSIFVSSQMAEEKNSEELALVVYHDAMERSNAEKVTKDITSGLSDEIDDSKDFDFEEDVVILKIDP

SEQ ID NO: 53528 - protein, 162 aa, Zea mays
  Coding DNA Sequence Number=SeqID_11749
  Gene Ontology: Mol. function=metalloexopeptidase activity; Cellular component=mitochondrial matrix; Biological process=proteolysis
  Homolog annotation: Hit_ID=Q2QNJ1; Match level="QueryCoverage=99%, HitCoverage=35%, E-value=1e-54, Identity=66%"; Hit description =Metallopeptidase family M24 containing protein, expressed
  Pfam annotation: Domain name=Peptidase_M24; Domain location=6-128; Score=-94.9; E_value=0.093; Accession=PF00557.14; Description =metallopeptidase family M24
MATLWQVFTCSGKAVDKGIPRTEDPGEGEIHPIQLLEPNRNRSHHLAAHLFSTFGLECHSLGMDIHDSMTLPKDKPLEPGVVITIEPGVYIPAAPVLNERAPSRYRGMGIRIEDEVLITDDGHEVLTASVPKEVSHLTTLMNMGRGGSAADAHGHELRAACS

SEQ ID NO: 53529 - protein, 82 aa, Zea mays
  Coding DNA Sequence Number=SeqID_11750
MDHGEVFTSPPLCVPMKLIVATIWPIRACLNGNAGSVSRFPPCAWPPPVMASTSHGVIDGERAMAMGLIGEETKAEGPMRDC

SEQ ID NO: 53530 - protein, 181 aa, Zea mays
  Coding DNA Sequence Number=SeqID_11751
MAARFLISGLGKTEQDAQATTARVSGLGMKHTLVELVVVVEVVVVVVFPTVLVLFLDVSPAGPDVWHRNQGYIRFPLLGKCREVLESDLGNIGCSVKCHYPSWDNNCGYTRCQRFNTNQSKEQVRSQKKGAKRKLKVALVWRTGQSGVPPDSVRCTRVNQLELFTFGFPRRSSAIIHRTVR

SEQ ID NO: 53531 - protein, 144 aa, Zea mays
  Coding DNA Sequence Number=SeqID_11752
  Gene Ontology: Mol. function=identical protein binding; Biological process=negative regulation of enzyme activity
  Homolog annotation: Hit_ID=Q8H4X8; Match level="QueryCoverage=77%, HitCoverage=15%, E-value=3e-18, Identity=50%"; Hit description =Putative subtilisin-like serine protease AIR3
MNSPCPVPDLLPFLAKPTVVPSAPLAHRIVRCVQHGGLEAHPPKAHAVAEAEDAGEVPVDGGDPWCGVDDNVIVGIGVAGGAYDGDTIGGSVSMTNAWKRDLASLVRGAFCMKDTKMTSVPSWMVASKPARIAATVYSADQQIL

SEQ ID NO: 53532 - protein, 116 aa, Zea mays
  Coding DNA Sequence Number=SeqID_11753
MPDHGGGITSLPRWRWRVHRHGALGGLAQRRVLGSGLQGAVRGKMAGGGSGVAEPRHHGRVARRAGSCCPGEGLSHGERNGEEREAAEFLARAYVGPSGDSATDSVAAALASRRRP

SEQ ID NO: 53533 - protein, 163 aa, Zea mays
  Coding DNA Sequence Number=SeqID_11754
MDPASPPRGENTTPKELPIDVLLAGLHKAVEGLNEAAADGLQAAVVDGLLAAADALSQTRNRLHGEVASGIGVAATGLRHAAKFLRAVTCSRCGLVHKDYDSIAWDEGHNKFDCHVLFHDSSSRQKWLLKNARVDGSDGNDDVSSFVADSITEEADSIAKTTK

SEQ ID NO: 53534 - protein, 59 aa, Zea mays
  Coding DNA Sequence Number=SeqID_11755
MEKEVLVQLGEALRPAATGVQERGEDDENGEYDDEDELDEQDMEASVASEDEDSDKYLY

SEQ ID NO: 53535 - protein, 707 aa, Zea mays
  Coding DNA Sequence Number=SeqID_11756
  Gene Ontology: Mol. function=ion channel activity; Cellular component= membrane; Biological process=ion transport
  Homolog annotation: Hit_ID=Q10G24; Match level="QueryCoverage=99%, HitCoverage=97%, E-value=0.0, Identity=75%"; Hit description=Cyclic nucleotide-gated ion channel 9, putative, expressed
  Pfam annotation: Domain name=IQ; Domain location=621-641; Score=20.9; E_value=0.0047; Accession=PF00612.17; Description=IQ calmodulin -binding motif
  Pfam annotation: Domain name=Ion_trans; Domain location=129-401; Score=62.9; E_value=1e-15; Accession=PF00520.21; Description=Ion transport protein
  Pfam annotation: Domain name=cNMP_binding; Domain location=502-602; Score=26.6; E_value=8.9e-05; Accession=PF00027.19; Description =Cyclic nucleotide-binding domain
  Pfam module annotation: Pfam domain module=IQ::Ion_trans::cNMP _binding; Domain location=621-641::129-401::502-602
  Subcellular localization annotation: CTP_CleavageSite=54; ConfidenceScore=5.39e-01
MSYDQSAFQVDYMGVGAGAGVSASRRRFMPSESLARGVITHGSAQLRTIGRSLRAGATMAAVFQEDLKNTSRRIFDPQDPVLVRLNRAFFISCIVAIAVDPMFFYLPMVTDEGNLCVGIDRWLAISTTVVRCVVDLFFLGRIALQFRTAYIKPSSRVFGRGELVIDTALIARRYMRRFFSADLMSVLPLPQVVIWKFLHRSKGTAVLDTKNSLLFIVFIQYVPRVVRIYPISSELKRTSGVFAETAYAGAAYYLLWYMLASHIVGAFWYLLSIERVSDCWRNACDEFPGCNQIYMYCGNDRQLGFLEWRTITRQVINETCEPKRDGSIPFNYGIYSPAVVSDVLKSKDTTSKLLFCLWWGLANLSTLGQGLKTSIYTGEALFSIALAIFGLILMAMLIGNIQTYLQSLTVRLEEMRVKQRDSEQWMHHRLLPPELRERVRRYDQYKWLNTHGVDEEALVQNLPKDLRRDIKRHLCLGLVRRVPLFANMDERLLDAICERLKPSLCTEHTYITREGDPVDQMVFIIRGSLESITTDGGRTGFYNRSLLEEGDFCGEELLTWALDPKAGACLPSSTRTVMALSEVEAFALHAEELKFVAGQFRRMHSKAVQHTFRFYSQQWRTWAATYIQAAWRRHLKRRAAELRRREDEELEEDEGKSNRIRTTILVSRFAANAMRGVHRQRSRRAVAVSELLMPMPKPREPDFGDDY

SEQ ID NO: 53536 - protein, 178 aa, Zea mays
  Coding DNA Sequence Number=SeqID_11757
MYEHEESYEENIYRDLKKDSEGSSASPDPRARAQPRRWTTDSASPDPGLGLNLDLGRRTPPRPTPGLGHSLGPQKTDSASPDPRARAQPRCWTTDSASLDPRARTQPRPRKTVSASPDPGLGLNLDLGRRTPSRPTPGLGLSLDLERRTRPRPRRSLRLARRRAQTDHVTGGPSLPYP

SEQ ID NO: 53537 - protein, 178 aa, Zea mays
  Coding DNA Sequence Number=SeqID_11758
MTWQLGEGATATWARAARGQEPWKLGRPGREGRSKERARIGRQTPWRRHQRPFLDPEGAERHGTKAGSRQEKGLGEQRKDAESRRRSTWEMKRTLGHGKVGGRGGPGKKLELERGKEAAAQGARRRGARRGELAWARRAARQGKGRASRGNEGAQTGERAQGGRHQVAEQSPGEEDRA

SEQ ID NO: 53538 - protein, 88 aa, Zea mays
  Coding DNA Sequence Number=SeqID_11759
MAASAGPGARQRRAMHPLATTAAAASGLRRPEMDAEGSGMGWLSIAEAVCQPSGTARGWGDVEPGDLGGGFYSLGPEGRRRMGSMAKG

SEQ ID NO: 53539 - protein, 384 aa, Zea mays
  Coding DNA Sequence Number=SeqID_11760
  Gene Ontology: Mol. function=transcription regulator activity; Cellular component=nucleus; Biological process=regulation of transcription
  Homolog annotation: Hit_ID=Q6Z2G7; Match level="QueryCoverage=98%, HitCoverage=95%, E-value=1e-83, Identity=52%"; Hit description =Putative bHLH transcription factor
  Pfam annotation: Domain name=HLH; Domain location=153-203; Score =32.3; E_value=1.7e-06; Accession=PF00010.16; Description=Helix-loop -helix DNA-binding domain
MARCQGTVESLCQGLLDLDDDKFGAMCSAFGYLQEWPDLGAAMCGANLAVPPAVATPSAGDGNDSSSCSVSGGLRKRRPDAYLDAKGGANGMNKRPRGKQQPSGLSEIAAAPGKGKQERPKAGTKKKAEAAAAAAAAGQKTDYIHVRARRGQATDSHSLAERVRRERISERMRYLQELVPGCSKVTGKAGMLDEIINYVQSLQKQVEVPTHRHRPASSSPLLPASQLVIPRSLTAGSPCAQFLSMKIAASNPVVSFDIVEDLFGRQLKQACGPAAGQLEPSCLQMSMSPMQQVVHPSAAAGSTGFGPLDMVLSNLYAPAAASCPVSAAPSVSVAAGPSTIEPCLNVNGTAAAWDIGSQNLFSGFDAQFQSVESGCLLDNLKMEM

SEQ ID NO: 53540 - protein, 221 aa, Zea mays
  Coding DNA Sequence Number=SeqID_11761
  Gene Ontology: Mol. function=inorganic diphosphatase activity; Cellular component=cytoplasm; Biological process=phosphate metabolic process
  Homolog annotation: Hit_ID=O22537; Match level="QueryCoverage=98%, HitCoverage=92%, E-value=1e-102, Identity=83%"; Hit description =Soluble inorganic pyrophosphatase
  Pfam annotation: Domain name=Pyrophosphatase; Domain location=39-193; Score=317.5; E_value=2.4e-92; Accession=PF00719.9; Description =Inorganic pyrophosphatase
MAGPAVLNERILSSMSQKHVAAHPWHDLEIGPGAPEFFNCVVEIPRGSKVKYELDKASGLIKVDRVLYSSVVYPHNYGFIPRTLCEDNDPLDVLILMQEQVVPGCFLRARAIGLMPMIDQGEKDDKIIAVCADDPEFRHYTDITDLPPHRLQEIRRFFEDYKKNENKEVAVNEFLPAKDAINAIKYSMAIICVIRTELTKPVWMLYCRDLYGSYVIESLRK

SEQ ID NO: 53541 - protein, 877 aa, Zea mays
  Coding DNA Sequence Number=SeqID_11762
  Gene Ontology: Mol. function=RNA-directed DNA polymerase activity; Cellular component=intracellular; Biological process=RNA-dependent DNA replication
  Homolog annotation: Hit_ID=UPI00005A975E; Match level="QueryCoverage =99%, HitCoverage=49%, E-value=0.0, Identity=85%"; Hit description =PREDICTED: similar to Retrovirus-related Pol polyprotein from transposon 297
  Pfam annotation: Domain name=RVT_1; Domain location=56-225; Score =137.1; E_value=4.9e-38; Accession=PF00078.17; Description=Reverse transcriptase (RNA-dependent
  Pfam annotation: Domain name=RnaseH; Domain location=455-582; Score =3.8; E_value=2.5e-05; Accession=PF00075.14; Description=RNase H
  Pfam module annotation: Pfam domain module=RVT_1::RnaseH; Domain location=56-225::455-582
MPDIPRDVVEHSLDIRAGARPVKQPLRRFDEEKRRAIGEEIHKLMAAGFIKEVFHPEWLANPMLVRKKGGKWRMCVDYTGLNKACPKVPYPLPRIDQIVDSTAGCETLSFLDAYSGYHQIRMKESDQLATSFITPFGMYCYVTMSFGLRNAGATYQRCMNHVFGEHIGRTVEAYVDDIVVKTRKASDLLFDLEVTFRCLKAKGVKLNPEKCVFGVPRGMLLGFIVFEWGIEANPEKLAAITSMGPIKDLKGIQRVMGCLAALSRFISRLGERGLPLYRLLRKAECFTWTPEAEEALGNLKALLTNAPILVPPAAGEALLIYVAATTRVVSVAIVVERREEGHTLPVQRPVYFISEVLSETKIRYPQVQKLLYAVILTRRKLRHYFESHPVTVVSSFPLGEIIQCREASGRITKWTVEIMGETISFAPRKAIKSQVLADFVAEWVDTQLPTVPIQSELWTMFFDGSLMKTGAGAGLLFILPLGKHLRYVLRLHFQASNNVAEYEALVNGLRITIELGVRRLDARGDSQLVIDQVMKNSHCRDPKMEAYCDEVRRLEDKFYGLELNHIARRYNETADELAKIASGQTTVPPDVFSRDLHQPSVKIDDTPEPKAPSAEPEAPSAQSEVPSAQSEAPSARPEAPSVQSEVPSAPEGEALRVEEERSGVTPNRNWQTPYLQYLHRGELPLDRAEARRLARRAKSFVLLGDGKELYHRSPSGILQRCISIAEGQELLREIHSGACGHHAAPRALVGNAFRQGFYWPTAVADATRIVRTCEGCQFYVRQTHLPAQALQTIPLTWPFVVWGLDLVGPLQKAPGGYTHLLVAIDNFSKWIEVRPLNNIRSEQAVAFFTNIIHRFGVPNSIITDNGTQFTGRKFLDF

SEQ ID NO: 53542 - protein, 561 aa, Zea mays
  Coding DNA Sequence Number=SeqID_11763
  Homolog annotation: Hit_ID=Q9FJZ1; Match level="QueryCoverage=63%, HitCoverage=88%, E-value=2e-37, Identity=34%"; Hit description =Arabidopsis thaliana genomic DNA, chromosome 5, TAC clone:K1F13
MPTITHYVLDPFLETGSPAQAEKATPKPPPSPPDKATPVPVAPIRAQTSPASLYATPESTTLPDSPSSFPGTWSPYIINHKRRGASLAKTVPQGDVGSEGSQPKLPVILPALPKGGEPTAVEEPEFAFQQSGNDQAEGDSGVDEAPINGKNEMLLKGKGPVTAKNEHEQPEFEFHRGNLEALVRPVNVGRPLIGGAPKNDESDTFLELQDSMSVASNTETDDAGTQEWWWKPSSPLGISVGTPCAEFYDAFEEISSDGGTRSSRAMDDDLREMRLSLLTEIERRKQAEETLEIWQKEWKKLSHHLSHVALSLPSPSIAEDTDDSSVDPGAELCQQITVSQLVAAAISQDFARAEVASEMEAVIATKNFEIARLSDRVQYYEAANREMSQRNQEAIGRRCSNPPAPPVRRRQARLCVPLLQAAAAPGSYSPGRPPSRSLHSRPLQAAALEVVLQPRLRASVCRRSRPPRSRPSSLLRRPSGAASPSSPASAVPLRQDYRVQRLTVPLFETSRQQRKERKKRQKWFWGSVGLAVTLGATAIAWSYLPSSQPRASADSNSTVSD

SEQ ID NO: 53543 - protein, 222 aa, Zea mays
  Coding DNA Sequence Number=SeqID_11764
  Homolog annotation: Hit_ID=Q010J2; Match level="QueryCoverage=91%, HitCoverage=92%, E-value=6e-12, Identity=31%"; Hit description=[I] KOG3146 Dolichyl pyrophosphate phosphatase and related acid phosphatases
  Pfam annotation: Domain name=PAP2; Domain location=68-186; Score =69.8; E_value=8.6e-18; Accession=PF01569.12; Description=PAP2 superfamily
MTKVGSAGEPAEVGVSMESDPIVGGEAPSRPGWEASRWAPVEAALNRMVSVSWHDAVGVLAIWKRDAEIMWFLLGAVGNSLLSMVLKKMLNHERPAPALRSGPGMPSSHAQSIFYAATILALSLYYWLGTNYLTMILGPATLSVAAYLSWLRVSRRLHTLNQVMAGAVVGSVVGALWFVLWHSLVQEAFASSLLVRIAVVLGSSAFCVGFVIYMIRHWLKDE

SEQ ID NO: 53544 - protein, 162 aa, Zea mays
  Coding DNA Sequence Number=SeqID_11765
MGNSNKRKREPTPPLEDFGDSEYSEKEFSSESEGSPAPVSPPASSDDSDDSQGIAAEVWTYIRVVEHSGLEGSDESEYSSDEEDSDGGEDEDDDDDDGDDDDGGDGDGDGSGCGSGSGGGDESKGSTRGGSSKGSTRVGGGGSSSKGSTRVGGGGSSSKASG

SEQ ID NO: 53545 - protein, 366 aa, Zea mays
  Coding DNA Sequence Number=SeqID_11766
  Gene Ontology: Mol. function=transcriptional repressor activity; Biological process=regulation of nitrogen utilization
  Homolog annotation: Hit_ID=Q6YVH7; Match level="QueryCoverage=79%, HitCoverage=94%, E-value=1e-133, Identity=81%"; Hit description =Putative phenylcoumaran benzylic ether reductase PT1
  Pfam annotation: Domain name=Epimerase; Domain location=12-228; Score= -54.2; E_value=0.013; Accession=PF01370.11; Description=NAD dependent epimerasedehydratase family
  Pfam annotation: Domain name=NmrA; Domain location=12-301; Score =408.1; E_value=1.3e-119; Accession=PF05368.3; Description=NmrA-like family
  Pfam module annotation: Pfam domain module=Epimerase::NmrA; Domain location=12-228::12-301
MSREAARTRSRVLVVGATGRLGGSIARASLAAGHPTFALVRPHHFARPDSPVLGPLVAAGATLLQGSLEDYSSLLEAVCQVDVVICAVSTKQVLEQKPLIRAIKEAGCVKRFIPAEFGADPTKVQICGMDYGFYEKKIEIRHSIESEGIPHTYICCNFFMRYLLPSLVQPGLDAPPRDEIKIFGEGNTKGVFVKENDVAKFTICTIEDPRTLNKTLYLRPPGNVFSMNELADLWESKLKKSLKRLYVTEEQLLKEIHDAPFPLKMDLIFIYSAFVKGDHTYFEIDLSMEGTQLYPHMAGMARVGDVVVGELWFSLLYDPIIHNSNKIIMPASTYESHSICQSYSIQFYSWNNNNEQSYAVILDMYS

SEQ ID NO: 53546 - protein, 100 aa, Zea mays
  Coding DNA Sequence Number=SeqID_11767
MNVCEPPIGEEQVALEEDYYEEFDEMVNTRKGGSVDLSTRIRQRRAIANPEPEMNPPPNPSPAGTDVVVAAQMQLLQQMANSMVEIEREMCPWAISKVFW

SEQ ID NO: 53547 - protein, 191 aa, Zea mays
  Coding DNA Sequence Number=SeqID_11768
  Subcellular localization annotation: CTP_CleavageSite=95; ConfidenceScore=5.14e-01
MDQRARMPRTLAMSPAHAPQLPFEHRPHPLSLPCLISRKLTLSRALPSPLVLAGVPCPSCRPSGPSEVAPSLPEHRPEYRGWNPTSEFVEFFSPVLANLGDLGAPVAHTCPSSGDFTAEEQERCCPQPAWAHLLAAYAPGTRPDRPVRLAPPITDRPSPLVSVRPRARPRDLFSAVDLRSDGRESPIPLRV

SEQ ID NO: 53548 - protein, 126 aa, Zea mays
  Coding DNA Sequence Number=SeqID_11769
MAVAGRGPWIQESCERGGDKGSGEVGEAEMECDKAGAARRWPAALNTSRLSFGFYRLAPEDIALASASMDPLAPELNDDDEPVTLDFSTQVVGAISAQPLVPPVSAVTTPAMAINVPAPTPAALAP

SEQ ID NO: 53549 - protein, 56 aa, Zea mays
  Coding DNA Sequence Number=SeqID_11770
MVFGLRAQEALRGSREASRGAGLDGGGPKWLSILCEFQVKIWSGVGDMVAPSQSVP

SEQ ID NO: 53550 - protein, 212 aa, Zea mays
  Coding DNA Sequence Number=SeqID_11771
  Gene Ontology: Mol. function=dihydrodipicolinate reductase activity; Cellular component=cytoplasm; Biological process=lysine biosynthetic process via diaminopimelate
  Homolog annotation: Hit_ID=Q67W29; Match level="QueryCoverage=93%, HitCoverage=58%, E-value=7e-84, Identity=80%"; Hit description =Dihydrodipicolinate reductase-like
  Pfam annotation: Domain name=DapB_N; Domain location=29-153; Score =45.8; E_value=1.4e-10; Accession=PF01113.11; Description =Dihydrodipicolinate reductase, N-terminus
  Subcellular localization annotation: CTP_CleavageSite=44; ConfidenceScore=5.41e-01
MATAKPSVTNALANLSVESAPAALPKLSFPILVNSCTGKMGKAVAEAAVSAGLQLVPVSFSAIEVPDRKIEICDREIFIHDPSESEKILPTIVKEYPNVIVVDYTVPDAVNANAELYCKFGLPFVMGTTGGNRQLLHKTVHDANIYAVISPQMGKQVVAFLAAMEIMSEQFPGAFSGYKLEADLPQASSYQMTVSHPAVPRCGCSIAEDHAP

SEQ ID NO: 53551 - protein, 573 aa, Zea mays
  Coding DNA Sequence Number=SeqID_11772
  Gene Ontology: Mol. function=magnesium ion binding; Cellular component=chloroplast; Biological process=metabolic process
  Homolog annotation: Hit_ID=Q673F9; Match level="QueryCoverage=93%, HitCoverage=63%, E-value=1e-146, Identity=50%"; Hit description=Ent -kaurene synthase-like protein 1
  Pfam annotation: Domain name=Terpene_synth; Domain location=1-208; Score=104.0; E_value=4.4e-28; Accession=PF01397.11; Description =Terpene synthase, N-terminal domain
  Pfam annotation: Domain name=Terpene_synth_C; Domain location=225 -494; Score=240.2; E_value=4.4e-69; Accession=PF03936.6; Description =Terpene synthase family, metal binding domain
  Pfam module annotation: Pfam domain module=Terpene_synth::Terpene _synth_C; Domain location=1-208::225-494
MAYQRKNGSLFNSPATTAAAAIHSYDRGAVQYLDSLVNLFGSSVPAMYPRILYARLRMVDALEKTGISRSFSSPGLANDEEIMLDMTTCAMAFRLLRMHGYDVSSDASLGQFSEESSFHDSIQGCLGDTEALLELHKASQVQIREQETAILRSIGSWSAKLLEQQLRSNKVSRNIDPAEVDYALKHPFYTTLDRLEHRRNIEHFKTTAIQVLKSAYRACVPAGEEIAALAAADFHASQTVYQEELQCLESWVKELRLQELEFARIMPLICFFPPAATLFPCEQHEARMAMSKHNILLTVVDDLFDVGGSREEMENLVKLVEMWDAHNRVGFCSERVEIVFRAIYDTSNHLAAKAAAVQKRNIIHHLAELWANTVRAMMAEANWAMTGHLPTFEEYMAAGEPSFGLGPIVLASLYLVGPELPEDVVTSQEYNEMFRHMNVCGRLLNDLQSYEREKEQGKVNSVLLLLALEEEGGSIEAVKREVRRAIEASRIQLLRLVLRNESEVPWPCRQVFWNICKVVHQFYVHVDGYASAKQMMHSCTPGTRWCITRCRSHARRPTYNKFSQLSLGVGVHC

SEQ ID NO: 53552 - protein, 169 aa, Zea mays
  Coding DNA Sequence Number=SeqID_11773
  Gene Ontology: Mol. function=protein serine/threonine kinase activity; Biological process=protein amino acid phosphorylation
  Homolog annotation: Hit_ID=Q53N86; Match level="QueryCoverage=84%, HitCoverage=25%, E-value=8e-37, Identity=56%"; Hit description =Protein kinase homolog F21B7.1-Arabidopsis thaliana
MGSIVQFLLPMYFLERKRRERNRVLSNDTANVASANGGNTSQVEEKVLAPSYKLDNAETSVSAVGHHTKSSMHHRLKIWISSGHNGIMGKYGNKLELGMPHEARPLLLDEHAKPGWPDWLINVAPEAVRGWFPRRQDSFEKLDKVGQGTYSSVYKARDLKTDKFVALKK

SEQ ID NO: 53553 - protein, 498 aa, Zea mays
  Coding DNA Sequence Number=SeqID_11774
  Gene Ontology: Mol. function=nucleic acid binding; Cellular component= chromatin; Biological process=DNA integration
  Homolog annotation: Hit_ID=Q10I04; Match level="QueryCoverage=87%, HitCoverage=25%, E-value=0.0, Identity=71%"; Hit description =Retrotransposon protein, putative, unclassified
  Pfam annotation: Domain name=RVT_2; Domain location=94-349; Score =511.1; E_value=1.3e-150; Accession=PF07727.4; Description=Reverse transcriptase (RNA-dependent
MVHPPTQDDEQEACDQGGAQDDQVMEEEEQPTPPTQVRAMIQRDHPIDQILGDISKGVTTRSRLVNFCEHYSFVSSIEPFRVEEALLDPNWVLAMQEELNNFKRNEVWTLVPRPKQNVVGTKWVFRNKQDKHRVVTRNKARLVAKGYAQVAGLDFEETFAPVARLETIHILLAYAAHHSFRLFQMDVKSAFLNGPIKEEVYVEQPPGFEDERYPDHVCKLSKALYGLKQAPRAWYECLRDFLIANAFKVGKAGPTLFTKTCDGDLFVCQIYVDDIIFGSTNKKSCEEFSRVMTQKFEMSMMGELNYFLGFQVKQLKDGTFISQTKYTQDLLKRFGMKDAKPTKTPMGTDGHTDLNKGDSDYAGCKVDRKSTSGTCQFLGKSLVSWNSKKQTSVALSIAEAEYVAVGQCCAQLLWMRQTLRDFGYNLSKVPLLCDNESAIRMADNPVEHSRTKHIDIRHHFLRDHQQKGDIKVFHSQRRFEREKVDLDHERLPLHSDER

SEQ ID NO: 53554 - protein, 235 aa, Zea mays
  Coding DNA Sequence Number=SeqID_11775
  Gene Ontology: Mol. function=protein serine/threonine kinase activity; Cellular component=membrane; Biological process=protein amino acid phosphorylation
  Homolog annotation: Hit_ID=Q2QMD5; Match level="QueryCoverage=98%, HitCoverage=36%, E-value=4e-43, Identity=45%"; Hit description =Protein kinase domain containing protein, expressed
  Pfam annotation: Domain name=DUF26; Domain location=29-83; Score =39.0; E_value=1.7e-08; Accession=PF01657.8; Description=Domain of unknown function DUF26
MNRIVAEAALSPLRFANGSQPYNERRDDTYGVVQCRMDLDPVHCTDCLNYLIQKLLTRYPNNTIASARGTSCYARYQTDPFDAILDPPAVVAPPSPPSCKKDASRRRLIVGLEAAAAATGILFLLSLSVQLWFFSRWWQRSRIDKDDMEDKFKNGAGPKRFSYNVLAASTGNFSDEQKLGEGGFGSVYRGFLAELNLHVAIERVSKGSRQGRKEYASEEVEAPQPRAAHWMVPQP

SEQ ID NO: 53555 - protein, 66 aa, Zea mays
  Coding DNA Sequence Number=SeqID_11776
MASSKDNSDVSPNNIIKPTTNDLSVKEYQRLEDARKMMLAELDDLFLADFKVDRNQKLIRLREYNL

SEQ ID NO: 53556 - protein, 136 aa, Zea mays
  Coding DNA Sequence Number=SeqID_11777
  Gene Ontology: Mol. function=DNA binding; Biological process =regulation of transcription
  Homolog annotation: Hit_ID=Q7Y0B7; Match level="QueryCoverage=54%, HitCoverage=22%, E-value=2e-11, Identity=51%"; Hit description =Putative Myb-like DNA-binding protein
MMDLWGWTSVASGMGLDLGLDLGLFVVRSAGGMAAAKGAPAEIESCIRSLEEERQKIEVFRRELQLCVRLLVDVIDELKDEAAKKGGDAEAKADDGDKRKWMSTAQLWLDSDAKSDEINYEPCKDLKMGRGGMIWE

SEQ ID NO: 53557 - protein, 53 aa, Zea mays
  Coding DNA Sequence Number=SeqID_11778
MAATGATNVNLSVLLMQDSSFCTTSLPLRVLLEAGVDGALIVHILIISHFVDK

SEQ ID NO: 53558 - protein, 321 aa, Zea mays
  Coding DNA Sequence Number=SeqID_11779
  Gene Ontology: Mol. function=hydrolase activity, acting on glycosyl bonds; Cellular component=nucleus; Biological process=L-arabinose metabolic process
  Homolog annotation: Hit_ID=Q9ATV7; Match level="QueryCoverage=77%, HitCoverage=35%, E-value=1e-83, Identity=65%"; Hit description =Arabinoxylan arabinofuranohydrolase isoenzyme AXAH-II
  Pfam annotation: Domain name=Alpha-L-AF_C; Domain location=179-319; Score=23.3; E_value=8.5e-11; Accession=PF06964.2; Description=Alpha -L-arabinofuranosidase C-terminus
MATSLGQCPPLRCVPRTCTLLFAASSVGILARAASPHRADHLLTARADAQQRLTLQASPVIAAVNTPCQNLLEAVRIRHGALLEPKWGIPKPFPVKYVAIGNEDCERKFYRGNYLKFYNAIREVYPDIQLISNCDGSSGPLDHPADIYDFHVYADAKTLFSMKSTFDKSPRSGPKAFVSEYAVWKTDAGRGTLLAALAEAAFLTGLEKNSDAVEMACHAPLFVNDDIEKKWNPDVIVFNTWQHYGTPSYWMQKLFRESSGAMVHPTTTISSGSSADSLAASAITWKDSENNDSFLRVKARLRSVLIPEALVQIVNFGSGCY

SEQ ID NO: 53559 - protein, 286 aa, Zea mays
  Coding DNA Sequence Number=SeqID_11780
  Gene Ontology: Mol. function=alpha-N-arabinofuranosidase activity; Biological process=L-arabinose metabolic process
  Homolog annotation: Hit_ID=Q9ATV7; Match level="QueryCoverage=94%, HitCoverage=43%, E-value=1e-116, Identity=70%"; Hit description =Arabinoxylan arabinofuranohydrolase isoenzyme AXAH-II
  Pfam annotation: Domain name=CBM_4_9; Domain location=71-210; Score= -0.3; E_value=0.0028; Accession=PF02018.8; Description=Carbohydrate binding domain
MEGPPRTLIHLLLLLLCIASKCLGGASGLNSTQMVTLKVDASPKLARKIPDTFLGVFFEEMGHGGAGGIWAELVSNRGFEAGGPNTPSNIDPWLIVGDDSSVYVETDRSSCFSRNIVALRMEVLCNDCPAGGVGIYNPGFWGMPYVWTRRGSLIIQALLKYWFCRVAGDSKWIKVEKKLVAKGTNRTSRLQITSKKKGTVWLDQVSLMPADTYKGHGFRKGLVSMLMDLKPRFIRFPGGCFVEGGWLRNAFRWRQSIGPWEERPGHFGDCWQYWTDDGLGYYEFLL

SEQ ID NO: 53560 - protein, 101 aa, Zea mays
  Coding DNA Sequence Number=SeqID_11781
  Subcellular localization annotation: CTP_CleavageSite=67; ConfidenceScore=5.56e-01
MQPRHVLLSIVAAAAWGLAGKSGPLRMLLRGGSPARPASPTLRTALALFLFSSLFAQSSAPSGRCCSGSSLRHGGPRTLPGLPCEARGLAREVEDGLGAVD

SEQ ID NO: 53561 - protein, 99 aa, Zea mays
  Coding DNA Sequence Number=SeqID_11782
MERRGKGDDSTRLCIDSKSTGCAVFTNKQGDDQILTTSPGIPTNLTDMAAIQATSSMQATQGERRGPSPGSPTDQPAVKLATLVSRGRLWQMNKEKDYK

SEQ ID NO: 53562 - protein, 332 aa, Zea mays
  Coding DNA Sequence Number=SeqID_11783
  Subcellular localization annotation: CTP_CleavageSite=86; ConfidenceScore=5.02e-01
MHWRSTARRRRGRSCRLKPLPAQKTMTTTTMMRGWRSAWASALKLDFGPHQPQRGYPVVRKCPHQGRQRPYTRRGASSKLGSSSIVAEEAVVEEVTLACPNTKLRARKLAFIATKAVKHDAGTSAGAASYSHSWLDAAQKAIQRDIEVARHDLEGQARQDAIIVKVTSPPLVALVEAITVSFGEDQGWRMPRRPWHRPPSQTSCTPSPTPRSLFGSSSELVHMGSDPLARGGPTLMWMDEDGKPFFVLNDVEEREMWGQDITRGSDLTDLCVELADEATATRGRVAPLEEEAERSAAAGLKAHVGELEKDLDTSIHTSQTLSQAVDQKMVEL

SEQ ID NO: 53563 - protein, 289 aa, Zea mays
  Coding DNA Sequence Number=SeqID_11784
  Homolog annotation: Hit_ID=Q5U9D4; Match level="QueryCoverage=13%, HitCoverage=4%, E-value=3e-10, Identity=87%"; Hit description=Plasma membrane proton ATPase 5
  Subcellular localization annotation: CTP_CleavageSite=66; ConfidenceScore=5.02e-01
KAPRGFTHLLVAVDKFSNWVETAPARQPALPLRAAANRPPSPLARPPDSAPATTKRPPLPHVRLPAAAHAPRIPHARRRESRRYRTACTPAATNPAATEPPAYHPHAREPYGRRDCRISAPTPPAMPRNTRLPTPLNNCRDRPLPSSAATASWSRTSASPPPVATTASPRTLAPPNPIDAMVSKASKRKAIGEIVEQIPEESGRSYLEICDDLEKKPPKIMWNQSFDLRSPIATSDDATPAASMGARKDGSTKTISKALVLGVNVKMIAGDQLAIGKETGRRLGMGTNM

SEQ ID NO: 53564 - protein, 181 aa, Zea mays
  Coding DNA Sequence Number=SeqID_11785
  Subcellular localization annotation: CTP_CleavageSite=21; ConfidenceScore=5.55e-01
MGTHQRFWSSDTRPWKSLVPRRTSVFGEQSPQLGMSFLHTDSTTSFPVPRGIPTVAPREQRPGHGKIRVRLPTAMPAAEGVEWLRGAANLAMGQLKAQVVGHLYRARNEPCGGKDRSEPEEPRGVQPKPFMACEIYRETALTLGARATMTERARRPAERLTPLAHMAVTQPSERRPRWASW

SEQ ID NO: 53565 - protein, 36 aa, Zea mays
  Coding DNA Sequence Number=SeqID_11786
MANPRYAMARHLHDSISLIDDPMAQIGGYPFSRGTS

SEQ ID NO: 53566 - protein, 179 aa, Zea mays
  Coding DNA Sequence Number=SeqID_11787
MGGGGGGAGRLGFWVVRAAKRNGPTMHCDACWPGAMNLQQCSMQANVVDELSTYVDRHSVVDLTKSEIEGLGTIKPSLLPLPKDAALKAERKRKREKETLAANKKCFQARKRQKKVERVARARSVRSITPSTDMEYMTSMASGGSVAPASVGKLSLHDGAKGGSSVWAQEETLPVVPWC

SEQ ID NO: 53567 - protein, 192 aa, Zea mays
  Coding DNA Sequence Number=SeqID_11788
MANLAEDLLPMEEQRRSRPTGGVDLWGRTAPLRNSDPYKPSSRTMLPSSYSLIYGEAPDPNPKLDMPTRLSFQCGGHGDAAKMPHAHEHCTVYGLSIGWSKGRERTGLIATAAALGSSPFSWFALLVRDHGRDMGFKGRGPDFYIPDGGQNIPADSGAESLRLRPVLLRSRGGDGPDRCGPRGRRTMRDCTG

SEQ ID NO: 53568 - protein, 213 aa, Zea mays
  Coding DNA Sequence Number=SeqID_11789
  Gene Ontology: Mol. function=protein dimerization activity; Cellular component=nucleus; Biological process=regulation of transcription, DNA-dependent
  Homolog annotation: Hit_ID=P0C132; Match level="QueryCoverage=70%, HitCoverage=58%, E-value=3e-31, Identity=51%"; Hit description=Auxin- responsive protein IAA30
  Pfam annotation: Domain name=AUX_IAA; Domain location=7-204; Score =98.1; E_value=2.7e-26; Accession=PF02309.7; Description=AUXIAA family
MATTTDLGFEATELRLGLPGGGGGGEPALGGEGRSSSSASGKRGFAETIDLKLKLEPAAVVEAEEEEEDHGVAVALEKEEEAGKMKRSPSQSSVAAAAAAVLADPAEKPRAAKAQVVGWPPVRSFRKNIMSVQSDKGAAAANGDKSSPAAGGGAAFVKVSLDGAPYLRKVDLKMYRSYQQLSKALENMFSSFTIGTKFNLTAATTTTIITTSR

SEQ ID NO: 53569 - protein, 858 aa, Zea mays
  Coding DNA Sequence Number=SeqID_11790
  Gene Ontology: Mol. function=protein binding; Cellular component =intracellular; Biological process=defense response
  Homolog annotation: Hit_ID=Q2QMY3; Match level="QueryCoverage=97%, HitCoverage=96%, E-value=0.0, Identity=83%"; Hit description=Leucine Rich Repeat family protein, expressed
  Pfam annotation: Domain name=LRR_1; Domain location=698-720; Score =5.2; E_value=31; Accession=PF00560.23; Description=Leucine Rich Repeat
  Pfam annotation: Domain name=LRR_1; Domain location=722-744; Score =13.3; E_value=0.89; Accession=PF00560.23; Description=Leucine Rich Repeat
  Pfam annotation: Domain name=LRR_1; Domain location=746-768; Score =0.9; E_value=1.9e+02; Accession=PF00560.23; Description=Leucine Rich Repeat
  Pfam annotation: Domain name=LRR_1; Domain location=770-792; Score =17.5; E_value=0.049; Accession=PF00560.23; Description=Leucine Rich Repeat
  Pfam annotation: Domain name=LRR_1; Domain location=794-816; Score =8.7; E_value=6.8; Accession=PF00560.23; Description=Leucine Rich Repeat
  Pfam annotation: Domain name=NACHT; Domain location=234-378; Score= -31.2; E_value=0.016; Accession=PF05729.3; Description=NACHT domain
  Pfam annotation: Domain name=NB-ARC; Domain location=193-488; Score =92.9; E_value=1e-24; Accession=PF00931.13; Description=NB-ARC domain
  Pfam module annotation: Pfam domain module=LRR_1::LRR_1::LRR_1::LRR _1::LRR_1::NACHT::NB-ARC; Domain location=698-720::722-744::746 -768::770-792::794-816::234-378::193-488
MELDRLLLDQLAGEALRELLHAVQGTLFCRSTAERLRRSVEPLLPLVQGLGPHAQRSAGDLGELAARVREALDLARRAATSPRWNVYRSAQLSRRMEAADRGIARWLERHAPAHVIGNVRGLRDESHARIARLERRVDEIAASAAQPPPPALSVPVAPHKGVTMPMEVPTHKGMAMPMPMPVPVQAVPAKAGVVAMDMDLTEGHENEGMVGAGVKVAKEKVKEMVMSGGGGGWEVVGISGMGGSGKTTLAMEIFRDHKVRAYFNDRIFFETISQSANLEAIKMKLWEQISGNMVLGAYNQIPEWQLKLGPRDRGPVLVILDDVWSLPQLEELTFRFPGCKTLVVSRFKFPTLVKQTYEMQLLDEAAALSVFCRAAFDQECVPRTADKRLVRQVSAECRGLPLALKVIGASLRDQPPKIWLSAKNRLSRGEAISDSHETKLLERMAASVECLSEKVRDCFLDLGCFPEDKKIPLDVLINIWMEVHDLDEPDAFAILVELSNKNLLTLVNDAQNKAGDLYSSYHDYSVTQHDVLRDLALHMSGRDPLNKRRRLVMPRREETLPKDWQRNKDTPFEAQIVSIHTGEMKGSDWFQMNFPKAEVLILNFASSLYYLPPFIASMQNLKALVLINYGTSSAALDNLSAFTTLNGLRSLWLEKIRLPPLPKTTIPLKNLHKISLVLCELNSSLRGSTMDLSMTFPRLSNLTIDHCIDLKELPASICEIGSLETVSISNCHDLTELPYELGKLHCLSILRVYACPALWRLPASVCSLKRLKYLDISQCINLTDLPEELGHLTSLEKIDMRECSRLRSLPRSSSSLKSLGHVVCDEETALLWREAEQVIPDLRVQVAEECYNLDWLAD

SEQ ID NO: 53570 - protein, 148 aa, Zea mays
  Coding DNA Sequence Number=SeqID_11791
MTGMENVVKGTNDDVMEKDESERHANGDEPVGDSRIPRGRRWGPSTVSLGTRPKTLASEVWARSCEAVRGEFFMPVETRRRGEARCMEADPEAGRLAWVARFCQPEGTQKLSQTWVLSCLNLVFLSAMRHTRWLDKKTKLNNSFGSNR

SEQ ID NO: 53571 - protein, 175 aa, Zea mays
  Coding DNA Sequence Number=SeqID_11792
  Subcellular localization annotation: CTP_CleavageSite=72; ConfidenceScore=5.38e-01
MDGNGTAYYFMVKVNDSPAGCHRPVQNFDQLVPPGVRAPPASRTRPRPATPVPSPASRARPRSVAPPLPPALASAPPDEPPLPLPAPGRPRRAALGPARRAASAPLRRAAPTPDLAPPQRAAPAPPRLGRPRRAALRRLGPGRAPRPARASPRPCAVLAPLQETQSFSAARSRRK

SEQ ID NO: 53572 - protein, 239 aa, Zea mays
  Coding DNA Sequence Number=SeqID_11793
MGCNYNHLSAQERMDGSQEEGSPEERVEALNPLPPRRRAARRDLPTSSICLHDGAPHHDFNLLPHDLNRSARVNTVQLRSPVHGGGSGTPSAGKGAKLEATRVQIRPPVGSIRGLEAPPVQMAQLMASTLAEKGRPALAPAPVSTSTVEQVPACRGTQRARQGQVEAAAADPAVEAPRATKGRKPPSLAAEGHAAAGRPSALLPMLEELRATTEQTRVHLVEARAHVQLDGAGNPDDAL

SEQ ID NO: 53573 - protein, 111 aa, Zea mays
  Coding DNA Sequence Number=SeqID_11794
MHNRLVPLTIDDQILENVSNGTEFHAVTSSYNTAPLTCILVLLGMLKRISQHISLFPEFAVSVLGREDGYHCYSIVPVCPCYLFDRKLCIALLFDRELARFTVILSCRAAQ

SEQ ID NO: 53574 - protein, 800 aa, Zea mays
  Coding DNA Sequence Number=SeqID_11795
  Subcellular localization annotation: CTP_CleavageSite=43; ConfidenceScore=5.23e-01
MPSSASPFKLLPAPAPSSSLASVSEPELRSVVGKEIMGNNNVTGQQVSEETTNGADKIVEPSNSSPGPNGTNDTEKDGAEYVNWSKSSKEPVITNAEDKQMASYQKKSPDKVEGLDEKSRSSIQYNTSTRDDQTSNLQKALNSTDKNKHSGTDDEPLRKEATETAIFSSETIALVSTTEDVTSYKDSSIYNEEIVPLMHGTTETSEETIQGNYKSLLQEKIEGSLEELEESSSHDNSPMGGSLAGENTTENTEQGYIEVATVEEILVVMQGETTSSTESIVSTYLDADDSEIKEVVIEDKPVQKESLPDVQPSDGTNLEISKNDNMQIQIPHDQEENRAISKIATVNIMTESDEAFEDDNNILALGNQDEDNAVSTLCGNLYNDEVVAKCQPYLKNPTSMNDPELENEQNERVVGSRRQSSVSVTTTMKHNGIGTIYKEEGIAEKNITAWNLEDNFATENKPEEHYGNLVSITEVNGKDFTGLQSSLSDHHYIGNEEIQRKVSGVSGIVEFDKETVKEILEEDKVNNVEGLGLHFDAHVVTKEGGDLSNLPKAIPLIPLQSLEDIDRKVYRTRDKQETITNSQVDQSQLILLEKYEVLKLENGEILRKCMQLVEDSSNVVIISTDGINHEKVDTNTTSSDFTFEANHYQKEVTEGISAAAFTAQCNQVKVTTCFGTATEEQHTHQTSTPGREASEVTPLLQGAQNIGFSNCIEQHSHVHMEIPTADIAVMQFKIEADEESERSPLLSPREPTGGDFRIANHSARFKKPFESLLMQSEAGIWSPLKEPESNSKSNTMFPKI

SEQ ID NO: 53575 - protein, 328 aa, Zea mays
  Coding DNA Sequence Number=SeqID_11796
  Gene Ontology: Cellular component=integral to membrane
  Homolog annotation: Hit_ID=Q5ZBZ3; Match level="QueryCoverage=83%, HitCoverage=44%, E-value=1e-129, Identity=76%"; Hit description =Putative dymeclin
MTGAKRVRCCRPPWRGSSTSGRSKKQEDTYVLISLSIKKLMPILETLYNASRKTSNQIYMLLIILLILSQDSTFNASVHKLVLPGVPWYHERLMHQTSMGSLMVVILIQTIKYNLSKLRDVYLHTNCLAILANMAPHVHRLSAYASQRLVSLFDMLSRKYAKLAELKNDKSLKVISDQMEADNIADDMSTELHIYTDFLRIVLEIINAILTYALPRNPEVVYAVLHRQEVFEPFKNHPRFNELLENIYTMFTQLRFTYEQESHPEEFFIPYAWRLVLSRGFSFNPSAINLFPVEIHLEGEEGGRIVQGFRDCAIIGGRLLCRLYTILS

SEQ ID NO: 53576 - protein, 112 aa, Zea mays
  Coding DNA Sequence Number=SeqID_11797
MTRVTVDACLLPPDQYGRVPVDPDPAICVNMCGARCLNACSDKNVVMWRLCCCNCQVDETDRCESHVKATTNKIDGVTKGLRDSATAKVEPHDDAPPIDVDVLSLDDLIKNC

SEQ ID NO: 53577 - protein, 114 aa, Zea mays
  Coding DNA Sequence Number=SeqID_11798
  Gene Ontology: Mol. function=serine esterase activity
  Homolog annotation: Hit_ID=Q5SML5; Match level="QueryCoverage=27%, HitCoverage=5%, E-value=2e-07, Identity=75%"; Hit description =Putative response regulator 9
MRNYSKLVSIRLGGKQLEGGTAWRPDKTPRIGYRWIRQFLAPCYYTLLLMPGFIEVVYYYFFSSQVHRSVVYGDQPKNSDVHMPDMDGFKLLELVGLEMDIPVIKTVPKGYLNS

SEQ ID NO: 53578 - protein, 334 aa, Zea mays
  Coding DNA Sequence Number=SeqID_11799
  Gene Ontology: Mol. function=structural constituent of ribosome; Cellular component=small ribosomal subunit; Biological process =translation
  Homolog annotation: Hit_ID=Q10QU8; Match level="QueryCoverage=65%, HitCoverage=80%, E-value=1e-100, Identity=84%"; Hit description=40S ribosomal protein SA, putative, expressed
  Pfam annotation: Domain name=Ribosomal_S2; Domain location=53-216; Score=246.1; E_value=7.4e-71; Accession=PF00318.10; Description =Ribosomal protein S2
MAITPAGITAGNTRCGGGEDRGAEGQNRAPRTAAACGEQGLAAGGEWRTAVCGLRRRAASRVDRRRVFEAERSSGIYIINLGKTWEKLQLAARVIVAIENPQDMIVQSARPYGQRAVLKFAQYTGAHAIAGRHTPGTFTNQLQTSFSEPRLLILTDPRTDHQPIKESALGNIPTIAFCDTDSPMRYVDIGIPANNKGRNSIGCLFWLLARMVLQMRGTILPGHKWEVMVDLFFYRDPEEAKEQEEEAAVAPEFAAITDYQGADQWVGGDQWTADVAAPSVAPTGAEWGAAPAPVPTGDGWDQTGAPVPADGAVPPVIAPTGWDQAAQPTAQGWE

SEQ ID NO: 53579 - protein, 122 aa, Zea mays
  Coding DNA Sequence Number=SeqID_11800
  Gene Ontology: Mol. function=protein dimerization activity
  Homolog annotation: Hit_ID=Q337Y8; Match level="QueryCoverage=85%, HitCoverage=19%, E-value=7e-14, Identity=38%"; Hit description=HAT family dimerisation domain containing protein, expressed
MAAFSPKNSYGDFKLESLVELAKLYPDDFTSEELKDLAHDLEIYIDNVQADDRFSNLNTLTELAKLMVDTKKHLAFGLVYRLLKLVLVLPVATASVERLLLYPNFDVCLEAGAFESRCSEFL

SEQ ID NO: 53580 - protein, 75 aa, Zea mays
  Coding DNA Sequence Number=SeqID_11801
  Gene Ontology: Mol. function=structural constituent of ribosome; Cellular component=ribonucleoprotein complex; Biological process =translation
  Homolog annotation: Hit_ID=Q8H3I3; Match level="QueryCoverage=51%, HitCoverage=12%, E-value=7e-14, Identity=92%"; Hit description =Putative 40S ribosomal protein
MAAAAAVGGAVRPLSQKEQDIQMMLAADVHLGTKNCDFQMERYVFKRRTDVCSMSFRWFAVIIREMFLVIQLSEG

SEQ ID NO: 53581 - protein, 155 aa, Zea mays
  Coding DNA Sequence Number=SeqID_11802
  Gene Ontology: Mol. function=nucleic acid binding
  Homolog annotation: Hit_ID=Q5N8W4; Match level="QueryCoverage=91%, HitCoverage=49%, E-value=6e-61, Identity=78%"; Hit description =Putative RRM-containing protein SEB-4
MAALSYAHSREQYSPYTPDYGYPTNFYNIYGGAQYPFYGGATAGMVTGTSPFYPYFQFGQSGNTTTNYTSGQGYNLQQYPQMFHFSTVSSTAAAVTGFAQQYGGPLSLAASPQAQAGMTMALTAPTLPTPTQAAHPYRLIPSHFAVSAAPEQPLA

SEQ ID NO: 53582 - protein, 60 aa, Zea mays
  Coding DNA Sequence Number=SeqID_11803
MGTGQCTHGSKASGCFTLNAGSDVMGTLKAIVCVCSLSRGKLAELHAGVFCVRFYSPAAE

SEQ ID NO: 53583 - protein, 291 aa, Zea mays
  Coding DNA Sequence Number=SeqID_11804
  Subcellular localization annotation: CTP_CleavageSite=57; ConfidenceScore=5.09e-01
MAIEVPPLVPKKPPSTAPLPGLWRHVRPSIVYRRSRKFTLHALLPALDSWTPLQFVLAGEVRCLVLHRTLLCEIVRTLESRRLAAARAKCSEQQQAGGGWHRRCPCPAAIRDTAARRQCGRGAPRGGQIIAGVRISRHVGVGQASADSEAGLLRLGWEWTVESAGAVQQARAEAGASPRRLPSRPRSTTNEDCCFVPVRALRTAAAHTSGSLPNEILQPELSQRCIAGARGTRSGTPRPSSGAGPPSSARRPQHTVAERQRPTVKTGLLGCRRIKPYTEHTSMQFRKLSAT

SEQ ID NO: 53584 - protein, 207 aa, Zea mays
  Coding DNA Sequence Number=SeqID_11805
  Gene Ontology: Mol. function=transferase activity, transferring glycosyl groups
  Homolog annotation: Hit_ID=Q5N8W6; Match level="QueryCoverage=87%, HitCoverage=93%, E-value=2e-44, Identity=50%"; Hit description =Galactosyltransferase-like protein
  Pfam annotation: Domain name=RRM_1; Domain location=4-73; Score=44.9; E_value=2.8e-10; Accession=PF00076.12; Description=RNA recognition motif. (a.k.a. RRM, RBD, or
MCTGNLDEKVSERVLYEILIQAGHVVGLHVPSNKESNSRKGYAFAEYETEDIAQYAVRLFSGLVRINGKTLKFVIAGHDKPSSNDNKSVLLNHVPSSNGNNPVMPKLNPIPLPKPTQIMRCSDMPVSHIPAYPVLYRVDQYTAMARFSNSTYAYNRQEFGSVLNIAQRGPVMNAFAHEAANQPIMYVENVGAEERSMLRVGRFHIGS

SEQ ID NO: 53585 - protein, 181 aa, Zea mays
  Coding DNA Sequence Number=SeqID_11806
  Homolog annotation: Hit_ID=Q8L4C2; Match level="QueryCoverage=75%, HitCoverage=75%, E-value=6e-55, Identity=78%"; Hit description =Putative SnRK1-interacting protein 1
  Subcellular localization annotation: CTP_CleavageSite=27; ConfidenceScore=5.00e-01
MAPGALTRLLRVASTPRMARPFAAKSRASRRPQDPELPTGDENDFAGSEVAAPTESIDKPLAEVLKELGKRVPDSLVKTRVEDNGFTMKYIPWHIVNKILNIHAPAWSGEVRNIVYSSDGKSVSVVYRVTLHGIDAEGLIFFRHRPDQTSHRLKSLHMPCSPSCQHRRLLCMCRLFNLWLV

SEQ ID NO: 53586 - protein, 141 aa, Zea mays
  Coding DNA Sequence Number=SeqID_11807
MVNQGHGEVGYLEKTTLERLSDGENTAGPGSTVAATRLHNEEFRECKQRGIEREGANQGVSWVSGVQAKLTVATNTTEARWRPQNGPEIMADGGGAPRACVVRDRCESSAEVRYWARGVSEWDTGSKRGRARPRRSARAGG

SEQ ID NO: 53587 - protein, 597 aa, Zea mays
  Coding DNA Sequence Number=SeqID_11808
  Gene Ontology: Mol. function=protein serine/threonine kinase activity; Biological process=protein amino acid phosphorylation
  Homolog annotation: Hit_ID=Q53P17; Match level="QueryCoverage=34%, HitCoverage=78%, E-value=1e-49, Identity=45%"; Hit description =Protein kinase domain
  Pfam annotation: Domain name=KIP1; Domain location=519-595; Score =2.6; E_value=0.1; Accession=PF07765.3; Description=KIP1-like protein
  Pfam annotation: Domain name=Pkinase; Domain location=133-479; Score =137.2; E_value=4.4e-38; Accession=PF00069.15; Description=Protein kinase domain
  Pfam annotation: Domain name=Pkinase_Tyr; Domain location=126-479; Score=10.7; E_value=4e-13; Accession=PF07714.7; Description=Protein tyrosine kinase
  Pfam module annotation: Pfam domain module=KIP1::Pkinase::Pkinase _Tyr; Domain location=519-595::133-479::126-479
MAKRSVRPVSDEARPVLGEALPVLGPRRHSRAGDLGDRRPYTLRYSHLSLHSALRDTRRPGYELTKGGKLITVHYPNQDPGSDRSQQMDSEDKIHDHLEITSKCDHEVLLKNEKEFKPIYVPMSFLKAITKNFSDTLEIGTGGFAVVYKGLLKRGGTVAVKKLLNTICMDDSQFQKEGKMESYKGKLILADERQRFLCFEYLPNGSLEKYINDASGGLEWNKRFKIIKGICEGLQYLHENNIVHLDLKPPNILLNDNMVPKISDFGLSRCFEEMQSRTMTSTLVGSVGYLAPEFFSGQVSKKLDIYSLGVVIAEMLTGQQGHCPVENRIAGWLDTENANITDHDTLADEVKANLHVLRVLMLHMIGREADHIDVVAVDEGGALEGIVELLEKLTEPGGLGHAVGHNAVHGLSAGAGDDGLPLRSLGEEVLECWRQRFGESSPDTDKLLEQVRVCAKIRMSCGNLDPEKRPDIQQITAILSEPSDSDEFPEVDFEEVFSSFVRQQQQHNGSMQTKRSKHSWWWDSHISSKSSKWLSDNVEALFAIDVSSVMGNENTTLFWTDCWTLGRSIENLAPLVLAQVPLRAKKTRTMAIVMAIV

SEQ ID NO: 53588 - protein, 376 aa, Zea mays
  Coding DNA Sequence Number=SeqID_11809
  Homolog annotation: Hit_ID=Q5NB70; Match level="QueryCoverage=42%, HitCoverage=26%, E-value=4e-50, Identity=67%"; Hit description =Putative dual specificity kinase 1
  Subcellular localization annotation: CTP_CleavageSite=26; ConfidenceScore=5.20e-01
MEPRTLYDDGGSQPLTEARGQLNPTRGRRRSNVGNPRRRRPPPLLIPPPLGTGRESAAVRIAATATENTGARLMDRIVGGKFKLGRKIGCGSFGEIYLGERTDSALPRSPIASFLLSLPLPARLVSAWVLSSVITTVPDLLFAVTVPATHVDTYEIVAVKIESSKTKHPQLFYEAKLYNTLQGGSGIANVKWCGVDGEENVLVIDLLGPSLEDLFCYCGRKFTLKTVLMLADQMKPERKQGRRKQGRRTYQGRPAAVQGGARLGSCSRAQGAGRSHAHRRSRARTGSSSRAHREGLSRAHMRQRPYLFPYVPTFLTYSRAKSPKRAPIWVLLAATKANNPKVRRRPGGRRRRPDAYLAKVDAMLVLTWAAPTPSKI

SEQ ID NO: 53589 - protein, 145 aa, Zea mays
  Coding DNA Sequence Number=SeqID_11810
  Homolog annotation: Hit_ID=Q5Z4E0; Match level="QueryCoverage=57%, HitCoverage=5%, E-value=2e-38, Identity=89%"; Hit description =Putative Nuclear pore complex protein Nup155
MEYYIGPEGRGTVEEISTKLKEGCPSYFNESNYKYYLAVECLERASMINNPDERDILARDAFNLLTKIPESTDLSVICKRFENLSESEFQAEVKKVTSWFPGCVHARWTDLWGLDPRVGAGRAQSTSKDPAYRGLTLMLHWSQFS

SEQ ID NO: 53590 - protein, 344 aa, Zea mays
  Coding DNA Sequence Number=SeqID_11811
  Gene Ontology: Mol. function=transcription regulator activity; Cellular component=nucleus; Biological process=regulation of transcription
  Homolog annotation: Hit_ID=Q1SP86; Match level="QueryCoverage=86%, HitCoverage=93%, E-value=2e-37, Identity=36%"; Hit description=Helix- loop-helix DNA-binding
MPPLSSPSMLLLPQHHLQIFSGLPLPLPPEVLNDSSATSDLHDGRESSMPESWSQLLLGGLVGDHERYNAATALLSKGLEERPAAYNCYDPGHGGGEEIQTSGTNIRSHQVSQALLASSSPRSCITTSLGSNMLDFSNTTVPPAPDLKNHHSDNSSEGNSAGSGSAPKKARVQTSSSAQSTLKVRKERLGDRITALHQIVSPFGKTDTASVLQETIGYIRFLLSQIECWKALRISAALSFPYLGHDNGDSMQQHNTNNLLLNHSTSDAMVQVQGPPMTNQEGEVYGNGIEEGSRKDLRSRGLCLVPVSCTSHLADDNGPSDFWAVSAAPSPPPPPPPFAGIIWR

SEQ ID NO: 53591 - protein, 414 aa, Zea mays
  Coding DNA Sequence Number=SeqID_11812
  Gene Ontology: Mol. function=nucleoside-triphosphatase activity; Biological process=cell division
  Homolog annotation: Hit_ID=Q6YUV9; Match level="QueryCoverage=45%, HitCoverage=45%, E-value=2e-78, Identity=72%"; Hit description =Transitional endoplasmic reticulum ATPase-like
  Pfam annotation: Domain name=AAA; Domain location=7-369; Score=124.1; E_value=3.8e-34; Accession=PF00004.19; Description=ATPase family associated with various cellular activities (AAA)
MTMPNDGGSGSGKSMGARAVTASEHGTRGNVTYVTKDKAHGARSKATKGQLAKAGPVEAGIVSGGRGSTTSVLLVQVGDERTGRLGVVAGVRLGLLGGRSGGYANDEGGGEPSQEDTRVHVGTAWGGGYGQGHGGHRKQNNGELDKGGGGGGVGHSPDDQGRGDRHWRRRGGVRWAGAGVERHSPWDEHEVWLLPGKRPSRGRASAGRPGVAAGYEEGENREKTCSEKLTKALFSFATRLAPVIIFVDEVDSLLGARGGAFEHEATRRMRNEFMAAWDGLRSKENQRILILGATNRPFDLDDAVIRRLPRRIYVDLPDAQNRMKILKILLAKEKLESDFKFDELANATEGYSGSDLKNLCVAAAYRPVHELLEEEKKVSSSVSYDATSMNELRKWNEQYGEGGSRTKSPFGFGN

SEQ ID NO: 53592 - protein, 246 aa, Zea mays
  Coding DNA Sequence Number=SeqID_11813
  Homolog annotation: Hit_ID=Q6Z8L4; Match level="QueryCoverage=67%, HitCoverage=26%, E-value=6e-81, Identity=91%"; Hit description =Putative SEC6
CYFASIATQIGEELGDIYDYVAPCFPSRYEIFQLMVNLYTERFIQMLRLLSDRANDIQNINILKVTSWVVQYQEDLIGLGVDESLAQVCSESGALDPLMNMYVERMQATTKKWYNNILEADKTQPPKSREDGKLYTPAAVDLFRILTEQVQIVRDNSTYVMLYRIALAVIQLENGNPNPNQGWKDVEIAAKLGENTRQQLLGEDVGKLQRGGEAENLNVTSGDSLADEVQVDLHVLRVLMLHGIGG

SEQ ID NO: 53593 - protein, 255 aa, Zea mays
  Coding DNA Sequence Number=SeqID_11814
MMPNGGSGGSSKGMGGYASGGSGGQVKGVEWVGAVAASEHDTSGKVAYGSGRAAVAVEDREGSAVERPKAGKKRARWRKGSTQAEWQRRATTRGSTRERGVADRGREQSGCWRGQQDRRSAVKEGVGVEGMRKGVAALGGDAEPQQGAAPGIVGVAGRGREQPDCERGYQERRGRGRWRGGRLRECRRVGPASRETPPMRSTGGSRHRPWSVMGLHRASAGGRAERSWRASRLEARPPGGAASGAQPSSGKHAPS

SEQ ID NO: 53594 - protein, 90 aa, Zea mays
  Coding DNA Sequence Number=SeqID_11815
MAVDLPLGAYKAIDKIRKGFLWQGRRNINGGHCLVAWGRETTLMTWSLGDARSGCGAGAAELQESPVNALETGQPPLDDGQGRRQSLGYD

SEQ ID NO: 53595 - protein, 96 aa, Zea mays
  Coding DNA Sequence Number=SeqID_11816
  Subcellular localization annotation: CTP_CleavageSite=74; ConfidenceScore=5.59e-01
MKLCQLYSQCLQLFNTPLRPVTLDFSTQVVGPGSAQPPMPLAFAVTTLAMVVSVTTPAPADPTSQPASESAPALASTTDSGSETDSDTLLAFALLP

SEQ ID NO: 53596 - protein, 116 aa, Zea mays
  Coding DNA Sequence Number=SeqID_11817
  Subcellular localization annotation: CTP_CleavageSite=37; ConfidenceScore=5.43e-01
MEDRKHKIGGSQVGSSSRPRYSGNPPQPFKQGRKSISASEQPGTRSSCPNNQPEQPSSSSNAMQQGGNTHGQPHAQYGKVNHLEADTIQKTLGVALVDRCAKEPLLRWCTGQSGEL

SEQ ID NO: 53597 - protein, 78 aa, Zea mays
  Coding DNA Sequence Number=SeqID_11818
MQRKRKMLGELDNVQPKPSRDLMEHRKIIKEYCNLADGKYILAPEQGVAQEVAQDPAPKPAIEDLPAPALEGKPRFYA

SEQ ID NO: 53598 - protein, 141 aa, Zea mays
  Coding DNA Sequence Number=SeqID_11819
  Gene Ontology: Mol. function=aminoacyl-tRNA ligase activity; Biological process=alanyl-tRNA aminoacylation
  Homolog annotation: Hit_ID=Q10A14; Match level="QueryCoverage=65%, HitCoverage=9%, E-value=3e-31, Identity=68%"; Hit description=Alanyl- tRNA synthetase, mitochondrial, putative, expressed
MLYELDVLKGASMLFGAKHLVVGVIAMSYELDVSRGAGLALAQLMDAFILWDTYGYPIDLTEVMAIDYGLTVDKKGFNASMEEARQKARNARNKSGGNSIAMDANATAQLRKLGLASTDDSPKFLWPKIKPNSILSLIEVS

SEQ ID NO: 53599 - protein, 731 aa, Zea mays
  Coding DNA Sequence Number=SeqID_11820
  Gene Ontology: Mol. function=aminoacyl-tRNA ligase activity; Biological process=alanyl-tRNA aminoacylation
  Homolog annotation: Hit_ID=Q10A14; Match level="QueryCoverage=44%, HitCoverage=31%, E-value=1e-135, Identity=79%"; Hit description =Alanyl-tRNA synthetase, mitochondrial, putative, expressed
  Pfam annotation: Domain name=DHHA1; Domain location=281-353; Score =10.2; E_value=0.031; Accession=PF02272.9; Description=DHHA1 domain
  Pfam annotation: Domain name=tRNA_SAD; Domain location=86-145; Score =79.0; E_value=1.5e-20; Accession=PF07973.4; Description=Threonyl and Alanyl tRNA synthetase s
  Pfam module annotation: Pfam domain module=DHHA1::tRNA_SAD; Domain location=281-353::86-145
MLNFALREVLGDHVDQKGSIVLPEKLRFDFSHGKPVQPEDLRKIEFIVNQQIKDELGVYALEIKLEDAKRINGLRAVFGEIYPDPVRVVSVGRKVEDLLADPDSKEWLSISTELCGGTHITNTRDAKAFALLSEEGIAKGVRRITAVTAGCATQAMELASSIDSDINKASQLEGALLEKKIASIKSGLDAAAIPAARKADLRGKVSKLEDDYYNCCTSQDELRKAKKKMGEQNIQKAVKSAMDAAEAALSGNKPFCVTHVDVGLDTTAVREAVIKVMDQKGLPIMLFSTDEASNKAVIYAGVPPNAPSGFKVLDWLTPSIAPLKGRGGGGKNGVAQGQERYGRGDKSYPLFDGGAVRVVVIETTISMVKNAWQRPGSGKTKVPPEALVEPASGHAVVQGGVSIVVGVATYGIHGELLPGQLAEAELGRSGVFFEVKADFGRGGVPSRGWARGCPPVRDGLGRGGNRYLVKRGHRGLVDDGLLRPCSLGTHPEWLTPWDEKEPTPPAGYVATIYTTVCEEYLGIEPHWDLLLHLFCVEPFSRPSEVKKSHWFYLRNDDGRLPEYTKRVRLYDRGATAAEVVVAFHYRRVLPLVERHLRMDEMTPEASMESSRMASVALSTDKLLKREREGLPLEASPSRDDDDDEGMEVRLVFCPEVRIWSEPSLVGSSVGADVSVLELEASVPLPEIRASTESGPILATEEEAAVVERAADPLPVPTSRTKGPRSQGHALV

SEQ ID NO: 53600 - protein, 57 aa, Zea mays
  Coding DNA Sequence Number=SeqID_11821
MPSPFPESDEFVTEDMGTGADDSPDSPVLMERYSGKRPEPPKVSQYHPHNQDNIIVS

SEQ ID NO: 53601 - protein, 98 aa, Zea mays
  Coding DNA Sequence Number=SeqID_11822
MDSIHVQRKKLVLANRARMAELRQAHMRWLHICHLMPLGPTVQSLRLKKFNSAEKAQLQQLNYNWRSSTQLKKLNSDEEVQLSWKSSTAAKEVQLEST

SEQ ID NO: 53602 - protein, 97 aa, Zea mays
  Coding DNA Sequence Number=SeqID_11823
MAPEAGLGCCQPHSVEWLSSRCGAGGAVLLSDRSVERRSDCGHFGSVDWRACVRIKLCADGGYQLRFRSLEGTPIMVPDSSHVINPPHAATGERSLA

SEQ ID NO: 53603 - protein, 274 aa, Zea mays
  Coding DNA Sequence Number=SeqID_11824
  Homolog annotation: Hit_ID=Q9LS53; Match level="QueryCoverage=82%, HitCoverage=29%, E-value=3e-64, Identity=53%"; Hit description =Genomic DNA, chromosome 3, P1 clone: MYF24
  Pfam annotation: Domain name=C2; Domain location=171-262; Score=23.3; E_value=0.00088; Accession=PF00168.20; Description=C2 domain
MILQRRLKNRKPKLIDKIELQEFSLGSCPPTLGDQGMRWITSGDQQVMCLGFDWNSHEMSVMFLAKLAKPLIGTCRIVINSIHIKGDLLLSPILDGEAILYSFESTPEVRIGVAFGSGGSQAIPGMELPGVSTWLVKLLTETLGKTMVEPRRLCFSLPSVDLRKRAVGGVLSVTVVSASNLCKSTANDIGNCQSSNGGATYGIADNKVSQTFVEVEVGNLMRKTSTSKGLNPTWNSTFNMVLHGETGIVKFLLYELDSGGVKFNYLTSCEIKVF

SEQ ID NO: 53604 - protein, 425 aa, Zea mays
  Coding DNA Sequence Number=SeqID_11825
  Gene Ontology: Mol. function=calcium ion binding; Cellular component =integral to membrane; Biological process=calcium-mediated signaling
  Homolog annotation: Hit_ID=Q9LS53; Match level="QueryCoverage=99%, HitCoverage=45%, E-value=1e-86, Identity=44%"; Hit description =Genomic DNA, chromosome 3, P1 clone: MYF24
  Pfam annotation: Domain name=C2; Domain location=185-305; Score=63.3; E_value=8e-16; Accession=PF00168.20; Description=C2 domain
  Pfam annotation: Domain name=C2; Domain location=45-124; Score=82.6; E_value=1.2e-21; Accession=PF00168.20; Description=C2 domain
  Pfam module annotation: Pfam domain module=C2::C2; Domain location =185-305::45-124
  Subcellular localization annotation: CTP_CleavageSite=56; ConfidenceScore=5.34e-01
LTVSLVLKEWQFSDGSVTLSNSLGNGLQSSFDGSTKLQSTTGRKVRVRVVEGRALTANSKSGKCDPYVKLQYGKALYRTKTLTHTVRPVWNHKFEFDEISGGEYLKIKCYNADMFGDESIGSARVNLEGLLEGATRDVWVPLEKVDSGEIRLEIEAIKNDHNNSLQRFSKHCKMSSSSKAGSGWIELVIIEARDLVAADLRGTSDPYVRVHYGSKKKRTKVRCFSQSEFRKSYGLLTAYLSLMLLCMEKSQFVEACLVLSTQVIYKTLSPQWNQTFEFLETGEPLILHVKDHNAVLPTASIGHCTVEYSMLSPNQSAEKWIPLQGVKSGEIHVRVALKVSVPGSEKKNMLGAGPFGKGHKMSTQMRDSLKRFTGLIDDGGDPEALALAVAEMEGIQGEQEEYVETLEREKAMLLHKINELGSENH

SEQ ID NO: 53605 - protein, 133 aa, Zea mays
  Coding DNA Sequence Number=SeqID_11826
  Subcellular localization annotation: CTP_CleavageSite=14; ConfidenceScore=5.43e-01
MACVPFQARPAAACAAARVARFSGAVSPDNGLQERTTRRSKQSDGYLKATTTSASASATTRPRLMSAVGSSNAVANTGLQNTGNQAEVKVIGVELSKLQGGPRKRMPMSFLQQGRLYDAVDGGAFYDDIQVDT

SEQ ID NO: 53606 - protein, 123 aa, Zea mays
  Coding DNA Sequence Number=SeqID_11827
MSSFFDADEDEAEKDIVGTPLAQKVPLSLPWQRTNEKGLLNLKKPNKRPKMIHHLVRDLLTNTWVGKEVCRYTADYVGFLKMEAMLSTMSNEDFLDCLTYTHVKGLFLSKTLKNKRNVEGEAA

SEQ ID NO: 53607 - protein, 160 aa, Zea mays
  Coding DNA Sequence Number=SeqID_11828
MYLLGKACVQQHVDLSTDEILPLDGLLLGLLTHRLGVRVDLQMVPCGVGGLGGARSNLNGLHRDADCPIRIYSSRLCRCHGTRGRGVVSPIVREPKGIETEYPTLAPASSDSTTTSAYTMPPKKIVAIGSILALIDPNQGNEALIREARNHKKKATSPPP

SEQ ID NO: 53608 - protein, 137 aa, Zea mays
  Coding DNA Sequence Number=SeqID_11829
  Gene Ontology: Mol. function=nucleic acid binding; Cellular component= intracellular; Biological process=chromatin modification
  Homolog annotation: Hit_ID=Q9LG97; Match level="QueryCoverage=91%, HitCoverage=39%, E-value=2e-23, Identity=56%"; Hit description=C2H2 zinc-finger transcription factor-like
MACGLQEASREPIGPEQLAGGVRQASGRELHDHRHIKLPCRTGIKKKGDGGKDDAAKVYECRFCSLKFGKSQALGGHMNRHRQGKIIHHYSPSSLHNAYISLYFMAGETETLNRARQLAFGNKSLAAIGAQAQMTMT

SEQ ID NO: 53609 - protein, 149 aa, Zea mays
  Coding DNA Sequence Number=SeqID_11830
MTLGSSHHLARPSGRLSLGKSHLVEYILLLGIGVESDQGATVQQRDHLIHLVIFSFDLLLEKIFNLEVIPKVIPLNEPRLSVWIRSWAPGSAFAPTPSAPDQPNDQNYSIQPKRLSHYPDRLDGLTQGLGVYVCPIVLDRLDGKTTLFN

SEQ ID NO: 53610 - protein, 192 aa, Zea mays
  Coding DNA Sequence Number=SeqID_11831
  Gene Ontology: Cellular component=chloroplast envelope
  Homolog annotation: Hit_ID=Q01BV2; Match level="QueryCoverage=27%, HitCoverage=78%, E-value=7e-08, Identity=45%"; Hit description =Homology to unknown gene
  Subcellular localization annotation: CTP_CleavageSite=27; ConfidenceScore=5.58e-01
MAPCASPSALALSASTRVTTTSQIASCAFTLGTVAVLPFYTLMVVAPNADITKRTVESGAPYVALGLLYAYLLYLSWTPDTLRAMFASKYWLPERWDGTTWQLAGIVRMFASEMTVASAWIHLLAVDLFAARQVYHDGLRNNVETRHSVSLCLLFCPVGILAHVLTKDSSIVTMWRCGLSGIDRVYRLIHQM

SEQ ID NO: 53611 - protein, 140 aa, Zea mays
  Coding DNA Sequence Number=SeqID_11832
MAKAWYGEIGEAWTGFGHVSDEARRRAVVLLCGRTGVLDVGWSFDEGLLSRWVRVAAPESAVAAVGAPVLGVDGLGQGRARALATLGGATEVDLSAAGAARLGRLGRGCATSCCCSRSAGAGHVAHALWLACSRESRGEE

SEQ ID NO: 53612 - protein, 107 aa, Zea mays
  Coding DNA Sequence Number=SeqID_11833
MGRGRGKKQWHYTPLYEVKKRTVGTGVSVAGARSSVLSAQGLLSRWVRVAAPGLAVAAVGAPVWARTDWGRGALGLWRHLGSDWSIGGAGRVGCARTWALRAGRDRE

SEQ ID NO: 53613 - protein, 108 aa, Zea mays
  Coding DNA Sequence Number=SeqID_11834
  Subcellular localization annotation: CTP_CleavageSite=34; ConfidenceScore=5.10e-01
MATTAHGSPTGPQRDDPSPIDSNNTHGTLQGGTQGGAERSGESTNTQGTLPGGRRHRHRRSERQPRSHSRWTWTKNVEVRWTNAVGLGLARPGQLCCCCAARAGRASG

SEQ ID NO: 53614 - protein, 701 aa, Zea mays
  Coding DNA Sequence Number=SeqID_11835
  Gene Ontology: Mol. function=RNA-directed DNA polymerase activity; Cellular component=intracellular; Biological process=RNA-dependent DNA replication
  Homolog annotation: Hit_ID=UPI00004C1731; Match level="QueryCoverage =99%, HitCoverage=46%, E-value=0.0, Identity=85%"; Hit description =UPI00004C1731 related cluster
  Pfam annotation: Domain name=RnaseH; Domain location=312-439; Score =9.8; E_value=7.1e-06; Accession=PF00075.14; Description=RNase H
  Pfam annotation: Domain name=rve; Domain location=526-685; Score =107.5; E_value=3.8e-29; Accession=PF00665.16; Description=Integrase core domain
  Pfam module annotation: Pfam domain module=RnaseH::rve; Domain location=312-439::526-685
MPFGLRNAGATYQRCMNHVFGEHIGRTVEAYVDDIVVKTREASDLLSDLEATFRCLKVKGAKLNTEKCVFGVPRGMLLGFIVSERGIEANPEKIAAITSMGPIKDLKGVQRVTGCLAALSRFISRLGERGLPLYRLLRKAECFTWTPKVEEALGNLKALLTNAPILVPPAAGEALLIYVAATTQVVSVAIVVERREEGHALPVQRPVYFISEVLSETKIRYPQIQKLLYVVILTRRKLRHYFESHSITVVSSFPLGEIIQCREASGRIAKWAVEIMGETISFAPRKAIKSQVLADFVAEWVDTQLPTAPIQPELWTMFFDGSLMKTGAGAGLLFISPLGKHLRYVLRLHFPASNNVAEYEALVNGLRITIELGVRRLDARGDSQLVIDQVMKNSHCHDLKMEAYCDEVRRLEDKFYGLELNHVTRRYNETADELAKIASGQTTVPPDVFSRDLHQPSVKTDDTPEPEKASAQPEAPSARPEEPSAPEGFYWPTVVADATRIVRTCEGCQFYARQTHLPAQALQTIPITWPFAVWGLDLVGPLQKAPGGYTHLLVAIDKFSKWIEVRPLNSIRSEQAVAFFTNIIHRFGVPNSIITDNGTQFTGRKFLDFCEDHHIRVDWATVAHPLTNGQVERADDMILQGLKPRIYNNLNKFGKRWMKELPSVVWSLRTTPSRAMGFTPFFLVYGVEAILPTDLEYGPRG

SEQ ID NO: 53615 - protein, 235 aa, Zea mays
  Coding DNA Sequence Number=SeqID_11836
  Gene Ontology: Mol. function=calcium ion binding; Cellular component =membrane; Biological process=homophilic cell adhesion
  Homolog annotation: Hit_ID=UPI0000DA43ED; Match level="QueryCoverage =66%, HitCoverage=96%, E-value=9e-14, Identity=30%"; Hit description =PREDICTED: similar to keratinocytes proline-rich protein
  Subcellular localization annotation: CTP_CleavageSite=39; ConfidenceScore=5.21e-01
MQSTCDRAKWVHPFDSNAPSMEAQAHTSCNRRASCYVVRLTAAKSGLRRHRKLRFARPQGSDSGSAPEDDELRIARPKGSDSGSATEDDKLRFARPRGSDSGSASEDDELRFARPQGSDSGLAPEDDELRIARPQGSDSGSAPEDDKLRFARPQGSDSGSAPEDDELRFARPQGSDSALVSADGLRLARPRGSDSTSASEDGLDLDLGGASTSPNPGLGPTTSQEAPSLPYSKLT

SEQ ID NO: 53616 - protein, 315 aa, Zea mays
  Coding DNA Sequence Number=SeqID_11837
  Homolog annotation: Hit_ID=Q05737; Match level="QueryCoverage=25%, HitCoverage=38%, E-value=2e-22, Identity=70%"; Hit description=GTP -binding protein YPTM2
  Pfam annotation: Domain name=Ras; Domain location=106-251; Score= -53.2; E_value=2.7e-05; Accession=PF00071.12; Description=Ras family
MAVAACTDAVGADAARTGAWCGFWEAAVGAPVGEDAGRGWSAYDYGWVHGKRRGCEISEALGSVANSTVMEAWRKRRGEGDCEEAMGGAAKWGGRSRVDTNERRRGGGGVGREVRDGRLFFFLALLGKVFHNGILLDKSASGQSLADIYYRGAHGIIIVYGMKDQKRVNNVKQWLNEIGRCMSQVNKLLVGNKNDLAANKVVATETTNSISIDGRIGRYRLVVAPTTHATDRSVQLPIEDALADSIDRMIRDQLQICKNIGTGPLVLSRLESKERQFISFILSTCSFTIYNHCWGPSSSEGPQKHDLTMFSEWIM

SEQ ID NO: 53617 - protein, 250 aa, Zea mays
  Coding DNA Sequence Number=SeqID_11838
  Gene Ontology: Mol. function=nucleotide binding; Cellular component =membrane; Biological process=small GTPase mediated signal transduction
  Homolog annotation: Hit_ID=Q05737; Match level="QueryCoverage=66%, HitCoverage=82%, E-value=2e-88, Identity=98%"; Hit description=GTP -binding protein YPTM2
  Pfam annotation: Domain name=Arf; Domain location=63-238; Score= -35.5; E_value=4.8e-07; Accession=PF00025.11; Description=ADP -ribosylation factor family
  Pfam annotation: Domain name=MMR_HSR1; Domain location=78-193; Score =3.1; E_value=0.00052; Accession=PF01926.13; Description=GTPase of unknown function
  Pfam annotation: Domain name=Miro; Domain location=79-193; Score =87.2; E_value=5e-23; Accession=PF08477.3; Description=Miro-like protein
  Pfam annotation: Domain name=Ras; Domain location=79-240; Score =358.8; E_value=8.8e-105; Accession=PF00071.12; Description=Ras family
  Pfam module annotation: Pfam domain module=Arf::MMR_HSR1::Miro::Ras; Domain location=63-238::78-193::79-193::79-240
MDTKPFLLCLLRFSCAGGAVACLPAWTVLREETLPCLRRTEANAGPTATKASARARTAMTHAGRARGFRSAALDDYLFKLLLIGDSGVGKSCLLLRFADDSYLDSYISTIGVDFKIRTVEQDGKTIKLQIWDTAGQERFRTITSSYYRGAHGIIIVYDVTDQESFNNVKQWLNEIDRYASDNVNKLLVGNKSDLTANKVVATETAKAFADEMGIPFMETSAKNAINVEQAFMAMAASIKDRYSQCAKWQM

SEQ ID NO: 53618 - protein, 155 aa, Zea mays
  Coding DNA Sequence Number=SeqID_11839
DSRPYNRSRTVRAFADRRHQRGHLSVSLTVAENPDPVAAAAGLSLQDDDQTHDAKSPKETWTGGGGPTYPASSSLVSSSSSSKLRSDPPMSDSSPAPGAYYSGPPAAPPPESKPVDGGQVNADVPGYYSSVPAAKSGAGGQGSSAAPKESGFFAS

SEQ ID NO: 53619 - protein, 479 aa, Zea mays
  Coding DNA Sequence Number=SeqID_11840
  Gene Ontology: Mol. function=protein kinase activity; Cellular component=mitochondrion; Biological process=protein amino acid phosphorylation
  Homolog annotation: Hit_ID=Q53M68; Match level="QueryCoverage=99%, HitCoverage=82%, E-value=1e-179, Identity=67%"; Hit description =Similar to receptor protein kinase-like protein
  Pfam annotation: Domain name=LRR_1; Domain location=115-137; Score =1.5; E_value=1.5e+02; Accession=PF00560.23; Description=Leucine Rich Repeat
  Pfam annotation: Domain name=LRR_1; Domain location=139-161; Score =16.6; E_value=0.092; Accession=PF00560.23; Description=Leucine Rich Repeat
  Pfam annotation: Domain name=LRR_1; Domain location=163-185; Score =9.5; E_value=4.8; Accession=PF00560.23; Description=Leucine Rich Repeat
  Pfam annotation: Domain name=LRR_1; Domain location=187-209; Score =13.2; E_value=0.95; Accession=PF00560.23; Description=Leucine Rich Repeat
  Pfam annotation: Domain name=LRR_1; Domain location=211-232; Score =11.0; E_value=2.5; Accession=PF00560.23; Description=Leucine Rich Repeat
  Pfam annotation: Domain name=LRR_1; Domain location=234-253; Score =6.4; E_value=18; Accession=PF00560.23; Description=Leucine Rich Repeat
  Pfam annotation: Domain name=LRR_1; Domain location=255-277; Score =8.3; E_value=7.9; Accession=PF00560.23; Description=Leucine Rich Repeat
  Pfam annotation: Domain name=LRR_1; Domain location=279-301; Score =12.7; E_value=1.2; Accession=PF00560.23; Description=Leucine Rich Repeat
  Pfam annotation: Domain name=LRR_1; Domain location=303-325; Score =7.1; E_value=13; Accession=PF00560.23; Description=Leucine Rich Repeat
  Pfam annotation: Domain name=LRR_1; Domain location=327-346; Score =5.4; E_value=28; Accession=PF00560.23; Description=Leucine Rich Repeat
  Pfam annotation: Domain name=LRR_1; Domain location=70-90; Score=1.1; E_value=1.7e+02; Accession=PF00560.23; Description=Leucine Rich Repeat
  Pfam module annotation: Pfam domain module=LRR_1::LRR_1::LRR_1::LRR _1::LRR_1::LRR_1::LRR_1::LRR_1::LRR_1::LRR_1::LRR_1; Domain location
MAWHLDILVMVTTCLIFFSISEQSSQSELLQQLRKQLEYPRQLEAWGSPSSDPCYTQPTAVLAVTCEENAIRELKIIGDRITKPPKFSGFSVPNVTLSEAFVLDSFVTTLARLTTLRVVILVSLGLWGPLPDKIHRLSSLEVLDLSSNFLYGSIPPKLSVMSKLHTVTLDGNYFNGSVPDWLDSFSNLTVLRLQSNQLKGSIPASIGKAAMLTELALAGNSISGDVPNLVNLNKLEMLDLRDNKLDGELPEMPTSVVTILLSKNSLKGEIPEQFGQLNRLQHLDVSFNFLVGSPPAELFALPNISYLNLAANMLSGSLLSSLTCSSTLGFVDLSTNRLTGDLPSCLNGNLNNKVVKFDGNCFRVDPAHQHEDKYCQQSHNGRGSKKDVGLVVTVVGILFVILVLSLLLMASNKRSCQKVLAEQQIQQKHTQDNLLSGMSSELLVNARCISQAVKLGTQIQPSYHIFSLEELKEATKSFE

SEQ ID NO: 53620 - protein, 130 aa, Zea mays
  Coding DNA Sequence Number=SeqID_11841
MICSHSPVKQRSSIGDPEIELFKFYKVEHPEHLFGEGKLELSPEYFSVRICSLDYHPGKQCNHEGGIKVRRCSHSCFLRAESIVSERESHLMGKMVRDTMVPFMDLVLVDDDGYINDVSNYGFWYFLYEE

SEQ ID NO: 53621 - protein, 161 aa, Zea mays
  Coding DNA Sequence Number=SeqID_11842
MGFRRDDTWEVAAMQVLTTLCGHHLMEMAIHLVGLFPVERRDDPMWLDCLDHMEEICLICPKVVRSQAKVQLTALALTFRHTLSDREGYVVDVSAELVEKDMQIEQMGTQIHQLQEEVHERGITIEILENQLHDLQIELDDANEHIETHHEHQASIDAQME

SEQ ID NO: 53622 - protein, 124 aa, Zea mays
  Coding DNA Sequence Number=SeqID_11843
MAGAEYVLFFNTYDESKGIDMLCDSVSLKRAADTFSLLSVSGSVSSNTPHPTPHAVYDTWGPPAGARARERAAERREKAWKWGVWVHAVRFTEPDTEPAGQMNSVLDSAKYGSGAACGVLLELV

SEQ ID NO: 53623 - protein, 37 aa, Zea mays
  Coding DNA Sequence Number=SeqID_11844
MGKTSFFEPDDEASGLAMLFVVAMNLPEDEINKMEKV

SEQ ID NO: 53624 - protein, 321 aa, Zea mays
  Coding DNA Sequence Number=SeqID_11845
MEEDDEFGDLYTDILIPTHTPQSTSALSNPVLVETLHRPPPHPNPTPVAVAAEEVDDDWLLGGSESIPRVDPTGDWTDEDDDGGEPAPPAKRSISADDINPLMGVVRGIPGRLGSRHHRQMVRPGATRACTRSGGEGTTDIHARAWEGAVGMSGAEDVAGGRTVEIGLCATIIHARDIDHLLDYSPVLEKFVSIAIIYFTNPVQNFGFATTSSTDRDGYGRLRAVEVAVRRCRREAATVEVEVVVARQKRCARKAAAMVVVVVVGGGEVWRGDWSTTVSKKAWVAETEADGVDSAKRTDGVDLPKVEPERQPTTYSLNRVV

SEQ ID NO: 53625 - protein, 156 aa, Zea mays
  Coding DNA Sequence Number=SeqID_11846
  Homolog annotation: Hit_ID=Q5ZB59; Match level="QueryCoverage=46%, HitCoverage=13%, E-value=5e-08, Identity=46%"; Hit description =Ribosomal RNA apurinic site specific lyase-like
  Subcellular localization annotation: CTP_CleavageSite=12; ConfidenceScore=5.02e-01
MAAAFLAHLFCRATTTSTSTVAASLRHLLTATSTALNLPVGEVDDGDADELLEHGAVVKQVVDVPSVDDGSTESNLLEAGEHGGAAPRERDGVWKAPEVEVEGAEGGKVEDVYEEARLTEVVETESPNGDNGDVTGERELAPIKLSGCGIPLALQS

SEQ ID NO: 53626 - protein, 44 aa, Zea mays
  Coding DNA Sequence Number=SeqID_11847
MDSANRINERCLELQKNKKSTKTKLEDDKRKAYESEVSPEISSQ

SEQ ID NO: 53627 - protein, 132 aa, Zea mays
  Coding DNA Sequence Number=SeqID_11848
  Gene Ontology: Mol. function=DNA binding; Cellular component=nucleus; Biological process=regulation of transcription
  Homolog annotation: Hit_ID=Q2QYC5; Match level="QueryCoverage=66%, HitCoverage=72%, E-value=5e-18, Identity=55%"; Hit description=ZF-HD protein dimerisation region containing protein
  Pfam annotation: Domain name=ZF-HD_dimer; Domain location=59-118; Score=128.6; E_value=1.8e-35; Accession=PF04770.3; Description=ZF-HD protein dimerisation region
MNKKKEESSPVGVGDECFSVQPRLGVECASEETSCLRLQGRRSNGGAAARSKQEEEGGAKVVRYRECQRNHAASLGGHAVDGCREFMAAGADGTAAALACAACGCHRSFHRREVEQQPAADCCDCSSTTSGA

SEQ ID NO: 53628 - protein, 279 aa, Zea mays
  Coding DNA Sequence Number=SeqID_11849
  Homolog annotation: Hit_ID=O04109; Match level="QueryCoverage=36%, HitCoverage=32%, E-value=1e-46, Identity=83%"; Hit description=Myb factor
  Pfam annotation: Domain name=Myb_DNA-binding; Domain location=60-105; Score=41.6; E_value=2.6e-09; Accession=PF00249.21; Description=Myb -like DNA-binding domain
  Pfam annotation: Domain name=Myb_DNA-binding; Domain location=7-54; Score=34.9; E_value=2.8e-07; Accession=PF00249.21; Description=Myb -like DNA-binding domain
  Pfam module annotation: Pfam domain module=Myb_DNA-binding::Myb_DNA -binding; Domain location=60-105::7-54
MTTAIKKGPWMPEEDLVLVSYIHEHGPSKWRHVAASTGLMRCSKSCRLRWTNYLRPGIRRGHFTAREERVIVHLHSLLGNRWAAIASHLPQRTDNDIKNYWNTHLKKKKVVVEEQQRAAAAAAKRHVDDGGITTSRSPRLLAKDDSYGYDYDARPAAAYPCTMDNVSKPLKVKLGCMKSASSSSPPAQDGSSSIRRPFFSLDQTSGSTAPLPPISNVVPQPVLAGQGRHGGRFFHEPPQQQLSSIMENWLFLPKQQHQQQMTASSPTPTAAAHCPCCFS

SEQ ID NO: 53629 - protein, 484 aa, Zea mays
  Coding DNA Sequence Number=SeqID_11850
  Gene Ontology: Mol. function=transferase activity; Cellular component= membrane
  Homolog annotation: Hit_ID=Q2RB29; Match level="QueryCoverage=95%, HitCoverage=95%, E-value=0.0, Identity=75%"; Hit description =Secondary cell wall-related glycosyltransferase family 47, putative, expressed
  Pfam annotation: Domain name=Exostosin; Domain location=109-434; Score=372.5; E_value=6.8e-109; Accession=PF03016.6; Description =Exostosin family
MAPRGRTLLPLAAATVLVASTIFLFAAAGARWRPADTDLPVPPHAFPTAVPAAVTASSYSNATAGKELSFLDENGRPDDPSSASASSSTSGATPAAGVVRCDPRDAVRVFMYDMPPEFHFGLLGWSPPSPDSVWPDVTAASPPPRYPGGLNQQHSVEYWLTLDLLSSSPPCGRHSAVRVSDSRDADLVFVPFFASLSYNRHYRPVPPEKVSRDRVLQEKLVRYLAARPEWRRYGGADHVIVAHHPNSLLHARAVLHPAVFVLSDFGRYPPRVASLEKDVIAPYKHMAKTYANDSAGFDDRPTLLYFRGAIYRKEGGSIRQELYYMLKEEKDVYFSFGSVQDHGASKASQGMHSSKFCLNIAGDTPSSNRLFDAIVTHCVPVIISDDIELPYEDVLDYSKFSIFVRSSDAVKKGYLMRLLSGVSKQQWTKMWDRLKEVDKHFEYQYPSQKDDAVQMIWQALSRKVPSIKLKVHRSNRFSRSNRGK

SEQ ID NO: 53630 - protein, 633 aa, Zea mays
  Coding DNA Sequence Number=SeqID_11851
  Gene Ontology: Mol. function=oxidoreductase activity
  Homolog annotation: Hit_ID=Q75IP9; Match level="QueryCoverage=52%, HitCoverage=98%, E-value=1e-102, Identity=57%"; Hit description =Putative carboxylate oxidase
  Pfam annotation: Domain name=2OG-FeII_Oxy; Domain location=477-578; Score=129.3; E_value=1.1e-35; Accession=PF03171.10; Description=2OG -Fe(II) oxygenase superfamily
MLELEEGPGRTPSGYGGGVGRDAKGERSEEDKEGPRPTQCTTQGIVSGGGGGGPAETPRPGAVCRLEGEMKATLKGRYEGDKATAATTLAAPAGDLRLKASATEAAFTNGPSLRGLTLTLEKPGAFLVDLKPHNQDVRFQFMNSALVLDKRVSLTYTHSTSLAAAPAAAPPSRTALDCTVTFDPANKVSLSHSLGSGGCRLKYTYAHGVDRLTTIEPLFDTNKNAWEFAITRKFAGGDAVKGTYQASTKLLGLEWSRDSLAGGSFQDRRPAAAATEEKSLTHGHGWTTISSSSSNTTNSHMDAKPRNLGGSLPTPTATRASSVPVVDLARLLDPSSHGDEESAKLKAACEEWGFFQVINHGVPDAVVADVKADLQAFFRLPLADKRAVAQEPGGIEGYGQAFVVSEDQKLDWADMLFLSTQPPEYRAPRFWPARPATFGDSLARYSAEVQRVAARLLASMAANLGVADAARLARVADAQAVRVNYYPACPHGRGRVLGLSPHSDAAGLTLLLQVSAVPGLQIRRRGAWISVDPIPGALVANVGDVVEVLTNGRYKSIEHRALVSPTHHRVSVAAFHSARFGDTYAPLEETIVDGDEPARYRSIGVEDYVRLVLSSKLQGKNIMDAMKINPVTE

SEQ ID NO: 53631 - protein, 430 aa, Zea mays
  Coding DNA Sequence Number=SeqID_11852
  Homolog annotation: Hit_ID=Q10AB4; Match level="QueryCoverage=93%, HitCoverage=91%, E-value=3e-95, Identity=54%"; Hit description =Expressed protein
  Pfam annotation: Domain name=DUF668; Domain location=309-362; Score =16.5; E_value=4.4e-07; Accession=PF05003.3; Description=Protein of unknown function (DUF668)
  Subcellular localization annotation: CTP_CleavageSite=23; ConfidenceScore=5.08e-01
MSSASGGSGAPSRPRKQSTVGILAFEVASLMSKLLQLWRAVGDAAVARLPPRDHEPPRRPARWSPNDDDFPCRPRPRRARGHAQGRIRLRDRARRAVRGPQPPRLQGRLPGAGRHPAATGTAGTAPSWKEMDARASRMGKQVATTAALRRAMEELAEAEHGLRKLVVLQCAANSLSASKISAASEQQQVVFSKRQEVKHLKQTSLWGSTFDAVVASLARAAFTTLARIKAVFGAGREQRHPPLYRSLTLSSAVHPSGDARSPPSRKSMSMEEVLLFDVDNQPSFAPKRQVRGGGFLEDSSAALTPPAGTLGAAALSPRYAGLLRARLRGAVPAADPGLAGQWCAALAGILEWLAPMAHATVRWQAERSLEQRGGSGNGSVLLLQTLQFAERDKVDAAVVELLVGLNYVWRFEKEMSCRAMLASPARPPVR

SEQ ID NO: 53632 - protein, 201 aa, Zea mays
  Coding DNA Sequence Number=SeqID_11853
  Gene Ontology: Mol. function=nucleotide binding; Cellular component =intracellular; Biological process=signal transduction
  Homolog annotation: Hit_ID=Q5W796; Match level="QueryCoverage=99%, HitCoverage=55%, E-value=3e-90, Identity=73%"; Hit description =Putative GTP binding protein
  Pfam annotation: Domain name=TGS; Domain location=92-168; Score =125.6; E_value=1.4e-34; Accession=PF02824.11; Description=TGS domain
IYFKRKKTGGISFNTTVPLTHIDEKLCYQILHEYKIHNAEVGGLAFGRVLFREDATVDDLIDVIEGNRKYIKCVYLNLDRLLARMWEEMGLVRVYTKPQGQQPDFTDPVVLSTDRGGCTVEDFCNHIHRSLLKDVKYVLVWGTSARHYPQHCGLGHGLNDEDVVQIVKKKEKEEGGRGRFKSHTNAPDRISDRVKKAPLKT

SEQ ID NO: 53633 - protein, 117 aa, Zea mays
  Coding DNA Sequence Number=SeqID_11854
  Subcellular localization annotation: CTP_CleavageSite=89; ConfidenceScore=5.09e-01
MALLDIDPLALGHPSPLGPLRHKGLSGPSGVLGCVALSKALNEALSKGVRVVGPSKADVATVELSVTMRYGTIASGPAPCLETSLVLPRVSEEKMLRDYYHGSAYPHVYRQDPMGRS

SEQ ID NO: 53634 - protein, 1323 aa, Zea mays
  Coding DNA Sequence Number=SeqID_11855
  Gene Ontology: Mol. function=homocysteine S-methyltransferase activity; Cellular component=chromosome; Biological process=DNA topological change
  Homolog annotation: Hit_ID=Q8H7Q9; Match level="QueryCoverage=99%, HitCoverage=99%, E-value=0.0, Identity=68%"; Hit description =Putative kinesin-related protein
  Pfam annotation: Domain name=Filament; Domain location=956-1253; Score=-184.2; E_value=0.094; Accession=PF00038.11; Description =Intermediate filament protein
  Pfam annotation: Domain name=M; Domain location=1236-1256; Score=3.3; E_value=46; Accession=PF02370.7; Description=M protein repeat
  Pfam annotation: Domain name=M; Domain location=399-419; Score=5.1; E_ value=27; Accession=PF02370.7; Description=M protein repeat
  Pfam annotation: Domain name=M; Domain location=515-535; Score=7.9; E_ value=11; Accession=PF02370.7; Description=M protein repeat
  Pfam annotation: Domain name=M; Domain location=711-731; Score=1.7; E_ value=74; Accession=PF02370.7; Description=M protein repeat
  Pfam annotation: Domain name=M; Domain location=965-985; Score=1.2; E_ value=89; Accession=PF02370.7; Description=M protein repeat
  Pfam module annotation: Pfam domain module=Filament::M::M::M::M::M; Domain location=956-1253::1236-1256::399-419::515-535::711-731::965 -985
MFKLHRHRSSDRVGERFDFRFSNFRAVQVPAISDRLFLSIVSVDNGKTIAKSTKVASRSGICQWPDTILEPIWFSKDQVSKEFQECQYRIIVSLGSAKSGILGEILLNLSNFLNLADPTAISLPLKRCNSGTVLQLKVQCLGTKSKLSGVRSLRDMAPRLDDRSPTPTNDELDNRSDCSDGMFNKGVHSSSENHLGGTYQDESGNMETGFSASGSHRSSNSGDSTADRTNFSPRVNSNGGLFVGRQDSASSYASYVSAGGGDDGLRSNNSSFSSRTSGPNLLQGSTPKTFSNDLSQLSMGASDSSKDFLEAAEETIEELRDEAKMWERHSRKLKADLEMLKKECSEKSKQHAELAVELSAAQAERDSYRHEIEELKSSLQDVNTRQTITGTPKRSDWIDLQKELEGEVKFLKESNTDLTIQLNRTQESNIELLSILQELEETIEEQRVEISKISKVKQTAYPENGLLVKKDREWAKKLSMKEDEITIPREKSDRALNIGNADGAASNAIYLDLEKENEILRAKIQELEKDCSELTDENLELIYKLKENGLTKGQMRYRENVLTLELKVLNFRSQTCELEEKFRKCQEELEQRNLELSALRRKINGLHSNELEVCESGATWKYQARIADLEDTEPETDTLKARFELQLQENDDLRRSKVEMQNFISEFQAEKSQLEERLSASLKESSITSKCLDEVRKDILVLSSSIDSHVSTNKLLERNLVELESCKAELELHVSELEQENIELSERISGLETQLTYVTNEKESSELQLHDSRSLIINLKDKVECQQSEMETQRLQFKQKQQESQRRLCEAQDDSEVLRRSNCKLQSTVESLIEECSSLQNLIADLKRQKLELHGHLTQKEQELDESKKKNFEFSKTVEFLEAKLLSLQKDISSKEQSLLSELENIFQEHMEQEERINRAHFMLNKIEKEKTLEVENLEREVVSLAAQVSSTHEERESATLNAIQEVSVLRADNAKLEANLQDVSEQLRCYESQLEDLRKESKSKIKGLVDSLNASKQSEEMLTSDAEHMKKLMEAAKSNEDALRKTSNELELKLKSSDYVKQQMLEEISGLKLQVQKIMNLQDEVSKLQSSLDEAKFEKGKLEEFVRSVTEECQELKAQKAMLTDKVSYMQETLRNGEEENRNRIAMHAKLMRLESDLTALEASHVHEAELKNELSRIKRSNSEYQRKIQSLGQENEDLTRRVQIMEKGFERMSHAKENLGKQEIGGDNQEAIQSTIQLLEIKLAEALEENKIYRAQQKSSMSEGQPAGGDGKEGNTDRILQLEGELRDMKERLLNMSLQYAEVEAQRERWASSSRAMLQHQ

SEQ ID NO: 53635 - protein, 428 aa, Zea mays
  Coding DNA Sequence Number=SeqID_11856
  Gene Ontology: Mol. function=transferase activity; Cellular component= membrane
  Homolog annotation: Hit_ID=Q10SX7; Match level="QueryCoverage=99%, HitCoverage=98%, E-value=1e-165, Identity=70%"; Hit description =Exostosin family protein, putative, expressed
  Pfam annotation: Domain name=Exostosin; Domain location=76-382; Score= 268.1; E_value=1.7e-77; Accession=PF03016.6; Description=Exostosin family
  Subcellular localization annotation: CTP_CleavageSite=63; ConfidenceScore=5.35e-01
MGDPRPRRSPAAPTLADKLRKHSTWLLLLLWFAVSLALFLSATPPAAAPLRRSSFLRSKPRALAATGAAAAPPVRIYVYDLPARFNRDWAVADARCARHLFAAEVAVHEALLAYTGRAARPEDADLFFVPVYVSCNFSTPNGFPSLSHARGMLADAVDLVQAGMPYWNRSAGADHVFVASHDFGACFHPMEDVAIADGIPEFLKRSILLQTFGVQGHHTCQEVEHVVIPPHVPPEVEHELPEPEKAQRDIFAFFRGKMEVHPKNISGRFYSKKVRTELLQHYGRNRKFYLKRKRFDNYRSEMARSLFCLCPLGWAPWSPRLVESVLLGCIPVIIADNIRMPFPSVLQWPEISLQVAEKDVANLEVVLDHVVATNLSVIQKNLWDPVKRKALVFNRPMEVGDATWQVLRELEVLLDQSQRRRYGGSWRA

SEQ ID NO: 53636 - protein, 54 aa, Zea mays
  Coding DNA Sequence Number=SeqID_11857
MTPAAAGTVCLLTWTTQWTSIRASIPLDLRSSEAKLFIKMALVVIYGSLYPILP

SEQ ID NO: 53637 - protein, 604 aa, Zea mays
  Coding DNA Sequence Number=SeqID_11858
  Gene Ontology: Mol. function=sequence-specific DNA binding; Cellular component=nucleus; Biological process=regulation of transcription
  Homolog annotation: Hit_ID=Q5VRX5; Match level="QueryCoverage=85%, HitCoverage=97%, E-value=1e-100, Identity=49%"; Hit description=WRKY transcription factor 6-like
  Pfam annotation: Domain name=WRKY; Domain location=344-404; Score =122.3; E_value=1.3e-33; Accession=PF03106.6; Description=WRKY DNA -binding domain
MAAAATILLLARSLARGAGRCVGQLAFNLDVPIRMDEEDDEDDWTRLNRVIARLRHWDSVAVVESPRPPPPPPQAKEEKRSDATKPEIAASMVGSALPIVFESFPSTQREAAAAGVKQEERRLEAARAEMGEVREENERLKSMLSRIVGQYQSLQTHFLDVVKVRELASSSAKAAAENKIPAAPALLPGTDDGDEPYDDLVSLSLGTRANSSGGGPRRKGHDDRSASSSGTADEMPNTADDERRHQISLGLGFARGLPPSGTAAAADDDKASHDASTAPVLNLSSDSSGSAGDTDTTKPALAAAGAARKSPSAGAGDGSADDEVQQQAKKARVSVRVKCDTPTMPDGCQWRKYGQKISKGNPCPRAYYRCTVAPHCPVRKQVQRCAEDTSVLITTYDCAHNHPLPPAATAMASTTSAAVAMLTYGSTTSAASASLVHGHQYHSLAAAAGLLGPTTMVSTAASCPTITLDLTSPAAPHSLVHSSLPYAAAAAAAAAGFESKAVPAAWSSGYLAYGGAHPSYDTKISSALGHLFGGSLGVPSRPEQLYAQSYLQRANSLGDGHGAVAPAVTDTLAKAITSDPSFQSVLAAAITSVMGRGGAAATQK

SEQ ID NO: 53638 - protein, 226 aa, Zea mays
  Coding DNA Sequence Number=SeqID_11859
  Gene Ontology: Mol. function=sequence-specific DNA binding; Cellular component=nucleus; Biological process=regulation of transcription
  Homolog annotation: Hit_ID=Q6IES1; Match level="QueryCoverage=31%, HitCoverage=31%, E-value=4e-33, Identity=91%"; Hit description=WRKY transcription factor 10
  Pfam annotation: Domain name=WRKY; Domain location=97-156; Score =127.2; E_value=4.7e-35; Accession=PF03106.6; Description=WRKY DNA -binding domain
MADDYFQFGFDGQEMVGAPAPACGGYDCSAPVFANSSSDAAAAVGNGMSLLSYGVDGDGDGRRPMSGPPYGTGGNGGGRPPSSSRIGFRTRSEVDVLDDGFKWRKYGKKTVKSSPNPRNYYRCSAEGCGVKKRVERDSDDPRYVVTTYDGVHNHAALGPGAASYLCQPPPPRGATATATVTPFSPPRSASAPAPLAAAPSWSAACDAWEAQLHAAAAAAHSSESSY

SEQ ID NO: 53639 - protein, 163 aa, Zea mays
  Coding DNA Sequence Number=SeqID_11860
MVQRVVFFAADLDLAFQERLRQGGEIIGCLGVGRPPKMPLVDVEPKRGINGIRRQAAYHAKAVPVLRMRIWNVRSRRAMVRRDARLSDGKSGLSDCVRYYWDATWWSWCSLGLPDRESWMVRVRARLFGQKLGRSNRVQGVNLPSMDDGGGICPGYEFIGIPY

SEQ ID NO: 53640 - protein, 144 aa, Zea mays
  Coding DNA Sequence Number=SeqID_11861
MGAPNEEVQVQPSPATPTEALPLPAGAGNAMRGPRTVEDDEDEDDGLILIIMRFHRADNGIMARSTSAPGGTDSVWGSQKETVHLERTFCNRQFSQICSFPLTLGKASNRRKGTIIQTDLGLSHWLPRVKGRNKNPSGKKRAVD

SEQ ID NO: 53641 - protein, 104 aa, Zea mays
  Coding DNA Sequence Number=SeqID_11862
MATIFVIRGGCAWSSSATESLTLMRRKQVCLVVIGAVDGVVAVGAQDGVERRGARLGRPRPACSLVFSLDFREASEEEETPSDYQVTSPRTFITMLVVHACSIF

SEQ ID NO: 53642 - protein, 63 aa, Zea mays
  Coding DNA Sequence Number=SeqID_11863
MAENPQLFGNGMPVPFYSEMFVLARDGVEFHVDKIPSNKYNGSKGTGVGPTLRMVREYGMATL

SEQ ID NO: 53643 - protein, 85 aa, Zea mays
  Coding DNA Sequence Number=SeqID_11864
MGASTTGDHEQEVGDELTGGVGGTERNGALARGTGPTNLAHGTVFQFKFKSSFKFKPNQTCATIQRIFGTQHDATFHDSSVLSKT

SEQ ID NO: 53644 - protein, 152 aa, Zea mays
  Coding DNA Sequence Number=SeqID_11865
MRPASPQGIPAAGRDPDGDDDNAGGSLSHNTELSEEQEPTGAANGLDLKCYPCRLTGSAGGVIISLVGEGNPRLNNIVNLVVVLNTEVDHALDELGKVRAEVAELRAERTTCHYQDGGSPAPFGIQHPYRSPPRGHFDYGTHDCRTQIDLEP

SEQ ID NO: 53645 - protein, 132 aa, Zea mays
  Coding DNA Sequence Number=SeqID_11866
  Subcellular localization annotation: CTP_CleavageSite=44; ConfidenceScore=5.21e-01
MSKMKHPNGGNSSSLGLSVPQMDRDSLSPHADVFMAPIPGARTRWMRARPVLYKAGAGRCRRLNHNRFQAQFAEQNPQADSNVRQNPRDGNGLREAGAQCDRRPRKAEFHAEVVAQIRFRLAESSDLHGLLR

SEQ ID NO: 53646 - protein, 110 aa, Zea mays
  Coding DNA Sequence Number=SeqID_11867
MTVRSTEPGRVRVIAVPRLPGLAKNVEEGSANMLVEFQPRDQAQRWENGGGRALGGSGQFRSRWLGAAPGGSDGRYGEHGTLAKQSVIEGELARNGAGSECGCRRCSKGS

SEQ ID NO: 53647 - protein, 86 aa, Zea mays
  Coding DNA Sequence Number=SeqID_11868
MSSGCRGDWWPAERRVERRRRPVPAGLKKKKKKVAVARLGARCGAARLLPTAINDLLEAPRIGSLRGPAGAADCFGTVRAGRRVGL

SEQ ID NO: 53648 - protein, 92 aa, Zea mays
  Coding DNA Sequence Number=SeqID_11869
MGPDAIPIEVWRYLRDIAILLQLNHPQSFPKGREDHNLSGSVLANHNHLMRPYYEAMERVIEHSLRGITMNSLNQFGFMPKRSIVEASDEAV

SEQ ID NO: 53649 - protein, 327 aa, Zea mays
  Coding DNA Sequence Number=SeqID_11870
  Gene Ontology: Mol. function=ATP-dependent helicase activity; Biological process=DNA recombination
  Homolog annotation: Hit_ID=Q6K831; Match level="QueryCoverage=64%, HitCoverage=30%, E-value=2e-82, Identity=71%"; Hit description=DNA helicase RECQE-like
MGIDRQDVRIVCHFNLPKSMESFYQESGRAGRDQRPSRSVLYYGLDDRRRMEFILRNPKTKKSQPSSSSNELSEKALADFSQIIDYCEISSCRRKKIIESFGEKVQPTLCQRSCDACKHPNLVLSRLEELRRVPNCRFNKISPVFQSSVKEAHLDTEFWNREDEASLSAEDISDSDDGNEVVSNIAISKVPAKAGLDAKFKALERAENAYYQGKDKWLNGSAIHDIAPAIACMVGRRAISTRTVAQALDNWQWVSDIESPLSLIGLQQYLKLWDALRGFCQAVLVSYFVAQGLGDLNPENDKSSFVVWWGKALKKCTGAGEKTSITS

SEQ ID NO: 53650 - protein, 96 aa, Zea mays
  Coding DNA Sequence Number=SeqID_11871
MQPWGQQTLLAARRGTGVGEWWYMNVDDDRNRNPTSLIEVKSPWIGISTSELMLLLLNPPMGSKEVLSLPSPRAAWIFGGPLRQQRGRKRLPTGGG

SEQ ID NO: 53651 - protein, 66 aa, Zea mays
  Coding DNA Sequence Number=SeqID_11872
MERMDGREGSGAGAVRVFSAASVGVAGRYGLARARLVEWSERLEESRRAGGFDTSYPGWAGRGCRP

SEQ ID NO: 53652 - protein, 719 aa, Zea mays
  Coding DNA Sequence Number=SeqID_11873
  Gene Ontology: Mol. function=hydrolase activity; Cellular component =endoplasmic reticulum; Biological process=metabolic process
  Homolog annotation: Hit_ID=Q6K821; Match level="QueryCoverage=85%, HitCoverage=68%, E-value=1e-168, Identity=68%"; Hit description =Phosphatidylinositolglycan-like
MMLHDCKHDANNVLHYLGLDHVGHIGGRRSVLMTQKMKEMDDVIRRVHAASLQDNLDRTLLVVVSDHGMTDGGNHGGSSYEETDSLAFYIGHSVESPYCSPYDQNEALQVDLAPTLALLFGVPIPKNSFGVVLPKLLNSLTDDQKLRMLELNSWQILRLLQAQVSAFCLEDCINVESSIELDILPESIEQKLCFLLSKAISSHQSSRLHRGSDFKSVEAGYYGTAADNYHTFLRNASEWLSHRATDKPLYLLVSAIMLMTMSCLFLMGTVSYLFKGRSLSQADHHSESYLDQRWHLDEVLVLAGMFLYVISLGSSSFVEEEQYTWHFLTSTLYLIFLAKAVQSMLKGSNPTLGHKAEGNSFDRSSFFYATSYELTPGKRNGYKLCTILVVLVAGRVIRAWHQGGINWVHFPDISKLLAQADPSVVKSLQIISVLAVVVLFSISLTLLRARPEFVIGVWLTHISCGFLVLLHVWGNHIGTSLPINHTTASVARQFYVIASVSVSVTVLASPWVFPIFSREAKSPSSGSSPVKAIHGIRKSLVLTGMTYTAFWGLLQLLLQQPINAIPLFLILLQTVSSAVHFSLDKTLHKQWVQVVAMHFLGMAGHFGLGNTNSLASIDVAGAFIGISSYSTVLSGILMFMITYASPLMLYLGLVLHASVKDVDDASNLRQLKWSYILDKIVTLPCLFPLLINSLALTSYTIVLLAMRNHLFVWSVFSPK

SEQ ID NO: 53653 - protein, 62 aa, Zea mays
  Coding DNA Sequence Number=SeqID_11874
MKGVGGENFHPEVEASYNNPYHVENIWSYGDRPKLSLLISAAEGALTRPAIVHDGRYPRVRR

SEQ ID NO: 53654 - protein, 446 aa, Zea mays
  Coding DNA Sequence Number=SeqID_11875
  Gene Ontology: Cellular component=intracellular; Biological process =signal transduction
  Homolog annotation: Hit_ID=Q7XAL7; Match level="QueryCoverage=87%, HitCoverage=86%, E-value=1e-131, Identity=60%"; Hit description=Rac GTPase activating protein 3-like protein
  Pfam annotation: Domain name=PBD; Domain location=70-116; Score=45.8; E_value=1.5e-10; Accession=PF00786.18; Description=P21-Rho-binding domain
  Pfam annotation: Domain name=RhoGAP; Domain location=133-277; Score =110.0; E_value=6.9e-30; Accession=PF00620.17; Description=RhoGAP domain
  Pfam module annotation: Pfam domain module=PBD::RhoGAP; Domain location=70-116::133-277
MVEVMMVPSSHGCGEGGGVGSDGKAEDGQQQGQGQGQVLALLLAALRKSVVLPCQMADADDPSGAAWGMEIGWPTDVRHVAHVTFDRLHGFLGLPVEFELEIPGQVPSASASVFGVSPESMQCGYDDKGNSVPKILLLMQERLYAQDGLKAEGIFRITPENSQEEHVREQLNSGIVPDDIDVHCLASLIKAWFRELPEGVLDRLSPEQVLHCNTEEQCIELVKLLPATQAALLHWVVELMADVVEEEESNKMNARNVAMVFAPNMTQGPYSSFSSSLSSSGELDEDDGHDQQDDENDSGSEKNYNGSANGRPRDIDKATALRVDSEQLIGVSRRHTSTDFHLPYIRYSNDSEDVSLDDIEECFLRRLEWKSVRESVDEGDSRNSPPSEKEAEWLSSSENVTEASNAIGEERGRTSNATDVSFNELRQTETRIEMTSAAKGELILCS

SEQ ID NO: 53655 - protein, 66 aa, Zea mays
  Coding DNA Sequence Number=SeqID_11876
MDSVVLSWLTGTLTIELKGIVLRNELILEELTLETKTPVIRWSGPLHGSGLTFINGGPYAPSHQHH

SEQ ID NO: 53656 - protein, 488 aa, Zea mays
  Coding DNA Sequence Number=SeqID_11877
  Homolog annotation: Hit_ID=Q8W0U7; Match level="QueryCoverage=51%, HitCoverage=89%, E-value=5e-85, Identity=62%"; Hit description =Putative growth-regulating factor 1
  Pfam annotation: Domain name=QLQ; Domain location=214-250; Score =69.5; E_value=1.1e-17; Accession=PF08880.1; Description=QLQ
  Pfam annotation: Domain name=WRC; Domain location=265-297; Score =22.5; E_value=0.00055; Accession=PF08879.1; Description=WRC
  Pfam module annotation: Pfam domain module=QLQ::WRC; Domain location =214-250::265-297
  Subcellular localization annotation: CTP_CleavageSite=37; ConfidenceScore=5.33e-01
MAQSTVGSLRAVGAPDMSGAHRTVRCLLLAVGSATAPCALAQAQRQRQPAGASQPACLPACAAAPAGGAAVRCCCCRPLQLCKRTQILQRALCSAPALNTDRSDPSSAPTAPHTTPPPQLTLRCPCACCMPDTGAICMIADDDTSTSSRSRAASDTSTNLETTTSIGVPSISTSLATEARALGAVVLCLSSFFVVEQSGLEEEMMLSGHGGGRRLFTASQWQELEHQALIFKYMASGAPVPHDLVLPLRLATGVDTAPSLAFPPQPSPSREAHGDSKYCEKHIHRGKSRSRKPVEVTSPAAYRPSAFSISPPRAADAPPPPPGLGHPQQQHLRHGALSPAGRAHAAGALQLHLDSSLHAASPPPSYHRYAHSHAHYTPPPPPSLYDYGQSKELREAAELRRRHFHALGADLSLDKPLADAGAAEKPLRRFFDEWPRERGDTRPSWAGAEDATQLSISIPAASPSSDHAASAAARCHNGCSYWLLQLQR

SEQ ID NO: 53657 - protein, 261 aa, Zea mays
  Coding DNA Sequence Number=SeqID_11878
  Pfam annotation: Domain name=DUF241; Domain location=47-258; Score =44.4; E_value=3.8e-10; Accession=PF03087.5; Description=Arabidopsis protein of unknown function
MACHQRSTSLPSMPRSTDSSSVGQEQELQALKVGASSPSATIETTRDGLRRLGDLYSRVEKTLHLPSNQLALRRRLTQQQQGKTAAEEELDRSLALIDLCGATQESLAELRTRVQDLRLAFRRGDAADGGAGIQLKAESFVRLARKARRPPLKKTTAGNGKATAEDGCRVVRLMAEARETAARLLESVSRLLPEQIGSLNPNASRWSLVSKRFRKREAVCEVEERQLQALERGVGDLADGVDVLFRRLIQCRVALLNILSS

SEQ ID NO: 53658 - protein, 790 aa, Zea mays
  Coding DNA Sequence Number=SeqID_11879
MEHASPRPRRFDDIVLSVDFSFIDRCDCVSDFVYGALLLCHRQPGTSLYCLDPVIYDASAIEWLCDDCPPKHNEGKLNDILEEGESKNDHLIYQLESADGSSHSASDLTVETQKAVGAVGPTMNTMECLDLSMGKDGCSFSQNCVEGFTQGTKSDFFSSINDVETSYPFVKGSSCPTLPNMEQKDGVLENAEQPHLLEMVNLDGTSHSLVDPPLEIKEQGAEAGLFASVEDVEQTHPILTDETSPIWSSEEQVDGSCPASESREQPVPFKVVILGPWHDVPNSILRSRPPSNYSQSMQGSDLYVGNVDVLDLSKEQLDSRLKPEEQGAEDGLFASVEYVEQTHPNFTEEKVDGSIPTPASSEQPDQLEVVRPWDDAPNSTLRSKPPSNYSQPMQGSDLDVRNMDALDPSKEWLDSRLLSNTVEPSSSSNGGGTSVEKDNIEKTERLSGIDTVTPGLDNVQGSNPSAEPSSSSTGEGNSAVEKHSAEMTECLLGMGILNPALHNVQVLSPSTPKECLVSSADKSDVANRSDEINHSLDDFNQSNPKPVLKGRVSKMMCPRLAFQLPKVLPVCEHHKREMSLPSKHVSPRKATKSSFRKQYEGPNRHVSRHTEHQKTKLVMKDRNTGPAHMRSCRPTKQIDCTCSSASLDSSTKTKEVNDAEPRCSKSVKTFENVMAKKRKRPILSYDEDAKAMQMEVRMRRRHRESGVMKLRRSTENSDEAMCPGNSNNQLTNDHTKARKQRRANKDNKTPPVNASVPCTQIDAARLASDQQSFICTRPIDRPYWTYVTCL

SEQ ID NO: 53659 - protein, 124 aa, Zea mays
  Coding DNA Sequence Number=SeqID_11880
  Subcellular localization annotation: CTP_CleavageSite=11; ConfidenceScore=5.26e-01
MTPPALRSLVPAQLVVTSRWGLVFFRILTLMFLNNLIASSRSCYVSMVLENSGTRQKHGLQAWFAEYRQLSNRAGIPFAECHLIRSAKDLVMGPQGASLPSVSIVDTRHRLRHRDGDFSLLSTG

SEQ ID NO: 53660 - protein, 188 aa, Zea mays
  Coding DNA Sequence Number=SeqID_11881
MAPPTRASLHSLCVTGNLVPRVSAFVSIANGCTGVRGDGHSWDLGQAVARPWYKTVPWHASRLRFDPRQKLSHRARRRVLREKRRRVYCRAAPRVKALLGGVPFPARGRVGASAPGESFGARGTSWATLNRGEFHAGVQVWAGLSPPRGRLASADNHRSWLELLWEIERKLSFNFGCQATDEALAMVQ

SEQ ID NO: 53661 - protein, 83 aa, Zea mays
  Coding DNA Sequence Number=SeqID_11882
MTKTRRATRRVKKTFRGFFKTLERKGRTFEGQGNEVMNVGGESKECHAISEGSRSIGISGAMVWRQARNWSMDSSITTSPSDV

SEQ ID NO: 53662 - protein, 153 aa, Zea mays
  Coding DNA Sequence Number=SeqID_11883
  Homolog annotation: Hit_ID=Q5N739; Match level="QueryCoverage=33%, HitCoverage=4%, E-value=2e-17, Identity=82%"; Hit description =Putative 5'-3' exoribonuclease
MVVVDMVEEEPSEIEGVPVPIDTSKPNPNLEFVNLYLDMNDILHPCFHPEDSVCNHKTIRLQLDAFVVNLIGFVLGLSTVTRWVEWISHIVVGGGSLPDPKQVLRIICGIVVLPIYQFVDSREPFSVPSTSASSCYVMFPLSPQHTCWIYRCG

SEQ ID NO: 53663 - protein, 85 aa, Zea mays
  Coding DNA Sequence Number=SeqID_11884
MARCSPVARPEKHVRRMRYENAATFQMAMETHLKNGVALPSDKCVMRAGGRCCGRLMPDRSALFGGRDLFGLKALHPAIQPVENI

SEQ ID NO: 53664 - protein, 402 aa, Zea mays
  Coding DNA Sequence Number=SeqID_11885
  Gene Ontology: Mol. function=RNA-directed DNA polymerase activity; Cellular component=nucleus; Biological process=RNA-dependent DNA replication
  Homolog annotation: Hit_ID=Q8S472; Match level="QueryCoverage=99%, HitCoverage=37%, E-value=1e-178, Identity=76%"; Hit description =Putative gypsy-type retrotransposon RIRE2
MDIATKFASGQEAVEAIFRKDKQPQGRKPEDVPEASTQRSTKKKGKKKSQAKCDAADADLVAAAEYKNPRKPLGGDNLFDKMLKESCPYHQGPVKHTLEECAMLRHHFHKAGPPAEGGRAHNNDKREDHKAEEFPEVHDCFMIYGGQVENASARHRKQERREVCLVKVAAPAYLDWFDKPITFDQGDHPDRVPSPGKYPLVVDPVISNVRLTNVLMDGGSSLNIIYAETLGLLRIDLSSVRAGAAPFHGIISGKRVQPLGQLDLPVCFGTPSNFRRETLTFEVVGFRGTYHVVLGRPCYAKFMVVPNYTYLKLKMSGPNGVITVGPTYRHAYECDVECMEYAEALAESEALIADLESLSKEAPDVKRHAGNFEPAEMVKSVPLDPSNDASKQIRIGFELDPK

SEQ ID NO: 53665 - protein, 66 aa, Zea mays
  Coding DNA Sequence Number=SeqID_11886
MAGSVSARSSIMETVGSVQEEPKAEHHLRHWMARCGRLTMPIDNETVWAWVGGAAGPETLFDQNIL

SEQ ID NO: 53666 - protein, 75 aa, Zea mays
  Coding DNA Sequence Number=SeqID_11887
MALVQVCVCVCAVRCKGGGEVDGFGGEAHRALSLPVGWGGGMGFLVGVGSGRYKRPSIARIHGTVQEFHGWQAED

SEQ ID NO: 53667 - protein, 86 aa, Zea mays
  Coding DNA Sequence Number=SeqID_11888
MGLARLEKEATACMCASTGARLDRRWLSSGGGGVWALPALGRKGKAGGRSNKGSTTGMLLTDRLHVGQHTADVKPVSDTEHVLLYC

SEQ ID NO: 53668 - protein, 77 aa, Zea mays
  Coding DNA Sequence Number=SeqID_11889
MKMYGIASMSDDIILYDFVCERLENEVISVTKLMKGGIDIWMNVMKCFGWKRLNRYQMCILPKTMEPSQPRTPNVVA

SEQ ID NO: 53669 - protein, 628 aa, Zea mays
  Coding DNA Sequence Number=SeqID_11890
  Gene Ontology: Mol. function=potassium ion transporter activity; Cellular component=membrane; Biological process=potassium ion transport
  Homolog annotation: Hit_ID=Q5MWW0; Match level="QueryCoverage=99%, HitCoverage=77%, E-value=0.0, Identity=57%"; Hit description=High -affinity K+ transporter
  Pfam annotation: Domain name=K_trans; Domain location=2-628; Score =908.0; E_value=4.2e-270; Accession=PF02705.7; Description=K+ potassium transporter
MENSLKAKLAIFVVTILATSMVIGDGVLTPSISVLSAVGGIDSLGQDAVVGISVVILVILFCVQRFGTDKLGYSFAPIICLWFTLLSGSGLYNLFTYGWGVLRAFNPLYIVGYFKRRGKNGWISLGEVVLCITGTEAMFADLGHFSVRAVQISFSTITLPSLLTVYCGQAAYLTKHPEHVGDTFYKSIPDPLYWPTFVVAVAASIIASQAMISGAFSIISQSLTLGCFPRVKVVHTSTEYEGQVYIPEVNYMLMIACVAVTVGFRTTVNIGHAYGIAVVAVMVITTCMVTLIMLVIWKTNILWIALFCVFFGTIETIYLSSVLYKFVEGGYLPLVFSLILMTIMGIWHYVHQKRYEFELNNKVSKEYIKQLVEDPKINRVPGIGLLYSELVQGIPPIFPHFISSIPSIHSVLVFVSIKKLPISKVTPEERFLFRHVEPREYRMFRCVVRYGYKDFMGTPVEFEQQLVEKLKEFIRHEYFMAEGEAVAVENSPQSSNILVNQGKDKGSSRRAVFVEETLNQLNQSRRSSASIQSFNMAKSNNSSSGIVSPAPPILGAEEEIQFVQKAKDEGIIYLLGEAEVMAKPNSSYTKRMVVDYGYNFLRRNFRQGEKVMMIPQAKLLRVGMTYEI

SEQ ID NO: 53670 - protein, 91 aa, Zea mays
  Coding DNA Sequence Number=SeqID_11891
MAEANKRLELDAKNNSQAYDIEVLNDSEVIEMDLMLGVADLHIPQALAAAESAIAGNQPPIMVAGSSSSSEMESDDSSDEESDDDGNDDKE

SEQ ID NO: 53671 - protein, 81 aa, Zea mays
  Coding DNA Sequence Number=SeqID_11892
MRRYNIKLDSRNRSWRREKIKLKIEINMTRSRLGGNSRKMKNYQNVPEFWYFCDLARSHELKFSLRAFEKDVFISFGKGFG

SEQ ID NO: 53672 - protein, 489 aa, Zea mays
  Coding DNA Sequence Number=SeqID_11893
  Gene Ontology: Mol. function=sequence-specific DNA binding; Cellular component=nucleus; Biological process=regulation of transcription, DNA-dependent
  Homolog annotation: Hit_ID=Q9FKK2; Match level="QueryCoverage=37%, HitCoverage=61%, E-value=1e-48, Identity=54%"; Hit description=MADS -box protein-like
  Pfam annotation: Domain name=SRF-TF; Domain location=14-64; Score =82.4; E_value=1.4e-21; Accession=PF00319.9; Description=SRF-type transcription factor (DNA-binding and dimerisation domain)
MVKKTLGRQKIEMVKIKDESNLQVTFSKRRSGLFKKASELCTLCGVEIAIIVFSPGNKVFSFGHPDVENILNRYVHNTKDTSPTWQLIEAHRNAIILRLNAQLTEMMSQIEAQKKRGEELDKMRKASQEQNWWESPIEELSLPQLQFLRSAMAELKKIVQREAEQLIIQNTNCQQLFPGSSSQGTNTNSKQFFIGSSSQEMDTNRQQFFPGSSSQGMDTNPQQFFTGSSSQGMDTNPQQFFTGSSSQGMNTNPQHPPQFFSPPQHPPQFFTRSSSQGMDTNPFTRSSIQGMDTNPQLFNEKSSQGMETNPQHPPQFFTGSSIQGMDTNPQQFFTRSSSQGMDTNPHLPQFFTGSSIQGMDTNPQQFFTRSSIQGMDTNPRQLFHEKSSQGMDTNPQQFFTGSSIQEMDRNPSLFFIGSSSQGGTPNYETMNNNMGLNANRMGGEYIDPNMIAPTPNYNPNRPAEGHINPNPEGSDILAPTSPGFGSGLF

SEQ ID NO: 53673 - protein, 196 aa, Zea mays
  Coding DNA Sequence Number=SeqID_11894
MGSSSKDLLRFEHHKYSSSPLESALLVCKKKDSEPQNHEPDSSKKPPFTPFPKSQVLGKVKDFLGVMAEANKRLELDAKNNSQAYDIEVLNGNDSEVIEMDLMLGVADLHTPQALAAAESAIAGNQPPIMVAGNSSSSETESDDSSDEESDDDGNDDKETSCPTEHETSNTVKEDAVREATGKSRSKKRTRIVELS

SEQ ID NO: 53674 - protein, 408 aa, Zea mays
  Coding DNA Sequence Number=SeqID_11895
  Homolog annotation: Hit_ID=Q1SU13; Match level="QueryCoverage=94%, HitCoverage=83%, E-value=1e-98, Identity=49%"; Hit description=IMP dehydrogenase/GMP reductase
  Pfam annotation: Domain name=DUF1005; Domain location=204-404; Score =419.8; E_value=3.8e-123; Accession=PF06219.3; Description=Protein of unknown function (DUF1005)
LESLMGVRASELVKKSLAACFSLSKSQVDRIISKGGSSYKLSIEVYADPDGSTCGLASGKLLGRVTVPLDLRGAESRSSVAHNGWIDIGRNKSNKNGSSAQMFLTVRTEPDPRFVFQFGGEPECSPQVFQVQGSVKQAVFTCKFGFRSSSDRNLGSRTSLPESNTSRNWLPSLKTDKDQSAKERKGWSITVHDLSGSPVAMASMVTPFVPSPGSDRVSRSNPGAWSILRPECGTWKPWGRLEAWREPGFTDALGYRFDLFHDDIVATGTTTTVASSTLSTKLGGKFTMDMTTNITTPSVSPQSSCDLGSGSRPGSRPGSGSGSDFGFGLPLSPQSMYRGGFVMSSTVEGVGKCSKPEVEVGVKHVTCTEDAAAFVALAAAMDLSMDACQSFSQKLRKELRQQSQNFVD

SEQ ID NO: 53675 - protein, 74 aa, Zea mays
  Coding DNA Sequence Number=SeqID_11896
MDSRIIVTTRLKLKDVARHCAGPRNVAEELIYDYELKPLDSKESKRLLCQKDESMRIRIGLVTRELEGISGHQI

SEQ ID NO: 53676 - protein, 264 aa, Zea mays
  Coding DNA Sequence Number=SeqID_11897
  Gene Ontology: Mol. function=protein binding; Cellular component =membrane; Biological process=defense response
  Homolog annotation: Hit_ID=Q2QWD6; Match level="QueryCoverage=98%, HitCoverage=27%, E-value=2e-57, Identity=54%"; Hit description=NB -ARC domain containing protein
MEATAVSLARSVLDGVLSSAGSSLADEVARLIGVPKEVDFIRNELEMMQAFLKVASTVYPEATVRNDIVKTWVKQVRYLACDVEDCLLDFALYADRRSSSRLGAWLPSAIAERRRIAGRIRDLKASVEALNQRNQRYQIAAGPGAGAHHHQSPALHEHYEHSAELAFQVSDIIGRDDDINAVAKMLLSRNNGALRVLSVWGMGGMGKSSLARMVHNDSDVLAEFDCRAWITGAAPAGQPRRVQAPAKGGARRAKRPEDRGSPRG

SEQ ID NO: 53677 - protein, 50 aa, Zea mays
  Coding DNA Sequence Number=SeqID_11898
MVLLKDEVGFTDAYVDMAIFGAIDPSWYMDFGATSHITRELEKLKTENKY

SEQ ID NO: 53678 - protein, 151 aa, Zea mays
  Coding DNA Sequence Number=SeqID_11899
  Gene Ontology: Mol. function=transcription regulator activity; Cellular component=nucleus; Biological process=regulation of transcription
  Homolog annotation: Hit_ID=Q9LSL1; Match level="QueryCoverage=63%, HitCoverage=28%, E-value=4e-16, Identity=49%"; Hit description =Arabidopsis thaliana genomic DNA, chromosome 5, TAC clone:K21L13
  Pfam annotation: Domain name=HLH; Domain location=61-108; Score=28.0; E_value=3.3e-05; Accession=PF00010.16; Description=Helix-loop-helix DNA-binding domain
MGFLDVVKPKVASAALVDDAAGLEACKVEPDLEESGVAFGAGAAPPPALASKKKRVVGMSSKNLMAERRRRKRLNGRLSMLQSVVPKINKMDWTSILGDTIDYMKELLERIKLLQEEIGQQQQEASGMLSVFYELNPNEMVARNTPRVLYS

SEQ ID NO: 53679 - protein, 320 aa, Zea mays
  Coding DNA Sequence Number=SeqID_11900
  Gene Ontology: Mol. function=transcription factor activity; Cellular component=transcription factor complex; Biological process =regulation of progression through cell cycle
  Homolog annotation: Hit_ID=Q84VD5; Match level="QueryCoverage=89%, HitCoverage=57%, E-value=7e-44, Identity=79%"; Hit description=DP TF
  Pfam annotation: Domain name=DP; Domain location=226-320; Score =118.5; E_value=1.9e-32; Accession=PF08781.1; Description =Transcription factor DP
  Pfam annotation: Domain name=E2F_TDP; Domain location=22-104; Score =94.0; E_value=4.4e-25; Accession=PF02319.11; Description =Transcription factor E2Fdimerisation partner (TDP)
  Pfam module annotation: Pfam domain module=DP::E2F_TDP; Domain location=226-320::22-104
MPSPSLYRLQLPRDGGGAADARAEGCRSTTGQQERRATAMEKVADELVAEFTDPNNNIEAPDPDNPNAQQYDEKNIRRRVYDALNVLMAMDIISKDKKEIQWKGLPRTSISDIEEMKTELVGLKGRIEKKSAYLQELQDQCWRGASTDYSCRVMEGVQLTLGQRAAEAQQGSRREGRRRWRRFVEHISQLSYAAVTFNKLLAVAVFMFYVSPTQFVIFISVGFFFWHIKYVGLQNLIQRNEQSYGSGNTPSGGVALPFILVQTRPHATVEVEISEDMQLVHFDFNSTPFELHDDSYVLKEMRFCGREQHDSTQESISNGG

SEQ ID NO: 53680 - protein, 161 aa, Zea mays
  Coding DNA Sequence Number=SeqID_11901
  Subcellular localization annotation: CTP_CleavageSite=67; ConfidenceScore=5.36e-01
MEKNSTPSNSATSSDCEICPSLLASNLRPTPTITKRGLNLCGRERGRGRTMGTAQSSRTLGRGLRSRAVATGGYPGVECGLFGRRQSHRVGATWVGRDARHGGRGGEGVVRPGHNESGVRELRAGTPREMSEGDTGGGGGNSGMVAQGMGKGTVWGRAVMA

SEQ ID NO: 53681 - protein, 443 aa, Zea mays
  Coding DNA Sequence Number=SeqID_11902
  Gene Ontology: Mol. function=catalytic activity; Cellular component =peroxisome; Biological process=metabolic process
  Homolog annotation: Hit_ID=Q9M0X9; Match level="QueryCoverage=97%, HitCoverage=99%, E-value=6e-82, Identity=54%"; Hit description=4 -coumarate--CoA ligase-like protein
  Pfam annotation: Domain name=AMP-binding; Domain location=61-443; Score=107.4; E_value=4.1e-29; Accession=PF00501.18; Description=AMP -binding enzyme
MARTAAPAAGYGEDGVYRSPRPAVRIESDTGLSLNDLLFRRADVCPSALALVDSATGQSLTFAAFRSAVLTTAVALSSRAGVRRGDVVLFFAPNCFLYPVCFFAVTALGAVATTANPLYTPREVAKQATDSRAKLAITVSELLPKIVDLGFPTILLDGGGDGDAASAAASKPQGASVTLYSDLVSGARETEYRRPPTKQSDTTALMYSSGTTGASKGVILTHRNFISAAAMMTADQDALGEGPNVFLCFLPMFHIFGLSVITFAQMQRGNSVVVMSRFDMDSVMAAVQRHRVTHLFCVPPVMIALAKLGSVGKYDLSSLRFIGSGAAPLGKDVMEGVAKNFPEAVIAQIAPAELEGLLLSHPEILDAVVIPFPDAEAGEVPIAYVVRSSESSLTEVDVQKFIEKQVAYYKKLRRVTFVDSVPKSASGKILRRELISKVRSSKL

SEQ ID NO: 53682 - protein, 196 aa, Zea mays
  Coding DNA Sequence Number=SeqID_11903
  Homolog annotation: Hit_ID=Q6QP54; Match level="QueryCoverage=39%, HitCoverage=27%, E-value=4e-11, Identity=48%"; Hit description =Putative kinase
MAPPVDVAGLRPRLGDAEAPPKPRSSLSSVAEAESEPLGRARRRSSAEARAESEPWGRAKRTCRPPGAPRPHPSIARHQPPPPPLLLCAAPGGASAPARSMRSRRWSRAAVLAWLVLVAAAACVADESRAVPAARNRTGTGTAAVSVRQQQQQRGAFDVVVAGLVSIGLGRRWRAGGMVDEDKRRVPTGPNPLHNR

SEQ ID NO: 53683 - protein, 140 aa, Zea mays
  Coding DNA Sequence Number=SeqID_11904
  Gene Ontology: Mol. function=ribonuclease H activity; Biological process=DNA integration
  Homolog annotation: Hit_ID=UPI00004C1733; Match level="QueryCoverage =53%, HitCoverage=5%, E-value=2e-15, Identity=60%"; Hit description =UPI00004C1733 related cluster
  Subcellular localization annotation: CTP_CleavageSite=48; ConfidenceScore=5.34e-01
MTQAWVQLLLFPAPPTNPNGMRKQQSACWTSRGNYTSPEADLSLKTNSASPKPGLGYLLPANPAEGHSFNFDNVGDELYDLLGGDPRPRAMARLNPFGELTNRGLDVRVALRCLSERSDQIESLDGKCPGDGDGSESLCG

SEQ ID NO: 53684 - protein, 112 aa, Zea mays
  Coding DNA Sequence Number=SeqID_11905
MPRFRRAREHEMKWWWGFGCVEGAPERASAPNNNKWQRTGTNSGANDSGEMSSTLSTAASNKRQWRMVRQLHGVDLQHDEAEQWRGRTPASMDDVDFDVVWQAAYDTGERQR

SEQ ID NO: 53685 - protein, 39 aa, Zea mays
  Coding DNA Sequence Number=SeqID_11906
MPPHMHIFFLVELNLPQGIPKEKVAPDKCMEKHPENTAK

SEQ ID NO: 53686 - protein, 135 aa, Zea mays
  Coding DNA Sequence Number=SeqID_11907
MGSVLTGVRVEGAVILGEGRIWGGGPLRREIPPIPDTNMSGATSLPLPIPGDNLAAQFQATTVGELSTLPLRWRYTFPPFLFSGGAWVSRARDGADRLQKLNRGVDGGRGGVGELAGSEEVVADVAHASEDRENR

SEQ ID NO: 53687 - protein, 150 aa, Zea mays
  Coding DNA Sequence Number=SeqID_11908
MGSVLTGVRVEGAVILGEGRIWGGGPLRREIPPIPDTNTSGATSLPLPIPGDNIAAQFQAAAVGELSTLPLRRRYTFPPFLFSGGAWVSRARDGADRLYKLNRDVAHVSEDRGEPVVVTGRGPHRPVIAAWARGSHGAGHTGQHAATARA

SEQ ID NO: 53688 - protein, 1279 aa, Zea mays
  Coding DNA Sequence Number=SeqID_11909
  Gene Ontology: Mol. function=ATPase activity, coupled to transmembrane movement of substances; Cellular component=integral to membrane; Biological process=transport
  Homolog annotation: Hit_ID=Q8GU69; Match level="QueryCoverage=98%, HitCoverage=99%, E-value=0.0, Identity=65%"; Hit description=MDR -like ABC transporter
  Pfam annotation: Domain name=ABC_membrane; Domain location=68-347; Score=181.2; E_value=2.6e-51; Accession=PF00664.13; Description=ABC transporter transmembrane region
  Pfam annotation: Domain name=ABC_membrane; Domain location=713-988; Score=162.1; E_value=1.4e-45; Accession=PF00664.13; Description=ABC transporter transmembrane region
  Pfam annotation: Domain name=ABC_tran; Domain location=1063-1248; Score=207.8; E_value=2.4e-59; Accession=PF00005.17; Description=ABC transporter
  Pfam annotation: Domain name=ABC_tran; Domain location=419-603; Score= 229.7; E_value=6.2e-66; Accession=PF00005.17; Description=ABC transporter
  Pfam module annotation: Pfam domain module=ABC_membrane::ABC _membrane::ABC_tran::ABC_tran; Domain location=68-347::713-988::1063 -1248::419-603
MPESWRPAEANASSQPAAGTSGPSAQSPGNDAKGRAAGETPGAAEAAATRVPFHKLFAFADSTDVALMLLGALGAVANGAAMPFMTVLFGNLIDAFGGALSIHDVVNRVSMVSLDFVYLAIASAVASFVQVTCWMITGERQAARIRNLYLKTILRQEIAFFDKYTSTGEVVGRMSGDTVLIQDAMGEKVGKFIQLVVTFFGGFIVAFAQGWLLTLVMMATIPPLVVAGAVMSNVVTKMASLGQAAYAESSVVVEQTIGSIRTVASFTGEKRAVEKYNKSLKSAYKSSVREGLATGLGMGTVMLLLFCGYSLGIWSGAKLILEKGYTGAKVMNVIFAVLTGSLALGQASPSMKAFAGGQAAAYKMFETINRAPEIDAYSTTGRKLEDIRGEIEFRDVHFSYPTRPDEPIFRGFSLAIPSGTTIALVGQSGSGKSTVISLIERFYDPQLGDVLIDGVNLKEFQLRWIRSKIGLVSQEPVLFAASIKENIAYGKASATDQEVRAAAELANAAKFIDKMPQGFDTSVGEHGTQLSGGQKQRIAIARAILKDPRILLLDEATSALDAESERIVQEALDRVMSNRTTVIVAHRLSTVRNADTIAVIHQGTLVEKGPHNELLRDPEGAYSQLIKLQEANQQNNRKGDGNARLGKQMSMNKSASRRLSRDNSSHHSFSVPFGMPLGIEIQDGSSNKLCDEMPQEVPLSRLASLNKPEIPVLVLGSIASVISGVIFPIFAILLSNVIKAFYEPPHLLRRDSQFWASMFLVFGAVYFLSLPVSSYLFSIAGCRLIRRIRLMTFEKVVNMEVEWFDHPENSSGAIGARLSADAAKVRGLVGDALQLVVQNSSTLVAGLVIAFVSNWELSLIILALIPLIGLNGWIQMKFIQGFSADSKMMYEEASQVANDAVSSIRTVASFSAEEKVMDLYKKKCEGPLRTGIRTGIISGIGFGVSFFLLFGVYAASFYAGARLVEDRKTTFPKVFRVFLALAMAAIGVSQSSTLTSDSSKAKSAASSIFAIVDRKSRIDPSEDAGVTAETLRGNIEFQHVSFRYPTRPDVQIFRDLCLTIHAGKTVALVGESGSGKSTAISLLQRFYDPDVGHILLDGVDIRKFQLRWLRQQMGLVSQEPALFNDTIRANIAYGKDGQATESEIVSAAQLANAHKFISSALQGYDTMVGERGAQLSGGQKQRVAIARAIVKDPRILLLDEATSALDAESERIVQDALDRVMVNRTTVVVAHRLSTIQNADLIAVVRNGVIIEKGKHDALVNVKDGAYASLVALHSAASS

SEQ ID NO: 53689 - protein, 500 aa, Zea mays
  Coding DNA Sequence Number=SeqID_11910
  Gene Ontology: Mol. function=nucleic acid binding; Cellular component= intracellular; Biological process=chromatin modification
  Homolog annotation: Hit_ID=Q10RP4; Match level="QueryCoverage=30%, HitCoverage=21%, E-value=4e-27, Identity=42%"; Hit description=Zinc finger, C2H2 type family protein, expressed
  Pfam annotation: Domain name=zf-C2H2; Domain location=440-465; Score =24.4; E_value=0.00039; Accession=PF00096.16; Description=Zinc finger, C2H2 type
  Pfam annotation: Domain name=zf-C2H2; Domain location=468-487; Score =4.3; E_value=3.6; Accession=PF00096.16; Description=Zinc finger, C2H2 type
  Pfam module annotation: Pfam domain module=zf-C2H2::zf-C2H2; Domain location=440-465::468-487
MRIRRYAARLLSATTAAPSSPPRPPAASWLHTDDDDDCCAFCELSRPAPQEGQDAVKHKGHIAGRVPESDVRADERVGLHQRPPAPEVKKCKIDHVPPVDKSSVGLQVVKCASEVSGAVAKPEGGTPASEAAAGPAAKAGAFVVNDAASEQGVQCIASPLGGASKLEEVTAGNSFANGPTTELGVFKGASLANELADVPGVTSIMPEVIGKPSTDPGAITTVVEVSDIGSVVHETTELESAGEDYIASEAAAEPEDAGRASCNTDDTAALDEPLPPSCDPNIGNAQVGNAMDTVASTVRPSRCDAAEEGASVNSTANGPVRARGPTVKGGVPKDKSVAPSVLRVLDVVTRSIGKSGRTDVICYARRTGKRKPELQEVKTENIDLEDGVLCEKEEALLRTDCCESVLSTAGSIDVKLADIKKDLMDNSAASKVTKMKRNIFECKIDYCHMTFKTKAELAAHKKNMCTVNSCSKHFRSHSYLRRHESAHNDDMPYKCPWDGL

SEQ ID NO: 53690 - protein, 678 aa, Zea mays
  Coding DNA Sequence Number=SeqID_11911
  Gene Ontology: Mol. function=RNA-directed DNA polymerase activity; Cellular component=intracellular; Biological process=RNA-dependent DNA replication
  Homolog annotation: Hit_ID=UPI00004C1733; Match level="QueryCoverage =91%, HitCoverage=45%, E-value=0.0, Identity=91%"; Hit description =UPI00004C1733 related cluster
  Pfam annotation: Domain name=RVT_1; Domain location=56-225; Score =144.8; E_value=2.3e-40; Accession=PF00078.17; Description=Reverse transcriptase (RNA-dependent
  Pfam annotation: Domain name=RnaseH; Domain location=455-582; Score =5.9; E_value=1.6e-05; Accession=PF00075.14; Description=RNase H
  Pfam module annotation: Pfam domain module=RVT_1::RnaseH; Domain location=56-225::455-582
MPGIPRDVAEHSLDIRAGARPVKQPLRRFDEEKRRAIGEEIHKLTAAGFIKEVFHPEWLANPVLVRKKGGKWRMCVDYTGLNKACPKVPYPLPRIDQIVDSTAGCETLSFLDAYSGYHQIRMKESDQLATSFITPFGMYCYVTMSFGLRNAGATYQRCMNRVFGEHIGRTVEAYVDDIVVKTRKASDLLSDLEVTFRCLKAKGVKLNPEKCVFGVPRGMLLGFIVSERGIEANPEKIAVITSMGPIKDLKGVQRVMGCLVALSRFISRLDERGLPLYRLLRKAECFAWTPEAEEALGNLKALLTKAPILVPPTDGEALLIYVAATTQVVSTAIVVERQEEGHALPVQRSVYFVSEVLSETKIRYPQVQKLLYAVILTRRKLRHYFESHPVTVVSSFPLGEIIQCREASGRIAKWAVEIMGETISFAPRKAIKSQVLADFVAEWVDTQLPTAPIQPKLWIMFFDGSLMKTGAGAGLLFISPLGKHLRYVLRLHFPVSNNVVEYEALVNGLRIAIELGVRRLDARGDSQLVIDQVMKNSHCRDPKMEAYCDEVRRLEDKFYGLELNHIARRYNETADELAKIASGRTTGSPGRLLPGSAPTLRQIDDTPKPEAPSVQPEVTSASVGEALCIEEERSGATPDRNWQTPYLQYLRQGELPLDRAEARRVARRAKSFVLLGDE

SEQ ID NO: 53691 - protein, 133 aa, Zea mays
  Coding DNA Sequence Number=SeqID_11912
MDDVNPARLHGWRTAYECERFGDELHDGEQARREPGLDGGYVALLRVLRGRAPARWARAPVTPSRYAREAVFGVVHSNAKRQAMARRSTSRRQGVCEAAEPKSPSMVTVTCTRGNCRTGVGRGKVATVGREEE

SEQ ID NO: 53692 - protein, 53 aa, Zea mays
  Coding DNA Sequence Number=SeqID_11913
MAVTVLLLSVSLRRGAELKGFYVRGSKLSLVQIGSVSEVIGFEVDFVMNMGKF

SEQ ID NO: 53693 - protein, 204 aa, Zea mays
  Coding DNA Sequence Number=SeqID_11914
MGRAQARSEPPSEDFGDSKYSEETSSGADRSPAPVSPPASSEDLDDSMGLSTAARAYWCSIERVGLGGSDESGVSSDEADSSEEWSGGDGDDEGDNSSSGDDVGSDGSKGNDSEGDSEGSNGDSDGSSDDVEGGSSKGDGDNGSGNDNGDGGRGNGGSGDGDGGRGDSGSGDGDDGRGDDGNNSKGDSGSSKASGIMTLVEILV

SEQ ID NO: 53694 - protein, 249 aa, Zea mays
  Coding DNA Sequence Number=SeqID_11915
  Gene Ontology: Mol. function=nucleic acid binding; Cellular component= intracellular; Biological process=ubiquitin-dependent protein catabolic process
  Homolog annotation: Hit_ID=Q6K653; Match level="QueryCoverage=76%, HitCoverage=45%, E-value=6e-84, Identity=84%"; Hit description =Ubiquitin-associated (UBA)/TS-N domain-containing protein-like
  Pfam annotation: Domain name=UBA; Domain location=115-155; Score =33.9; E_value=5.5e-07; Accession=PF00627.21; Description=UBATS-N domain
  Pfam annotation: Domain name=zf-C2H2; Domain location=43-67; Score =19.9; E_value=0.009; Accession=PF00096.16; Description=Zinc finger, C2H2 type
  Pfam annotation: Domain name=zf-C2H2; Domain location=6-30; Score =1.1; E_value=8; Accession=PF00096.16; Description=Zinc finger, C2H2 type
  Pfam module annotation: Pfam domain module=UBA::zf-C2H2::zf-C2H2; Domain location=115-155::43-67::6-30
MAGLSLLCGDCGAQLRSVEEAQAHAEATNHANFVESTEAVLNFVCSDCGKPCRSQTEVDLHTKRTGHTEFADKTAEAAKPIDLEAPLKPASEDVMDVDTSASASGEPQEMVVPEVNKEMLTDLEGMGFSTARATRVLHFSGNSTIEGAINWLSEHQEDIDIDEMPLVPANSKTEDNKPSLTPEEMKIKAQELRDRARKKKEEEERRMEREREKVLFELSSLPYCYLGARLLHLFSNTQILKFDTIYNLH

SEQ ID NO: 53695 - protein, 105 aa, Zea mays
  Coding DNA Sequence Number=SeqID_11916
  Subcellular localization annotation: CTP_CleavageSite=51; ConfidenceScore=5.83e-01
MSSVHDSASVVVSCPPKKKVLHSSTSSLVVSRRNSDRRSSSVLQLPEHRTLASSSVTPKRPRAFWTTRGKAMEADTRDPPVGAHDPNGWTTTSPPGPTRRRQRFG

SEQ ID NO: 53696 - protein, 389 aa, Zea mays
  Coding DNA Sequence Number=SeqID_11917
  Subcellular localization annotation: CTP_CleavageSite=42; ConfidenceScore=5.90e-01
MAYLPPHKRQPSTTASTPIPAPNPPPPSLSSSLRSLSLSSPRGRGRGRGAVGRHPLASTKIFRAAGCISRWFPLPPFSPAGDGEEYILRLEPFPCPPIEHRTGAKPLALVVASTPGQGSSGSTAAAVTSIAEQFLPDLLAAAERVKAEGAPKDELVKLSLVARLGTVLFECQPGGSPVSLDELRQAAKAGEDGSRSQLRKTFYTSLSSECLDDMERTMVKRIGLDFDSSKKHYHVKVSDKNRSDSTISCKCTVEEDGSLAIHKVELNQSEVENAVKSLVSTAIIDPNVKGGVRWPLGKESIGERFSIVGVWHTDYKAFRNETMRLKLRHADRFDHRTSTGGVSDEVTFKLTAISCKLEEDDLAESAVKEMLESAVQMLWDNALNYRVVP

SEQ ID NO: 53697 - protein, 385 aa, Zea mays
  Coding DNA Sequence Number=SeqID_11918
MARTRGSVKKVTKPVEEQSSSETVVCESESSMPTEKKEPIIFLMKAAKDQFQNNILKQNFHPEQGILLSQQQDLGKQVSRTISKLKWEAFCMHPGNYSPSLARAVGEGFMCQRSIVKGFTSKELLLPSTHSTTVNPDGMCLIHSIVKGRNIDVGAILHQEIADCATRQTGILVFPSLVLENMGPINEMSIERMTRGKNTPTMKEAEISKTMKGKTKAKSKGTNLTAETSLLLKMKDIEKLKEKDSRDVEDCMRRIDNMVEGDVITGQEASSIEEEVTVEEEDVHIGVVNEKTEEQNTETEAIEKESGEDIVNALDFMDATNDNLEQDGARTAKATEVTSEEHHSSLAIVVYTRPLKVTPPTQEATDNVGVAPKIEERFENRTKPK

SEQ ID NO: 53698 - protein, 103 aa, Zea mays
  Coding DNA Sequence Number=SeqID_11919
MEIKRRPREAYVGDVDQQVDDEFDEKDDPNEADLWKRRTDDEELSSGQKVGRLQLFDITDRKKGGSPMTTEAAEIMEKLKDKRAEYEAIASSDSSVNLEDIDN

SEQ ID NO: 53699 - protein, 101 aa, Zea mays
  Coding DNA Sequence Number=SeqID_11920
MGLMRLHGSPTRLRENSTQISSQKRDPSILIIPMWLNELVNKLCSMKVQYCKANSGILKTSESAHTININNSVFYDDQCLSYGMYRDFVILNVCPYDSAKG

SEQ ID NO: 53700 - protein, 92 aa, Zea mays
  Coding DNA Sequence Number=SeqID_11921
MTGSSSARSWLTTHVDPHQEVVLEEEHPHPLASTDATTSPVNQFSLRSQPKSKLMHYQRNCLRFQPSQAAWVYDSFGGIHCLNDGSIEDFSA

SEQ ID NO: 53701 - protein, 749 aa, Zea mays
  Coding DNA Sequence Number=SeqID_11922
  Gene Ontology: Mol. function=methyltransferase activity; Cellular component=nucleolus; Biological process=regulation of progression through cell cycle
  Homolog annotation: Hit_ID=Q69MP1; Match level="QueryCoverage=72%, HitCoverage=79%, E-value=0.0, Identity=63%"; Hit description =Putative nucleolar protein
  Pfam annotation: Domain name=Nol1_Nop2_Fmu; Domain location=306-568; Score=226.8; E_value=4.6e-65; Accession=PF01189.8; Description =NOL1NOP2sun family
  Subcellular localization annotation: CTP_CleavageSite=29; ConfidenceScore=5.06e-01
MAKKGAKRKQQLPPAPTAKNGSKAVLPLKAAKRAPKKQKVLESSDDSDTEQQQQLQEEDSDLDVSSDSDAEELSGSDAEADELSGSDADADGGSTRGDDMDDDDDDEDGESDDDSLADDFLAGSDEGSALSPQGFNELRTKVLSKISRRHRTQPVRNYNYALTKDYNYDSDPYGLKKGGDSGLESDGSDDLEAKSRAIDEQKLKAEEDAEEELQTNIRSESDEFRLPTTEELEEEAHRPPNLPNLKRRISEIVRVLSNFSKLRQKDVPRKDYINQLKTDVMSYYGYNDFLVEALIEMFPAVELVELLEAFEKRPPECLRTNTLKSRRRDLAAALIPRGFNLDPIGKWSKVGLVVYDSTISAGATTEYMAGHYMKQGASSFLPVMALAPQEKERIVDMAAMLSYTMTNIRIDYSLIYRAAPGGIIYANEFNEKRLHGLMGNIHRMGVTNTIICNYDGKELPKVLGMNSVDRVLLDAPCTGTGTIWKDLQIKTSKDIEDIRNCAFVQKNEAVIDYALKKRNVKLVPCGLDFGRPGFIRYREHRFHTSLEKTRRFYPHVNNMDGFFVAKLKKLSNTIPVTSEQPKASEGAAEKADGEDEKVISNEQETAVPGKDEKTVQMINHKKSKVTNKRTSVTKEAGGHKREPNRSGKHLNKNKDTDTKEVDGPESTETNGDGKEEQREQTKQTSHKRKIDSVKTKKSGPVSFSGVQEKNQVSGKKTKRKWQFKLRRDWEAEKKGTKRSKTSDISVSGN

SEQ ID NO: 53702 - protein, 242 aa, Zea mays
  Coding DNA Sequence Number=SeqID_11923
  Gene Ontology: Mol. function=cysteine-type peptidase activity; Biological process=proteolysis
MKYVDHPPSNPKKITIKSSQEVFTVEIPRPRNNANKPRQSIAPDVDTSKQMKQLYVRRNTKRSAGRGKNKLTIDMSDLMRNQCLLSDNRHIYYLDHLHHEATPENKYDTSRIKYFDKETIDALTKADRRKPRHAGETYGHCHFCSRTDTCYVAAPKQPANDTFHIHVPRMKDLISSKVTCLPPPYRSSFDSLLKAHDKEVDKYCARLEHSHRKLVSNQLQLAEIFADMIDDVIRLGSQVQES

SEQ ID NO: 53703 - protein, 168 aa, Zea mays
  Coding DNA Sequence Number=SeqID_11924
MTPAKYSHILLEDLLTINIEKVMELDVPINIVTDSSKSLEHNFLMKEILSQAQEILSQAQTNLILQIHLHDKMKCVWNFLYLIFYGSVEIAAVDVSIAIFNQLSKEHHNQCEPLPAHGYEMVIVIYDIYLLYNAHALTAILLEYSQQRSIPFAYIYTSRSGASKAVEC

SEQ ID NO: 53704 - protein, 116 aa, Zea mays
  Coding DNA Sequence Number=SeqID_11925
MWISIVNIQIQWHSRLERRAHAGHGPWWSTTAPATRPSAHVLTGSWLWDLSLVLAAYFTADSPARYHICGATAVELGAGTGLPGIAATVYLGAAHCVLADVVALLRASYPTRSQQG

SEQ ID NO: 53705 - protein, 189 aa, Zea mays
  Coding DNA Sequence Number=SeqID_11926
MRKKFYIKAYLNLREKLILRGKVCCVLKSLEINHVMRMSSPWIRYSCVDCLYGALLGILIVYSVSYASRFDSLHYAPHRQLDKPRKEARQTLRYRVHGRRSRRLRYLKPGVKKKTCKVKSLALEVIPGEANKSKKNKDKEKKMKNISSTLDQRTTARTPRRRSVKARTARTLGGGYLLLQQWHLSIKLK

SEQ ID NO: 53706 - protein, 60 aa, Zea mays
  Coding DNA Sequence Number=SeqID_11927
MAPRKPCDDGDYQLYCGSRRTSTRTQPLRPLSLRQATLLLRLPRHHTSRVPPSLRMPHWH

SEQ ID NO: 53707 - protein, 72 aa, Zea mays
  Coding DNA Sequence Number=SeqID_11928
MGPSPPEKYKVVEQIDPEQAMDAEVVEQIDWAPTGFAAKAAALLYLLRAFMSQRMGLEAPAPGLQRHASVGG

SEQ ID NO: 53708 - protein, 471 aa, Zea mays
  Coding DNA Sequence Number=SeqID_11929
  Gene Ontology: Mol. function=receptor activity; Cellular component =cellulose and pectin-containing cell wall; Biological process =protein amino acid phosphorylation
  Homolog annotation: Hit_ID=Q53PX8; Match level="QueryCoverage=90%, HitCoverage=84%, E-value=1e-168, Identity=67%"; Hit description=S -receptor kinase-like protein, putative
  Pfam annotation: Domain name=B_lectin; Domain location=91-190; Score =6.2; E_value=0.00062; Accession=PF01453.15; Description=D-mannose binding lectin
  Pfam annotation: Domain name=PAN_1; Domain location=354-428; Score =6.8; E_value=0.033; Accession=PF00024.16; Description=PAN domain
  Pfam annotation: Domain name=PAN_2; Domain location=346-409; Score= -3.1; E_value=0.0028; Accession=PF08276.2; Description=PAN-like domain
  Pfam annotation: Domain name=S_locus_glycop; Domain location=229-330; Score=-35.3; E_value=0.014; Accession=PF00954.11; Description=S-locus glycoprotein family
  Pfam module annotation: Pfam domain module=B_lectin::PAN_1::PAN_2::S _locus_glycop; Domain location=91-190::354-428::346-409::229-330
MKCRGDPAIAAAAAAIGVLCVASAVLLGLVDGATEGEEPTTQLLNGFTAAHAAGAPAPFQPVLYAPSGAFALGFLRVGAGSLDLAVVHLPSSFPVWRATPARLGDWSRPATLTFDGGLELTGHNGGMLWQTLGAVGDVVVLLNSSNLVVRRFEKTLPEWESFRHPSDTLVLGQNFTASSPPLVSANRRFALRLGKAYMALHMEFYGGQTAPAYWRHTALMAQPENATEPPVYGSLDARGFFGLYLEGGGQRVDVLSFDTFAQNLTAAFRRMTLDDDGNLRAYYWASGSKAWASDYRAISERCDLPTPCGAYGLCVPRKAECQCLDNSTSTAGAAPSCHAEETADLCAGNQLGLGFDVVRRKRVSVAYKEELPFETNRTAEECEAVCAGNCSCWGAVHSGASGYCYLIDFPVETLVYEADDRKVGYFKVKKPPARPGDALASAVLSLVLVGLAAAGACIGLGLQTGGCKRLF

SEQ ID NO: 53709 - protein, 79 aa, Zea mays
  Coding DNA Sequence Number=SeqID_11930
MEVLEEELMPRRGSRSVGGAEGGGDEYSDVEEADPEGEERERRRQRCWGHGRAVRRESQGAGVNYSGLDVQRFWAYRKG

SEQ ID NO: 53710 - protein, 107 aa, Zea mays
  Coding DNA Sequence Number=SeqID_11931
MDSPTFSSDNGDASSDGSSDNEEQTEFPEGASSDSEELEGASSDSEEQAAEFFEGASDQILMDSVFVGDDDSQLALQIVRNLMDGVAGLEKRVFDSTTEAGHDDGCR

SEQ ID NO: 53711 - protein, 92 aa, Zea mays
  Coding DNA Sequence Number=SeqID_11932
MLRLTACVSNTIYGLSKSIYVKENERNGFDHMLAHMVQRAYKGKETVSVPIDNVMKVWKAYAKLVDIIDVYDYACIMHVKRLRKGNEMIVGS

SEQ ID NO: 53712 - protein, 123 aa, Zea mays
  Coding DNA Sequence Number=SeqID_11933
MDALVLLDEVCENKGNIIAPTKALIRRATTRTRVEISTESCVPPQLTTRRTLKKWLAPLRSTSPLTFALPPASVVSVGSTNSIDFPTHAVDPLVAKTALKPVRQSQPEIFLSSLPDIIRTSFL

SEQ ID NO: 53713 - protein, 105 aa, Zea mays
  Coding DNA Sequence Number=SeqID_11934
MKEAETSKTRRQNKVRNQGNKPDCRDIIVAQNACNNSIVAALSQLSQTPLPKFPMFLPIIRYCELLSEEDDLGDQDRSVESSPILYVFDDEKEEDLRDIEECMLH

SEQ ID NO: 53714 - protein, 330 aa, Zea mays
  Coding DNA Sequence Number=SeqID_11935
  Homolog annotation: Hit_ID=Q8L8A8; Match level="QueryCoverage=92%, HitCoverage=59%, E-value=1e-39, Identity=35%"; Hit description =Transcription activator
  Pfam annotation: Domain name=QLQ; Domain location=1-29; Score=35.3; E_ value=2.2e-07; Accession=PF08880.1; Description=QLQ
  Pfam annotation: Domain name=WRC; Domain location=60-105; Score=96.8; E_value=6.7e-26; Accession=PF08879.1; Description=WRC
  Pfam module annotation: Pfam domain module=QLQ::WRC; Domain location =1-29::60-105
MELEHQALIYKYLNAKAPIPSSLLVSISKSFRSSNRELDRLSNAVSWRPLYQGYANADSDPEPGRCRRTDGKKWRCSKEAMPDHKYCERHINRNRHRSRKPVENQPRKATKEVTTAAAGSLPCAGPQGSLKKAKVNDSKPGTGSYWTDSLNRTMLSREKANKPTDDESLLLSSTKNSQPTLSLLTQLKQQNKPDKLGPTPENEPNSDTMLKAWGGSHHKSISSTQRHDAESLQSVLQNFSLAQNDRLESEKNRYSDSVLVSSAFYSADGPQTTCLTPNMTQVQQDCISSSWEMPQGGPLGEILTNSKISEDLSKCGSRSYGWLLNLDHAP

SEQ ID NO: 53715 - protein, 145 aa, Zea mays
  Coding DNA Sequence Number=SeqID_11936
  Homolog annotation: Hit_ID=Q6QP51; Match level="QueryCoverage=50%, HitCoverage=30%, E-value=3e-09, Identity=48%"; Hit description =Putative growth-regulating factor 1
MAQGHISLSRLRPLAYVMGDRPHGSIGPPPEQRAEAHRVRLTAAESSLRRHRKLRLAQPQGSDSTSTSEDGLRLARPQGSDSTSTSEDSLRLARPQGSDSASTSEDGLRLAQPQGSDSDLGGVTASPDLGLGPTTLQGGTSLPYP

SEQ ID NO: 53716 - protein, 310 aa, Zea mays
  Coding DNA Sequence Number=SeqID_11937
  Homolog annotation: Hit_ID=Q6QP51; Match level="QueryCoverage=58%, HitCoverage=99%, E-value=1e-16, Identity=38%"; Hit description =Putative growth-regulating factor 1
MTASKKGPGKRILRKGSFSAKEAGPEPPLLIRGSKAGPSEGFDSRLRALGLRAHYWSEVRRLAPRKGSTAASGHSGSAPTTDQGFEGWPPKGFDSRLRTRRARDDSGYVRYMVETRATLPRARTQPRPRKTVSASPDPRARTQPRPRKTVSASPDPRAQTQPRPRKTVSASPDPRARTQPRPRRSHRLARPWARTDHVTRGYIITLPLASSGYGEQDRRPIWLTLGSSAPPTATTSHEHGTNTSPTATSAWPSYEKVAAREDELTNMLSPSLANAWTPRGRNADTWTRISTGPLPILDIGQGIPYPGTLL

SEQ ID NO: 53717 - protein, 112 aa, Zea mays
  Coding DNA Sequence Number=SeqID_11938
TTGQAKDGSKKSFEVPSAREKVKEAEEPKARVVVEEEPKELYHLVGGNGVILENSSEEILATPTQPPTPHAFATGASSSTPPVLVAQAPTPAGDDPDDSGDDGGNDDDEEDN

SEQ ID NO: 53718 - protein, 1039 aa, Zea mays
  Coding DNA Sequence Number=SeqID_11939
  Pfam annotation: Domain name=DUF1723; Domain location=228-277; Score =46.7; E_value=8e-11; Accession=PF08330.1; Description=Protein of unknown function (DUF1723)
MACTSDQRDLPQGPKELSGTLASHRMGERTCVRACVPARLSSFENQLAFLRCKGSQQRVGYTKDLSHRMNGFPFLLLHVGKYETCKMTENMSHIILEKKPLSYVAQSQIYAPRNSDAANPVIINRELKIGELDNSTRGWRSQPTISGICFYPYAPSKQPEQAFTLGNRMISHGLGWENYYIEHIPIPSGYAEWGTIILAKHSFNLRGDGEGMDFIYGAIYCSLLGQYSISPSLLKSLLERWNPDSNTFLFYDGERTVTLLDLHYIMGLPVDGEFYEEYVPSHHEREPSMLLYPKCLSQLLEVWDELQVGGEVSLQEWCDCFHNGPRGLSHSDDMELSLIYKAAFIAIWLCGFAIIGGGPRIRRGVLVMASWIALGQRFALAQPALCSLYYSLRLISTDPVSPSYMKRPWPVHYLIGWMGVYLKHAFVNKVTKPRIPYYDHPTRKPMLVNMLFRTSKHFNPESASDFLRKDSNILWHPYKPHSANHLRTPPSSWISKIFCLCIRRGLLPFRRDNICIAEPYHPDRVTRQFRLDQIVPYLVLKSVYTEDDFGVAYSYWAHLLRPINQDFSCLPNETRIGSCTIYWINWYRKFSEPFISVLTNLRCGCARGRVHYNDRKRLAAGKIIPRRLSPSDFVVIREVREEQHTKYIAFIKASEKHSEINLMEGSSLQHVSTDNTSQKDSMDDQVYMQPEDNRKRRLSKDTLLCDSEESLTKRKLDFFRPVGGDTGTATLTPYPTITGNEDFVPSSSNVAQVGDGDDDVTNFCLTRREPPTCDVAQVGDGDDDVTNFCLTRREPPTSPFIDSCVDTTELAEDYSSFPCALPSVVNFSDIDSFLDGCDQLFKNQPLNIISPVEIHPSMDTVATLEDFFLKPARQALANVLDGLNAHTLRDPVRCASLRLASSCLTGQFASIARIKAMLDKLITISEQLQRTYSNFEVAKKQDEESTTEIKQALDIQWEALRTVDEELASAEKQRTETMTTIEKLNQVLMEVRKLEQDLCDAIADASKKAIDVFQKETTELNQRAEQLLIDLNSCRSSNN

SEQ ID NO: 53719 - protein, 145 aa, Zea mays
  Coding DNA Sequence Number=SeqID_11940
  Gene Ontology: Mol. function=nutrient reservoir activity; Cellular component=membrane; Biological process=protein amino acid glycosylation
  Homolog annotation: Hit_ID=Q8S6P9; Match level="QueryCoverage=67%, HitCoverage=57%, E-value=9e-31, Identity=61%"; Hit description =Expressed protein
MGCPRERAAVANVFIASLFLLAGQAGGGHSRGAAAVASADDDDPCSEEVVEVFQGSAGSLPNGIPSYSVTITNTCLDCTVCDVHVSCGEFASTEVVDPSDFRRLSYGDCLVRNGGPIGPGETISFQYSNSFVYKMDVAAVSCVDV

SEQ ID NO: 53720 - protein, 98 aa, Zea mays
  Coding DNA Sequence Number=SeqID_11941
MYTYEHEESYEENICRDLKNELEALTIFFGKPYTSHEPPTRYSGFIYDDGLMMMATLMVSGIFLSEEVVHIATNAQEKMTTMWRTFSSSKTLRSSRLD

SEQ ID NO: 53721 - protein, 367 aa, Zea mays
  Coding DNA Sequence Number=SeqID_11942
  Gene Ontology: Cellular component=integral to membrane
  Homolog annotation: Hit_ID=Q018D5; Match level="QueryCoverage=61%, HitCoverage=90%, E-value=1e-41, Identity=42%"; Hit description=[R] KOG4758 Predicted membrane protein
  Pfam annotation: Domain name=TMPIT; Domain location=5-346; Score =25.8; E_value=5.9e-12; Accession=PF07851.3; Description=TMPIT-like protein
MSEEERKGGGGGGDDGAAAAARAAEQARELQDAAAALLTRTRAEEEALRRRAAALQGELRRLREAAAAHADSEKVEEDLDRATCLITEGDVASLLPSKTQGTFLRMFLGPVNLRAPRKEVQLKVKEEYNSYRDRTALLFLGFPVILLFLRQWLWNRCFPALPVQLYQAWLLFLYTSLALRENILRVNGSDIRPWWILHHYSAMLMSVISLTWEIKGQPNCARKQRGVELFLCWAIMQGFVMMLQNRYQRQRLYTRIALGKAKRMDVVWGETAGVEGQLLLLCPLLFLLQGFEGYVGFLLLRTAHTGVVPEWQVVVCGILLISMAIGNFANTLDTLMAKSRFKAKMKKSKGKRDLDTCPSPTGRSPRV

SEQ ID NO: 53722 - protein, 135 aa, Zea mays
  Coding DNA Sequence Number=SeqID_11943
MADMHTVRKNSPKVYTPKGGWHEIDSVDGRSGEWRRWHGRGGGAGWQCAGAAACGPAAWGWHAARRRGGGARPGGVGAAHWAGGAQGRRAQGRRAVEIEEKKRRSERREEERKTTGVLFSVFAECQIAGTRQRIF

SEQ ID NO: 53723 - protein, 96 aa, Zea mays
  Coding DNA Sequence Number=SeqID_11944
  Homolog annotation: Hit_ID=Q10GR2; Match level="QueryCoverage=70%, HitCoverage=5%, E-value=2e-13, Identity=62%"; Hit description=HEAT repeat family protein
MYPLTLLHGHLALLATADPLLAALVDACFELAWHADVMKHEALFVQTLPYLVAMALTTSSSAKMVLYCLFALRDALPLLNYDNSQSISDFKMLLLC

SEQ ID NO: 53724 - protein, 51 aa, Zea mays
  Coding DNA Sequence Number=SeqID_11945
MPGPLAEPLQLADLGASAWICVDLPRWRPGQHAQVLKSFSSSLLQRFEFLG

SEQ ID NO: 53725 - protein, 85 aa, Zea mays
  Coding DNA Sequence Number=SeqID_11946
  Gene Ontology: Mol. function=protein binding
  Homolog annotation: Hit_ID=Q6K7R2; Match level="QueryCoverage=72%, HitCoverage=10%, E-value=2e-21, Identity=83%"; Hit description =Putative disease resistance protein Hcr2-5D
  Pfam annotation: Domain name=LRR_1; Domain location=25-46; Score=2.1; E_value=1.1e+02; Accession=PF00560.23; Description=Leucine Rich Repeat
  Pfam annotation: Domain name=LRR_1; Domain location=48-69; Score =16.3; E_value=0.11; Accession=PF00560.23; Description=Leucine Rich Repeat
  Pfam module annotation: Pfam domain module=LRR_1::LRR_1; Domain location=25-46::48-69
MEPIRKYCYQKIVFFAGNQRYRVKLLRILDLSQNHPTTVPEGIKNFTALIELDLSDNNITALPAELGLLEANLQVLKLDGNPLRR

SEQ ID NO: 53726 - protein, 212 aa, Zea mays
  Coding DNA Sequence Number=SeqID_11947
  Gene Ontology: Mol. function=structural molecule activity; Cellular component=protein storage vacuole
  Homolog annotation: Hit_ID=Q6H6M0; Match level="QueryCoverage=61%, HitCoverage=96%, E-value=2e-39, Identity=62%"; Hit description =Vesicle-associated membraneprotein-like
MSNTLLRVCPSDLKMPFTMQAPKEVPPDYQCKDKFLVQSVAAAEGTTHKGIVPGMFSKAPGKLVEEFKLRVVYVPANPPSPVPEETEEDDGSLDSDVDHEVGTPSTSNCAAGQGHTCRSQASDDEGDSTSKLGLESRYAEENKMVQKDLIQDASISELELESRYAEENKKIQKELDLLRKTHASPGDFSATSVLLVFLLSSLVGYLMFGSKT

SEQ ID NO: 53727 - protein, 136 aa, Zea mays
  Coding DNA Sequence Number=SeqID_11948
MDMGDLRTARPSPVRWTDCHTLTGQQVAVRLLRQAGEHPSPPNAEGRSGSKGQPKAPLVWRTGLFGVPPDMSGAPEDSNSKLVTFGKFQRRLRYNSPDCPVYTGHVRCSKDERPRKLGNLENLLRLLRYNSPDCPV

SEQ ID NO: 53728 - protein, 465 aa, Zea mays
  Coding DNA Sequence Number=SeqID_11949
  Gene Ontology: Mol. function=protein-methionine-S-oxide reductase activity; Cellular component=membrane; Biological process=protein metabolic process
  Homolog annotation: Hit_ID=Q8LIY0; Match level="QueryCoverage=98%, HitCoverage=67%, E-value=0.0, Identity=75%"; Hit description =Putative CSLC9
  Pfam annotation: Domain name=Glycos_transf_2; Domain location=209 -384; Score=29.2; E_value=4.3e-06; Accession=PF00535.16; Description =Glycosyl transferase
MESPEWTIPAESEVAAGGKAGRGKNARQITWVLLLKAHRTAGKLTGAAPSVLSIAGAAWRRVAAGRTDEDEDEDAGAAPPGESPALRSRFYGFLRASLVLSVLLLAADVAAHLQGWHLAVDVPDLLAVEGLFAAGYASWARVRLEYLAPALQFLANACVVLFLVQSADRLILCLGCLWIKHRGIRPVPKAGGKGSDDVEAGTGNFPMVLVQIPMRNEKEVYQQSIGAVCGLDWPRPNFLVQVLDDSDDAATSTLIKEEVEKWQREGVRILYRHRLIRDGYKAGNLKSAMNCSYVKDYEFVVIFDADFQPQPDFLKRTVPHFKGNEDVGLVQARWSFVNKDENLLTRLQNINLCFHFEVEQQVNGIFLNFFGFNGTAGVWRIKALEDSGGWMERTTVEDMDIAVRAHLKGWKFLFLNDVECQCELPESYEAYRKQQHRWHSGPMQLFRLCFVDIIKSKVWTFPCSL

SEQ ID NO: 53729 - protein, 173 aa, Zea mays
  Coding DNA Sequence Number=SeqID_11950
  Homolog annotation: Hit_ID=Q10RR9; Match level="QueryCoverage=51%, HitCoverage=25%, E-value=7e-10, Identity=38%"; Hit description =Expressed protein
MVKAVKKLSRALLVVAGGAAAAAALGTGAHLLFFGLILIGTATAGALKTWIAPRGRGTKKPSGSKTMSSSLLRLHEQLDAAAKGTYVLGQDLDTVSNLVARLSDAIERDNAMARWCAERADEGSSVLEMANELRRSCSSSRSLTDELEEHVSMFLATIHRARLLVIREFSKKA

SEQ ID NO: 53730 - protein, 182 aa, Zea mays
  Coding DNA Sequence Number=SeqID_11951
  Homolog annotation: Hit_ID=Q0KIS5; Match level="QueryCoverage=34%, HitCoverage=60%, E-value=1e-07, Identity=50%"; Hit description=Acid phosphatase, putative
MAIILYWVYTVTFSPIVLYWVYTNGYQLVLHSLERYRLHTLDEEEENFVSLCTVVCGILQQHLVHAINVMVLFMVHFSTAFYQKASNFPDCNTVKEVPGRLQQFESRWHGLGFSTYSSANVWELELCALGGLFISFDRASPTWSKLPRVMENDVIARYYGQGKGIVVKAIYDREATPYNFSM

SEQ ID NO: 53731 - protein, 69 aa, Zea mays
  Coding DNA Sequence Number=SeqID_11952
MAHKFDLWITWEVLIATQVQRRTLECGGFWVAFSRGFLAGFNAYKCVPLFLLNKSWVWKFSCHVFQKIV

SEQ ID NO: 53732 - protein, 144 aa, Zea mays
  Coding DNA Sequence Number=SeqID_11953
MGKSKKGGSSSHHSGDKRKREPTPPSEDFGDSEYSEEEFSSKSKGSPVHASPPVSSDDSPGIAAEVWTYIRVVKRTGLEGSDESEVSSDEENSSDSSEEGDGDSDGEGDDDDGGDGDGDDDEGDGKGSKGDGKDDSKGSNKASG

SEQ ID NO: 53733 - protein, 119 aa, Zea mays
  Coding DNA Sequence Number=SeqID_11954
  Subcellular localization annotation: CTP_CleavageSite=74; ConfidenceScore=5.12e-01
MAFALLVAAARAESAGSTRSPAAAAGGGRAMGGGWPRPGGALAAPRLLLRALLLCSLLAQPHPSRAFFFFGGVRTSLHVPQDDVGMGTRRLQARVLQLAVPLLMMLSFAATSVSAGVVM

SEQ ID NO: 53734 - protein, 70 aa, Zea mays
  Coding DNA Sequence Number=SeqID_11955
MDEQQMHATLRSDYCGRKMILIMLCDVGHYKCHHKRDTDNCINLKNGSPGDVSIIPEADLPETVQVIRSC

SEQ ID NO: 53735 - protein, 483 aa, Zea mays
  Coding DNA Sequence Number=SeqID_11956
  Homolog annotation: Hit_ID=Q10RR9; Match level="QueryCoverage=19%, HitCoverage=25%, E-value=1e-08, Identity=37%"; Hit description =Expressed protein
  Pfam annotation: Domain name=DUF677; Domain location=140-466; Score= -151.2; E_value=0.0022; Accession=PF05055.3; Description=Protein of unknown function (DUF677)
MGILYKQERVVRFQCGKMDSGKTKRLRPYMFGRSTLQEFQMTVLVGRNQKDLNHNISEFDFDPKLAFGPRTGWDGAAPASSENGSVREILEDGCTIYNNKAGGRVASEQEANTDHSKGSRTIGVVVVLGAQETNLWFVQKKGSMEMPPGSVRGSLGIEEEYRSTLPRQPDAEMEERTTHQQDLVSPVLHGGRTSAWVQLAMADYFDASAEASEMCRQLLRNIKSTQSNYRSMDTFLSSMAADDATTAGEPVARINPFRTTTRGSFRQIHDRYSGVLQSIRAGHRRVARELKVLRAVRRLSRTCLVVACSAAAAAAIGAAAHLLLFGLLIGPAAAAAGGLYPMALKRRTAAARKQSSSRSRTMSSLLRLQEQLDTAAKGTYVLGRDLDTVSHLVARLSDGIERENDMAWRCVGRAGETWPPAALQEVVGELRRSCSVSSRLAEELQDHVCLCLATIQKARVLLIQEINQPAIERESRASMWYPF

SEQ ID NO: 53736 - protein, 253 aa, Zea mays
  Coding DNA Sequence Number=SeqID_11957
  Gene Ontology: Mol. function=metal ion binding
  Homolog annotation: Hit_ID=O80498; Match level="QueryCoverage=64%, HitCoverage=26%, E-value=2e-38, Identity=50%"; Hit description =Putative RING zinc finger protein
VKIRGRPDEDAVLCTPCATYSMKFVGTSNSMFLIPPGEPSAKCLRPDNTSGNANALAATIKLAPGSIELVRVAPRLDKLKSLLRERPYILDEDIGDDDLQHKNKKGLYTWQDLCKLIQASDGELLDALNALSAVDIDGFWRTVDASSVNTILDMILHNSVLRDLAIKGNARKVMCSLSWDLMVLRIISVTDLPLAPAERFAALFRERAKWEWKDLQPYIRDLHVPGASSEGLLIKYTRRSQPNAEAEPIFTAR

SEQ ID NO: 53737 - protein, 371 aa, Zea mays
  Coding DNA Sequence Number=SeqID_11958
  Gene Ontology: Mol. function=DNA binding; Cellular component =chromatin; Biological process=chromosome organization and biogenesis (sensu Eukaryota)
  Homolog annotation: Hit_ID=Q6Z3Y5; Match level="QueryCoverage=86%, HitCoverage=56%, E-value=1e-69, Identity=49%"; Hit description=PWWP domain protein-like
  Pfam annotation: Domain name=AT_hook; Domain location=18-30; Score =13.4; E_value=0.11; Accession=PF02178.9; Description=AT hook motif
  Pfam annotation: Domain name=AT_hook; Domain location=283-295; Score =14.5; E_value=0.073; Accession=PF02178.9; Description=AT hook motif
  Pfam annotation: Domain name=PWWP; Domain location=46-117; Score =17.5; E_value=0.00017; Accession=PF00855.8; Description=PWWP domain
  Pfam module annotation: Pfam domain module=AT_hook::AT_hook::PWWP; Domain location=18-30::283-295::46-117
MSERIDLNNTSQTLAPPKRGRGRPRKNPPPPAHPRPPDPDTPMVSGFAPGDMVWGKKLNHAAWPGLIYSAGGNSTGHEAQLLVSYFGDKAFAWCDAAELRPYEPYFPVAELYDDGGEDFDAAVEASLDEFSRRVEAALASAARPFASADFLASLHDLAADRMGFTNRVQAAVAKAHLRAFDAFRALPDPPQYTLELGLLPHVPLPLPDPKADTDAAAAFTTPASSSRRGRKRKEELVKDDDSDEDWDPSKRGATDLDSDVDFDHRRGSRGRGRGRGGSSGGSGRPRGRPRKTDACRDAPQLKDEDGIQEYPSADEMLLQLLSIATDPVNGNYDSAPVIVSFFSKHKDSKAPSVYEDKELLENFGCKKGNAP

SEQ ID NO: 53738 - protein, 1008 aa, Zea mays
  Coding DNA Sequence Number=SeqID_11959
  Gene Ontology: Mol. function=RNA-directed DNA polymerase activity; Cellular component=mitochondrion; Biological process=RNA-dependent DNA replication
  Homolog annotation: Hit_ID=UPI00005A975E; Match level="QueryCoverage =99%, HitCoverage=58%, E-value=0.0, Identity=88%"; Hit description =PREDICTED: similar to Retrovirus-related Pol polyprotein from transposon 297
  Pfam annotation: Domain name=RVT_1; Domain location=56-225; Score =142.2; E_value=1.4e-39; Accession=PF00078.17; Description=Reverse transcriptase (RNA-dependent
  Pfam annotation: Domain name=RnaseH; Domain location=455-582; Score =5.5; E_value=1.8e-05; Accession=PF00075.14; Description=RNase H
  Pfam annotation: Domain name=rve; Domain location=782-941; Score =123.0; E_value=8.2e-34; Accession=PF00665.16; Description=Integrase core domain
  Pfam module annotation: Pfam domain module=RVT_1::RnaseH::rve; Domain location=56-225::455-582::782-941
MPGIPRDVAEHSLDIRAGARPVRQPLRRFDEEKRRVIGEEIHKLMAAGFIKEVFHPEWLANPVLVRKKGGKWRMCVDYTGLNKACPKVPYPLPRIDQIVDSTAGCETLSFLDAYSGYHQIRMKESDQLATSFITSFGMYCYVTMSFGLRNAGATYQRCMNHVFGEHIGRTVEAYVDDIVVKTRKASDLLSDLEVTFRCLKAKGVKLNPEKCVFGVPRGMLLGFIVSERGIEANPEKIAAITSMGPIKDLKGVQRVMGCLAALSRFISRLGERGLPLYRLLRKAECFAWTPEAEEALGNLKALLTKAPVLVPPADGEALLVYVAATTQVVSAAIVVERQEEGHALPVQRPVYFISEVLSETKIRYPQVQKLLYAVILTRRKLRHYFESHPVTVVSSFPLGEIIQCREASGRIAKWAVEIMGETISFAPRKAIKSQVLADFVAEWVDTQLPTAPIQPELWTMFFDGSLMKTGAGAGLLFISPLGKHLRYVLRLHFLASNNVAEYEALVNGLRIAIELGVRRLDARGDSQLVIDQVMKNSHCRDPKMEAYCDEVRRLEDKFFGLELNHIARQFNETADELAKIASGRTTVPPDVFSRDLHRPSVKIDDAPEPEAPSAQPEASSAQPELEAPSAQPRVPSAPEGEALDVEEELSGATPDRDWQAPYLQYLRQGELPLDQVEARRVARRAKSFVLLGDEEELYHRSPSGILQRCISIAEGQELLQEIHSGACGHHAAPRALVGNAFRQGFYWPTAVADATRIVRTCEGCQFYAKQTHLPAQVLQTIPITWPFAVWGLDLVGPLQKAPGGYTHLLVAIDKFSKWIEVRPLNNIRSEQAVAFFTNIIHRFGVPNSIITDNGTQFTGKKFLDFCEDRHIRVDWAAVAHPMSNGQVERANGMILQGLKPRIYNDLNKFGKRWMKELPSVVWSLRTTPSRATGFTPFFLVYGAEAILPTDLEYGSPRTRAYTDQSNQASREDSLDQLEEARDRALLHSARYQQSLRRYHARGVRSRDL

SEQ ID NO: 53739 - protein, 300 aa, Zea mays
  Coding DNA Sequence Number=SeqID_11960
  Homolog annotation: Hit_ID=Q6QP54; Match level="QueryCoverage=47%, HitCoverage=50%, E-value=2e-22, Identity=56%"; Hit description =Putative kinase
MIASKKGPGKGDTPKRILPREGTRLRASLLIRGSKAGPSEGFNNRLRARGLHTHYWSGVRRPAPRKGSTTASGYSGSAPTTDQRFEGWPPKGLGLGLRPGRRRTLLRPDPRARTRAKTRKTANSAPPDPRARTRAKTRKTANSAPPDPRARTRAKTRKTANSAPPDPRARTRAKTRKTANSAPPDPRARTRAKTRKTANLRLARPQGSDSALASAKRSPPRPTRGLGLGLGNGRQTRPRLRRSPHVALPRAQVRHVNRKRHHQPTPSRLGSRRTRPASHLASSAGWAMMVPPKLCDDGGS

SEQ ID NO: 53740 - protein, 64 aa, Zea mays
  Coding DNA Sequence Number=SeqID_11961
MARIRSIARLINEEGEESIPEMDDVIAEAEHVIAKAASEDKEDDGILSPSKPSHVEFGKSTMKA

SEQ ID NO: 53741 - protein, 84 aa, Zea mays
  Coding DNA Sequence Number=SeqID_11962
MHSDNQSSERLEEAAWVDKWGREESIPWMRGGKATTFLGASRQALAVTNWWRQGARPTVVVAIQVIEHRIGGATVAVAGWGQTT

SEQ ID NO: 53742 - protein, 180 aa, Zea mays
  Coding DNA Sequence Number=SeqID_11963
MAAYTTQAPMKQGQASTGKSQPLSVNRGQVNHVEVEAEPSEPEIQEEVLVEGKEVGEETDRAVFNLFSVMAATESASVGGGYRSWLPLPVADTPSIKWSRRPASRIPGAEAIQSVDSRATYLDPVQSGIEGIARRSRLCAIVHLASWAGVTMVLPLRHRYALLSGEDGSIVANLDFDDRD

SEQ ID NO: 53743 - protein, 96 aa, Zea mays
  Coding DNA Sequence Number=SeqID_11964
  Subcellular localization annotation: CTP_CleavageSite=45; ConfidenceScore=5.33e-01
MKGVSRFGKHSRYNSPDCPVYTGQCPVRQGRAASGTRQLRETPTRAQKSGAPILAHRTANSTCPVCTGHPGGPTSQKLQRSESNGSDDVAGGTGLS

SEQ ID NO: 53744 - protein, 170 aa, Zea mays
  Coding DNA Sequence Number=SeqID_11965
  Homolog annotation: Hit_ID=Q6QP51; Match level="QueryCoverage=57%, HitCoverage=55%, E-value=1e-16, Identity=59%"; Hit description =Putative growth-regulating factor 1
MAPCDVVGLSPRSGEAEAPPRSRSSPSSEVEAESEPWVGRDRDRLSRSRSSPSPRSGEAETVFRGRGCVRALGRARRRPYSEAEAVSEPWGRARRSPSSSIEVESEPWGRARRSFLWRPRLDLAAVSLTLSSGTTVGATQATLFSCQVGQWSGEVTAVTSALSTEERSSG

SEQ ID NO: 53745 - protein, 162 aa, Zea mays
  Coding DNA Sequence Number=SeqID_11966
  Subcellular localization annotation: CTP_CleavageSite=70; ConfidenceScore=5.57e-01
MDRSASAGLGSRGISHNSSGGRSGFGFDRGLLGFGRGRRRTRLGGSPRRNSLVYFGVGVRKGDGGSNEPRSSASPDPRARTQPRRWTTDSASPDPRARTQPRPRKTVSASPDPGLGHGLGRRSPPRPTQGSDSTSTSEDGLRLARPRARTDHVTGGPSLPYP

SEQ ID NO: 53746 - protein, 558 aa, Zea mays
  Coding DNA Sequence Number=SeqID_11967
  Gene Ontology: Mol. function=acyl-CoA binding; Cellular component =intracellular; Biological process=lipid transport
  Homolog annotation: Hit_ID=Q6K9X9; Match level="QueryCoverage=93%, HitCoverage=97%, E-value=0.0, Identity=74%"; Hit description=Acyl -CoA binding protein-like
  Pfam annotation: Domain name=Kelch_1; Domain location=149-195; Score =20.0; E_value=0.0084; Accession=PF01344.15; Description=Kelch motif
  Pfam annotation: Domain name=Kelch_1; Domain location=201-245; Score =7.0; E_value=0.62; Accession=PF01344.15; Description=Kelch motif
  Pfam annotation: Domain name=Kelch_1; Domain location=267-312; Score =18.0; E_value=0.034; Accession=PF01344.15; Description=Kelch motif
  Pfam annotation: Domain name=Kelch_1; Domain location=33-78; Score =46.8; E_value=7.5e-11; Accession=PF01344.15; Description=Kelch motif
  Pfam annotation: Domain name=Kelch_1; Domain location=96-144; Score =10.0; E_value=0.28; Accession=PF01344.15; Description=Kelch motif
  Pfam annotation: Domain name=Kelch_2; Domain location=149-195; Score =38.8; E_value=1.9e-08; Accession=PF07646.5; Description=Kelch motif
  Pfam annotation: Domain name=Kelch_2; Domain location=200-248; Score =14.3; E_value=0.44; Accession=PF07646.5; Description=Kelch motif
  Pfam annotation: Domain name=Kelch_2; Domain location=267-312; Score =12.1; E_value=0.96; Accession=PF07646.5; Description=Kelch motif
  Pfam annotation: Domain name=Kelch_2; Domain location=33-78; Score =40.3; E_value=6.7e-09; Accession=PF07646.5; Description=Kelch motif
  Pfam annotation: Domain name=Kelch_2; Domain location=96-144; Score =9.5; E_value=2.1; Accession=PF07646.5; Description=Kelch motif
  Pfam module annotation: Pfam domain module=Kelch_1::Kelch_1::Kelch _1::Kelch_1::Kelch_1::Kelch_2::Kelch_2::Kelch_2::Kelch_2::Kelch_2 Domain location=149-195::201-245::267-312::33-78::96-144::149
MGKGISGDARLAAAPYDQWVLLSPAGGSPRPPARYKHAAQVVQDKLYVVGGSRNGRSLSDVQVFDFKTSSWSALSPARGSKHPNHENDATGGSFPALAGHSMVKWKNYLLAVAGSTRSSSSLNKVSVWLIDVQANSWSAVETYGKVPTARDGQSVSILGSRLLMFGGEDNKRRLLNDLHILDLETMMWEEVKSEKGGPAPRYDHSAAVYADQYLLIFGGSSHSTCFNDLYLLDLQTGRTPFRCLKETAVCHKLEWSQPDAQGAHITPRSGHAGAMIDENWYIVGGGDNASGSTDTVVINASKFVWSVVTSVSARDPLACEGLTLCSTTVDGEKVLIAFGGYNGKYSNEIFVLKSKPRNLVQPRLLQSAAAAAAAASVTAAYAVITATDEKTRDIVATDDFDIKRAQPASNSKKFVAEIDVLNGENGKLAARLAEVRDENSKLKDKLDMTNLSYGELAKELKSVQDQLAAEGSRCQKLESQIAAARKRLESAGSLENELEVLHQHISQVEETIATTQRRKSGGVWNMLGWNNALCTQGFRYSCSFIFSISHDLFGQKLV

SEQ ID NO: 53747 - protein, 487 aa, Zea mays
  Coding DNA Sequence Number=SeqID_11968
  Gene Ontology: Mol. function=catalytic activity; Biological process =metabolic process
  Pfam annotation: Domain name=AMP-binding; Domain location=114-468; Score=-40.6; E_value=7e-06; Accession=PF00501.18; Description=AMP -binding enzyme
  Subcellular localization annotation: CTP_CleavageSite=78; ConfidenceScore=5.59e-01
MGLMTVLGLARLASASSPSLALTPSPTGQTSADSTTRALACPLLPCPCFKFKGTPHQRRSNRLRRRTRARMEEILLPVAAHDAAAFVLSRLPHPGTAAADAAAFVDAATGASLSFSALRRAALSLASALRLGLGLRRGDAVLVLARDSLLLPQILLGVLAAGAVVAVTDTDATPAEVAAAARASAAVMVVAAPDLAAKLSLDAGAAVGLPPLLLTSRSPEDPAALSAEELIDGGDPVAAEAVAVSDSDVAFLAYPSARATAAVAMTHADLVAAMAHVVADDGRVCLASLPMCSAHGLPLVALGLPAAGVTTVLMPPPSSQSGTKAAREAVAVHAATDFVATPEVAVAALTAPVPLDGKLSSLRRVIVAPTPLAPGAREEFRRRLPWVQLTQLSGTPENQTEMLSLPPEAKQPASRSSIRDKRGCLLGATTEEDKQDYFGRHIFEINHEQDLEEAPGNWQQTSCLKTVADPPLTFPVRKLLVNLMKHD

SEQ ID NO: 53748 - protein, 132 aa, Zea mays
  Coding DNA Sequence Number=SeqID_11969
MLFPRRINYQQQEEAAVAQMLANMVMVILPSLEVKPGSIVKCEPGYGFMMHLSQAKLVATENRLKQVQEMQSNCDKGLKHMSCEAPLLGPMAELWKLKNPDISKSEWAVQATTASIYSTCNMVMRTENVSCF

SEQ ID NO: 53749 - protein, 240 aa, Zea mays
  Coding DNA Sequence Number=SeqID_11970
MVRLYRYNLASYIAQGGVRCGFMPSEGSVMQTIVVVQGNEMFAVHRLVKPHLVINTVLVVFYLFLLVFLIALGGISLHGEASEGKAAKKTVNDDMEDDKCEYDEESPSGRATSPKKKRTKCFEKKILAAQEQGKGSATTTLSIGYTRILEVMSRPLPFSTLSLLGLELTRMLMTVKGTDDGGQALTTTKGKGPLFEEEVHNPHIQSHAYAVYGVSSTEDEKDEEKGAKGDGSSRHEKLVK

SEQ ID NO: 53750 - protein, 123 aa, Zea mays
  Coding DNA Sequence Number=SeqID_11971
MVRTQGDLGPTAAELRLQGEEAGEHRSGELEVLGANQEVSHIAGEGAELTEATGAAETRRWTTTSFTGAPAERERERGCLVEGATELGRARECVWALEMARPRGGMIGKHAVVGASTVESACG

SEQ ID NO: 53751 - protein, 179 aa, Zea mays
  Coding DNA Sequence Number=SeqID_11972
MAGGQGSRGKRRSSKGKRKRPLSPPSEDFGGSKFSEDSSEEEEEDSSDFEEGSGEVDSDGGACGGGSGDGGDGDAEGDDDGNGDDSNGGGDGDGDNASGKMPPVIEMEPRKRKQGVTMLDIPPVDPNSQLPFYGVNDPSQVTNKQISEENVLSRVDLMLREALFRVRVQPTHSRREPRL

SEQ ID NO: 53752 - protein, 94 aa, Zea mays
  Coding DNA Sequence Number=SeqID_11973
MGRWLSNDEEMKKGGEMVEGNAANLPELSNGGDEQRTAQRKVDRSTASASGRPLRRQTASAAPIGVIRQRRLQRNGGDLVAGQKGSLARGPTQL

SEQ ID NO: 53753 - protein, 181 aa, Zea mays
  Coding DNA Sequence Number=SeqID_11974
  Homolog annotation: Hit_ID=Q6QP51; Match level="QueryCoverage=24%, HitCoverage=26%, E-value=3e-08, Identity=56%"; Hit description =Putative growth-regulating factor 1
MALGPVVSDCFHEHIWLIVEGNVLDIRQGSSHYIIRDTVVWFEYFSCLLFYGSIGATSLRRDCASFAIANNTSGATGSSASPDLGHRPQEEISASPDPRARPPTSASKVVSASPDPRARASTSALEGGLRLAQPQGSASTSISGGIASSPDPGLGLRRSLRLARPWARTDRVTRDTSLPYP

SEQ ID NO: 53754 - protein, 174 aa, Zea mays
  Coding DNA Sequence Number=SeqID_11975
  Subcellular localization annotation: CTP_CleavageSite=79; ConfidenceScore=5.25e-01
MTLGSTASPDLGPQPQEEVSALPDPRARPPPRPRKVVSASPDPRARPQPRPRKVVSALPDPRARPQPRPREESRPRPTPASASGGFSASLDLGLGPIAPRGIHHYPTPSYLRLRGNKTGVPSRLAPMDKKTKVIVCVAAAHKLLSMMAMIIHSRKRKRNARRIGITYAPMHERD

SEQ ID NO: 53755 - protein, 116 aa, Zea mays
  Coding DNA Sequence Number=SeqID_11976
MQDAARRALSQYCLLFSGVDDGLDLKYYPRRSTDSTGGVIVSPVGGGNLRLNSMVHLAAVLNTKLDHALDELGKMSENRSRGARRAHPEQQAPQEDAAQQQLPAPPPMTVEQMFMM

SEQ ID NO: 53756 - protein, 74 aa, Zea mays
  Coding DNA Sequence Number=SeqID_11977
MGRGYRCWENEARGGTRTRAGVSPAARLQRAHGERRGEEIQGRRRLQNLIVNTKETYQRESPEKKRDARDSSAT

SEQ ID NO: 53757 - protein, 204 aa, Zea mays
  Coding DNA Sequence Number=SeqID_11978
MGGRQGRRRASAACCVCRRRRRGELLCREDQAPWGEEEESHWGKGALAQGWRVDVLGTSQGRDGEARHHGEFGEAAVAPRIEEGAGHHESRGAEQIARTEGVHAHGWRGGAVAPCAEPDRRGARRPPWGGENAGGAFGAPASEQREAWLHGRNTRAWKKGRKGSAHPDAGVREQWKSCPGCSSVEGGRRQGYASTLRAPLDAWK

SEQ ID NO: 53758 - protein, 186 aa, Zea mays
  Coding DNA Sequence Number=SeqID_11979
MGGWRVSVHFGFTGETFVGRLLRTIWEGNHGTEVLLPGRVGIRQAPWEKGRNPDRGKGRLHRDGGRACWARHSGATEKLDTMGTSMRLKWRPAPRTEEGVGHHGSRGAEQRARREGVRAHGWRGGAAAPCAEPDRRGARRPPWGGENARGWPSELRRPSRGKPGSMGGTHAPRRRRGKALRILMLA

SEQ ID NO: 53759 - protein, 186 aa, Zea mays
  Coding DNA Sequence Number=SeqID_11980
  Subcellular localization annotation: CTP_CleavageSite=45; ConfidenceScore=5.60e-01
MGAHPLPASSLLGSPTPMVSNAFLCPRRRAPLQPHRSPHGVELLRRAAVTCPARPPSIPVQAPLSPIGIPPLLPKAPRLLPTSAQAAGARFHACPWPNSPTEAPHDAFFCKRSKQQTPSSSLVGLPWRYCPLGVLAAVPSRSPVLPSSTLHDAHSLALILATACATAWPSASPSSENLPPTLASAR

SEQ ID NO: 53760 - protein, 130 aa, Zea mays
  Coding DNA Sequence Number=SeqID_11981
MTEEGKNLATERRPESPPRCNCGNRAVICEDTMNYFVCPDINYSSCMVLHDIGERQRQRRIKRMSVRKSASLVLYYANVVLKLMEKDDNTSRLSELIALVEARLHAQQQEDEFMSRAADEAEAAYYKAEG

SEQ ID NO: 53761 - protein, 90 aa, Zea mays
  Coding DNA Sequence Number=SeqID_11982
MRANSRPTTPGELRRGHPRWARTAVRIRNARLRKVARLMAKLIGLNGRGIGYQISFPRASTRKNNAESRIDAKVQDNNADSRMGANMPAN

SEQ ID NO: 53762 - protein, 148 aa, Zea mays
  Coding DNA Sequence Number=SeqID_11983
MERGELVLASDRERGKWRRDDSGWNWEAAVDGRTRQSGAAPDSVRCASHVTRPLGFDRWSSDWWGRLAVRWCTGQVTVGAVVAVASAGTPDSLVNYSGAPLEIPEGSEFGFDRLGAPATVRCARPGCLPGCLLLYCLNPFLGLFIGLL

SEQ ID NO: 53763 - protein, 175 aa, Zea mays
  Coding DNA Sequence Number=SeqID_11984
MMHATTVPSRCLPTPDGIHIRQKYKMTLGHKLCLAQSQPHPRDKLCFARSPASATCSIRIPREATPSTVTRGLGYVTEPLALASALSRNQVSPPSISQQQVQDPCFRQYHLQGLGFAFSPAFSRPYQDKQLVSPCITYLAKAHIIISLVVFGLLFQLKKAAMETMAPKTGVNQDF

SEQ ID NO: 53764 - protein, 1042 aa, Zea mays
  Coding DNA Sequence Number=SeqID_11985
  Gene Ontology: Mol. function=ionotropic glutamate receptor activity; Cellular component=membrane; Biological process=ion transport
  Homolog annotation: Hit_ID=Q6K4P7; Match level="QueryCoverage=88%, HitCoverage=94%, E-value=0.0, Identity=56%"; Hit description =Putative glutamate receptor subunit kainate subtype
  Pfam annotation: Domain name=ANF_receptor; Domain location=116-469; Score=199.1; E_value=1.1e-56; Accession=PF01094.18; Description =Receptor family ligand binding region
  Pfam annotation: Domain name=Lig_chan; Domain location=645-904; Score= 201.0; E_value=2.9e-57; Accession=PF00060.17; Description=Ligand -gated ion channel
  Pfam annotation: Domain name=SBP_bac_3; Domain location=536-861; Score=-43.7; E_value=3.5e-05; Accession=PF00497.10; Description =Bacterial extracellular solute-binding proteins, family 3
  Pfam module annotation: Pfam domain module=ANF_receptor::Lig _chan::SBP_bac_3; Domain location=116-469::645-904::536-861
MALDYSFAAWFVVGNVWIFGGSSCAADAPNLYRYAAFVLQSMRRMMSSVNFHLHTVFHKECVDKWLKINALCPLCKSEIARARLASLPVGAAQAQAQPAPVRVGVILNLTSAVGQRRKVGIEMAVGDYYAARPAASRTRVVLSFRDSAGDVVGAASAAVDLIKNEQVQAIIGPQTSAEAEFVAYLGNRTHVPVLSSSATSPVLSPSQTPFFVRTAANDSYQAAPVAAALAALGWHAAAVVYEDSPYGSGILPALAGALQGVGARIAGRAAVPSGADDDRVDAVLYGLKAMPTRVFVVHMSALPAARLFRRARRAGMMTEDYAWVATDGVGGVVDALGPDDIGAMDGVVSLRPFVRVTERVSNFSARFRARLRREHPSADIYPHDPTVVMLWSYDTAWAIAAAAGVSSPTFQTSQQSAGVTDLDRLRVSATGAALLKAVRETTFRGLAGNFTLVDGQLQPPAYEFVNIVGKSSRAVGFWTPEAGITQTLGAEAAKKGLKKILWPGDSTSVPRGWVVSPNGRKLRVAVPVKHGFKEFVDVAGESTTGGHANVTGYCIEVFDAVMSKMPYPVSYEYVPFPYSSSSYDSLVSLVPRQIADIVVGDVTITASRMGSADFSMPFTDSGWSMVVAVRTETSTSMWIFLRPLTTSLWLASLAFFCFTGFVDQPEFRGTPWQQFGLIFYFAFSTLVFSHKEKLESNLSRFVVIIWVFVVLILTSSYTASLTSMLTVQKLQPAVTDVRELQRTGAYIGYQEGSFIKNSLKKLGFHEAKMRSYSTAGEYADALSKGPANGGVAAVFDEIPYLKLFLSQYCDGYTMFGPVYKTDGFGFVFPIGSPLTPDVSRVLLTLAEGEKMAQIEKKWFGEPGACPSQGAAALGSSNLSFRSFGGLFLITGVVSSLMLLVYLATFIYQERGEVRPEPEEEGSGSSSSVRRLRAWLRHFDQKDLKCATFRTGDHDSVRDGGNQTQRWAESVRYGRGGNGSVQAAIEEEAVAMGMSPLRFGTSTPSETMNAGSSPASEFGTSFEQRMQEAPHSVSVEMPRSTPS

SEQ ID NO: 53765 - protein, 540 aa, Zea mays
  Coding DNA Sequence Number=SeqID_11986
  Gene Ontology: Mol. function=L-isoleucine transporter activity; Cellular component=integral to membrane; Biological process=amino acid transport
  Homolog annotation: Hit_ID=O80668; Match level="QueryCoverage=87%, HitCoverage=87%, E-value=1e-165, Identity=60%"; Hit description =Expressed protein
  Pfam annotation: Domain name=Aa_trans; Domain location=150-534; Score= 186.1; E_value=8.3e-53; Accession=PF01490.8; Description =Transmembrane amino acid transporter protein
  Pfam annotation: Domain name=Spore_permease; Domain location=147-474; Score=-177.0; E_value=0.092; Accession=PF03845.4; Description=Spore germination protein
  Pfam annotation: Domain name=Trp_Tyr_perm; Domain location=156-527; Score=-242.3; E_value=0.0016; Accession=PF03222.4; Description =Tryptophantyrosine permease family
  Pfam module annotation: Pfam domain module=Aa_trans::Spore _permease::Trp_Tyr_perm; Domain location=150-534::147-474::156-527
MAPEKPRKEQEEELMLEDGGIEESPRRSFEDCGDSEEDRGEGDDEEERDSDRDGVGSTRSFLPQKWPQSYRETTDTYTIAASPSFGYLGSSTSKYSLLDLGRSILGSDLKSPLISAKADSVRNLPKTLGSMRDGRVSFQLQHTGEIYISQGCNVTQTVFNGINVLAGVGLLSTPFTIHEAGWTGLAVLACFAIVCCYTGILLKHCFESKDGISSYPDIGEAAFGRIGRVLISIILYTELYSYCVEFIILEGDNLTSIFPKAGFDWLGIHVDGKHFFGVLTAILVLPTVWLRDLRVLSYLSAGGVIATLLVFLSVGLVGVTDGIGFHSTGKAVNWSGMPFAIGIYGFCYSGHSVFPNIYQSMSDRSKFPKALFICFAICTAIYGSFAVIGFLMFGKNTLSQITLNLPKHSFASEVALWTTVINPFTKFALLLNPLARSLEELRPEGFMNETSCAIILRTALLASTVCIAFLLPFFGLVMSLIGSLLSILVAVIMPPLCFLKIAQNKATCAQVIASICIVMLGVISAALGTYSSVKKIVENY

SEQ ID NO: 53766 - protein, 269 aa, Zea mays
  Coding DNA Sequence Number=SeqID_11987
  Gene Ontology: Mol. function=DNA binding; Cellular component=nucleus; Biological process=RNA-dependent DNA replication
  Homolog annotation: Hit_ID=Q9LGH0; Match level="QueryCoverage=72%, HitCoverage=54%, E-value=1e-47, Identity=47%"; Hit description=NAM -like protein-like
  Subcellular localization annotation: CTP_CleavageSite=64; ConfidenceScore=5.18e-01
MDPEIVDSLMPPSAAPSSSNLTPTSHDFEHISPNVPSSRPNQKRSGNFTQEEDTLVVSAWLNISLDAVNGTNQTRGTFWKRVYNYFHTNKTFDSARSQSSISHRWGSILEAVNKFCACISDIEGRRQSGVTLQDKIVQAMTLFKSRDKDNKSFQFMHCWNILRNQPKWHEKRKQMEEIKKVSHKKRKTNVDSIPGICTQISEDSSNCNIVNENTRAEDEPPKRPSGIKKLKKHNVEVDPILTWRLLSISGIKRKSWMLKKKRKKRIDSN

SEQ ID NO: 53767 - protein, 47 aa, Zea mays
  Coding DNA Sequence Number=SeqID_11988
MAHMSRAQSPLPAQVLRPAAIRSIEDLEDLRLESFSDVAVVAPSRAL

SEQ ID NO: 53768 - protein, 781 aa, Zea mays
  Coding DNA Sequence Number=SeqID_11989
  Gene Ontology: Mol. function=protein serine/threonine kinase activity; Cellular component=ubiquitin ligase complex; Biological process=protein amino acid phosphorylation
  Homolog annotation: Hit_ID=Q8W1D3; Match level="QueryCoverage=94%, HitCoverage=92%, E-value=0.0, Identity=64%"; Hit description=Serine threonine kinase
  Pfam annotation: Domain name=Pkinase; Domain location=461-725; Score =117.2; E_value=4.6e-32; Accession=PF00069.15; Description=Protein kinase domain
  Pfam annotation: Domain name=Pkinase_Tyr; Domain location=461-725; Score=85.7; E_value=1.4e-22; Accession=PF07714.7; Description =Protein tyrosine kinase
  Pfam annotation: Domain name=Usp; Domain location=17-176; Score=33.1; E_value=9.7e-07; Accession=PF00582.16; Description=Universal stress protein family
  Pfam module annotation: Pfam domain module=Pkinase::Pkinase_Tyr::Usp; Domain location=461-725::461-725::17-176
MGRYSDGKDSGETGGGSYPLVAVCIDKDKNSQNALKYATETLAHRGQTIVLVHVNTKGTSGEHHPSSPCRGEHRPCQLRSRGVADAAGYKQPTDPQMKDLFLPFRCFCTRKDIHCKDVVLDDHDVAKSVVEFAAHGAVEKLVVGASARGGFVRFKAEICNTISKSAPDFCTVYVVSKGGKVTSVRQAVRQAPAVSPLRTMIHGPKPEPEPVHAQKWTPPPPPPAVQDNHIMSPFARTTGHSAGSARKAFPDFSLPESSDISFIGSAPRRSTERYPPRLSSGSDGVDQQQQHSFEASRTPSRWGDSFGNDSTSHSQTSTSSWCSQPPDEMEAEMKRLRLELKQTMDMYSTACKEALSAKQKALELQRWKMDEEQRSQETRLTEESAMALIEQEKAKARAAIEAAEASQRLADLEAQKRISAEMKALKEAEERLRSMAAGARESAVRYRRYTIEEIEIGTDRFNEARKVGEGGYGPVYKGHLDHTPVAIKVLRPDAAQGRSQFQQEVEVLSCIRHPNMVLLLGACPEYGCLVYEYMANGSLDDCLFHRGGGGPVLPWQHRFRIAAEIATGLLFLHQAKPEPLVHRDLKPGNILLDRNYVSKISDVGLARLVPASVADNVTQCHMTSAAGTFCYIDPEYQQTGMLGVKSDVYSLGVMLLQLVTARSPMGLTHHVGRALERGTFADLLDPAVHDWPMDEAHRFAEVSLRCCELRRKDRPDLATVVLPELNRLRALGEDSMDSCTTMSGRGGMHSSSSAFHGNPYSQPRHVIKATPSSSLQNRRFL

SEQ ID NO: 53769 - protein, 246 aa, Zea mays
  Coding DNA Sequence Number=SeqID_11990
MSFVCPTQRNTVSLDVTFAETVCHPACTWFDATRALPRPPSESESPAGLSELWTLNKPRPGARCQAAQPLLAAQTGPVELSPPSPHAADGGQEGSIRRTSGRQKPRRERDPTGWPRRLQATTFHGFALCAPGGAERRHGDHVERAKRTRCAAVPGTVPRLRTVQPLLLRATVWHGHGCHVTELQILAWSAGPPACGLPGCRSAMRRPCTGCRNKVRRLAAFTSPASSSSHECVAGEHTRMSHVYSS

SEQ ID NO: 53770 - protein, 52 aa, Zea mays
  Coding DNA Sequence Number=SeqID_11991
MAGLMMFTLFLWLCRLLLLGLRLRDSERRRRFGGTYSERSFFGIIYLMIVET

SEQ ID NO: 53771 - protein, 99 aa, Zea mays
  Coding DNA Sequence Number=SeqID_11992
  Subcellular localization annotation: CTP_CleavageSite=50; ConfidenceScore=5.25e-01
MSGAHRTVRCPLPTVGSATCPAQNARPTVGPADRWLTGQSGAHRTVRTVRARIVVGGKNSCNNSQEEKNGKRAGHCHGDDKGFNSYPREEGYRNCYDSC

SEQ ID NO: 53772 - protein, 194 aa, Zea mays
  Coding DNA Sequence Number=SeqID_11993
  Gene Ontology: Mol. function=helicase activity
  Homolog annotation: Hit_ID=Q10RG1; Match level="QueryCoverage=99%, HitCoverage=24%, E-value=4e-33, Identity=38%"; Hit description=RNA helicase SDE3, putative, expressed
MPSFKVGSVEQFQGQEREDRHWDRLLRYCADNGSYQGCPLPPPESPYSDDARFFSKYDEDQGGPSGQDYSQEPAYCNYNQEPAYCNYDDQEPSDFGSGHDTGVAQPEPASENQESWSEELPEDESQPFSNPQADVEETPKQDGEEGAAAAQGDAQADQSLTNDDSQLQDAGAGKYTFPPGWCDVSSIPATGWGD

SEQ ID NO: 53773 - protein, 775 aa, Zea mays
  Coding DNA Sequence Number=SeqID_11994
  Gene Ontology: Mol. function=protein serine/threonine kinase activity; Cellular component=membrane; Biological process=protein amino acid phosphorylation
  Homolog annotation: Hit_ID=Q9FPR5; Match level="QueryCoverage=97%, HitCoverage=85%, E-value=0.0, Identity=76%"; Hit description=EDR1
  Pfam annotation: Domain name=Pkinase; Domain location=597-772; Score =69.3; E_value=1.2e-17; Accession=PF00069.15; Description=Protein kinase domain
  Pfam annotation: Domain name=Pkinase_Tyr; Domain location=597-775; Score=34.9; E_value=1.3e-14; Accession=PF07714.7; Description =Protein tyrosine kinase
  Pfam module annotation: Pfam domain module=Pkinase::Pkinase_Tyr; Domain location=597-772::597-775
MGTKIYTFVGNQGMQKPRLKKEEADYNFLDYHEKVIDGFYDIFGSSIESSRQGKMPSLADLQTGIGDLGFEVIVVNRAIDSTLQEMEQVAQCILLDFPVANIALLVQRIAELVTDNMGGPVKDANDMLTRWLEKSTELRTSLQTSLLPIGCIKIGLSRHRALLFKILADSVGIPCKLVKGSNYTGGDDDDAINIIKMDNEREFLVDLMAAPGALIPADILSWKGNSLNSNRKLGLNRTAGSSSTVDANVDPTVLPLEPKGGQLPLFSSGDWMSDIDSGYEAAEIAASTQTSSGVTPSVSAGSVFGSSWMLVNHDQSDGPSTSAGTSSQQKVVPQSEHQRNLNRLPDLQEIPESKYLFADLVPSGDNKSKKTSVPFKGPDHRNNELQKRRENIVPNAGRPQQRLVMKNWSPYNDVSNNKQYNYVEDSFARRNVGNNAASSSSQMPRPAVRSNLNSGLHNDASYHNYDSIMAGTSAMKITSTAETGKVPERVLRGDLDKGQTNYRLEDQHVIVQPPQGRLPWGNPAEGRVPMNRVQSQAKQHLENMDAKQDHKKLLPDPKKSPLDRFMDTSLPSRNMDMRSQRLDFDDVSECEIPWEDLVIGERIGLGSYGEVYRADWNGTEVAVKKFLDQDFYGDALDEFRSEVRIMRRLRHPNIVLFMGAVTRPPNLSIVSEYLPRGSLYKILHRPNCLIDEKRRIKMALDVAKGMNCLHTSMPTIVHRDLKSPNLLVDNNWNVKVCDFGLSRLKHSTFLSSKSTAGTPEWMAPEVLRNEQSNEK

SEQ ID NO: 53774 - protein, 43 aa, Zea mays
  Coding DNA Sequence Number=SeqID_11995
MGMGGIGPFDLKRWLRLIYWDRGSITFFVILSTLGEDSCVATE

SEQ ID NO: 53775 - protein, 48 aa, Zea mays
  Coding DNA Sequence Number=SeqID_11996
MGCAGPNDGEMKLPPRQLSPSRERLGVAPNRPSISHCVARGLQDESHR

SEQ ID NO: 53776 - protein, 535 aa, Zea mays
  Coding DNA Sequence Number=SeqID_11997
  Homolog annotation: Hit_ID=Q60D20; Match level="QueryCoverage=37%, HitCoverage=76%, E-value=1e-30, Identity=37%"; Hit description =Putative TPR domain containing protein, identical
  Pfam annotation: Domain name=DUF793; Domain location=227-526; Score= -225.9; E_value=0.026; Accession=PF05633.2; Description=Protein of unknown function (DUF793)
  Pfam annotation: Domain name=TPR_1; Domain location=163-196; Score =5.8; E_value=1.1; Accession=PF00515.18; Description=Tetratricopeptide repeat
  Pfam annotation: Domain name=TPR_1; Domain location=197-230; Score =25.0; E_value=0.00026; Accession=PF00515.18; Description =Tetratricopeptide repeat
  Pfam annotation: Domain name=TPR_2; Domain location=163-196; Score =14.0; E_value=0.55; Accession=PF07719.7; Description=Tetratricopeptid e repeat
  Pfam annotation: Domain name=TPR_2; Domain location=197-230; Score =30.1; E_value=8e-06; Accession=PF07719.7; Description=Tetratricopepti de repeat
  Pfam annotation: Domain name=TPR_4; Domain location=127-152; Score =13.5; E_value=0.79; Accession=PF07721.5; Description=Tetratricopeptid e repeat
  Pfam annotation: Domain name=TPR_4; Domain location=197-222; Score =8.6; E_value=3.5; Accession=PF07721.5; Description=Tetratricopeptide repeat
  Pfam module annotation: Pfam domain module=DUF793::TPR_1::TPR_1::TPR _2::TPR_2::TPR_4::TPR_4; Domain location=227-526::163-196::197 -230::163-196::197-230::127-152::197-222
  Subcellular localization annotation: CTP_CleavageSite=34; ConfidenceScore=5.48e-01
MAMAMPMAVARVTSLACAPRQAQHRRRHSLAPPCASGAVEVRVCTNRTCARQGGREVLAALAGLAPPAVDVASCGCLGRCGAGPNVAASVPGSAAVFGHVGTAARGAQLLEHLLGPAEFDAALGLTALATREKAEAALEKGNADEAEALLTEVIGFNACGGLHLVYMSRSKARLEIGDIPGALGDAEEAIRIAPRFPQAHLLRGDALFAMGEYSVAEDAYADALDLDPSIRRSKSFRMFLADKYSSLLPFHHHHSKPSRRQQQKGEAHRFGTALAARLRGLLPLPASPLAALVRVADLLALTLAEAGPALACSGEGAAVAAHLDAGVALLDACNAIAARLDGLRRRRLLASLALHLLLSSTSPSGRTRARAALADRDPPAPPPLPWLPFEQPRGQLTAAARVLAAVDAVSSLAAAAAATVLAGGPATFPWVSGSGGDLPWAEPFNALSGQLAALGAGEVRAVDEAVRRLASALDSGTDNEGAVRAAAQEVGRRTEELAPRLDRLSDAVGGVFRAALGLRNAELGCLMVGPAGKPV

SEQ ID NO: 53777 - protein, 305 aa, Zea mays
  Coding DNA Sequence Number=SeqID_11998
  Gene Ontology: Mol. function=hydrolase activity; Cellular component =membrane; Biological process=metabolic process
  Homolog annotation: Hit_ID=Q6ZDS0; Match level="QueryCoverage=85%, HitCoverage=81%, E-value=1e-107, Identity=76%"; Hit description =Putative CfxY protein
  Pfam annotation: Domain name=Hydrolase; Domain location=50-269; Score= 95.5; E_value=1.6e-25; Accession=PF00702.16; Description=haloacid dehalogenase-like hydrolase
  Subcellular localization annotation: CTP_CleavageSite=40; ConfidenceScore=5.62e-01
MPSTSLAVPTGAVGVAGSRRYPFISNRSASSAPRLRRAPRLVMVSASASLEALIFDCDGVILESEHLHRQAYNDAFANFGVRCPPGSARPAVLGRGPSTTTYRTASAEGSPRCGGTYFGENGWPPSKIFETPPSTDSDKEKLVDIIQDWKTERYKEIINSGTVKPRPGVLQLMDEVKDAGIKLAVCSAATKSSVIMCLENLIGLERFNGLDCFLAGDDVKLKKPDPTIYITASEKLGVESKNCLVVEDSVIGLQAAKGAGMSCIITYTPSTASQDFKDAIATYPDLNNVRLEDLKLLLQKTLVTG

SEQ ID NO: 53778 - protein, 145 aa, Zea mays
  Coding DNA Sequence Number=SeqID_11999
MEVELPSTGNRGGNENALGCPRESREIPLAFRASSGGVVADLQSAGAAAVRGTVDGSASAGQTGVIFTTEIKKKGKHGSLASGRVPLNMDRQQPWEPWQLHSQVQATASSASADGFRTWQLHGAGAELRRAIAMFEIHLRLRCSP

SEQ ID NO: 53779 - protein, 147 aa, Zea mays
  Coding DNA Sequence Number=SeqID_12000
  Gene Ontology: Mol. function=nucleotidyltransferase activity
  Homolog annotation: Hit_ID=Q6R3K4; Match level="QueryCoverage=55%, HitCoverage=11%, E-value=8e-16, Identity=63%"; Hit description=Metal- nicotianamine transporter YSL8
MWPLSSSAEGRLMVWYLADLKPSSRSSSGIVSYRVRKQETVGKIQVQPGFLQIHPSNPPPTSRWALAMAMAIPFYLGPYFVIGSLVRLVWDRLDPGRVKALVPPVASGLICCGDGIWTLPQSVLAAWRSAARRRQASHLHEVPVPQT

SEQ ID NO: 53780 - protein, 1212 aa, Zea mays
  Coding DNA Sequence Number=SeqID_12001
  Gene Ontology: Mol. function=magnesium chelatase activity; Biological process=chlorophyll biosynthetic process
  Homolog annotation: Hit_ID=Q10M50; Match level="QueryCoverage=75%, HitCoverage=99%, E-value=0.0, Identity=81%"; Hit description =Magnesium-chelatase subunit H family protein, expressed
  Pfam annotation: Domain name=CobN-Mg_chel; Domain location=588-1212; Score=452.7; E_value=4.8e-133; Accession=PF02514.7; Description =CobNMagnesium Chelatase
  Pfam annotation: Domain name=DUF689; Domain location=4-242; Score =228.5; E_value=1.5e-65; Accession=PF05093.4; Description=Protein of unknown function (DUF689)
  Pfam module annotation: Pfam domain module=CobN-Mg_chel::DUF689; Domain location=588-1212::4-242
MSAALAVTDEVALPIRAVGDLAAAAEVSREEVAVITQCAALVIKNVESLREQLVAEIRRVLKAGGRVLVQSPAPSSSQKPNTDIERKLLMGGFAEVQSSAASSQDSVQSVTVKAKKASWSMGSSFPLKKTTKALPKIQIDDDSDLIDEDSLLTEEDLKKPQLPVGRATKPVNLVQLPKKACKNCTCGRAEAEEKVGKLELTAEQINNPQSACGSCGLGDAFRCGTCPYRGLPPFKPGEKPGCLFLIETKDVDTDNLYIFPPPALPCSLLLLSLLCFRGTAAAKNNCPATSQEQAPYSSAMSSSLVSTPFAAAAQKQLLAAPVPLHSFLLSSRRQQPRRAGAIRCAVAGGNGLFTQTKPEVRRVVPADPRGLPRVKVVYVVLEAHSSTLTRAAPRRSRSWATFRADLADVNVFIGSLIFVEELALKVKAAAEKERDRMDAVLVFPSMPEVMRLNKLGSFSMSQLGQSKSPFFQLFKRSKSNSSNFADSMLKLVRTLPKVLKYLPSDKAQDAWLYILSLQFWLGGSADNLQNFLKMIAGSYLPVLRGAGIKYDDPVLYLDSGIWHPLAPTMYEDVKEYLNWLKDPNAPVIGLVLQRSHIVTGDDGHYVAVIMELEARGHIVWGAKVIPIFAGGLDFSGPTQRYLVDPITGKPFVNAVVSLTGFALVGGPARQDHPKAIAALQKLDVPYIVALPLVFQTTEEWLNSTLGLHPIQVALQVALPELDGKSHALHRRVEQLCTRAIRWAELKRKTKEDKKLAITVFSFPPDKGNVGTAAYLNVFSSIYSVLSDLKKDGYNVEGLPDTPEALIEEVIHDKEAQFNSPNLNVAYRMNVREYQALTSYASLLEENWGKPPGHLNSDGENLLVYGKQYGNVFIGVQPTFGYEGDPMRLLLSKSASPHHGFAAYYTFVEKIFQADAVLNFGTHGSLEFMPGKQVGMSDACYPDSLIGNIPNIYYYAANNPSEATVAKRRSYANTISYLTPPAENAGLYKGLKQLAELISSYQSLKDTGRGPQIVSSIISTAKQCNLDKDVPLPEEGEELPPSERDLIVGKVYAKIMEIESRLPPCGLHVIGEPPTAIEAVATLVNIAALDRPEDGIISLPGILAATVGRDIEDVYRGSDKGILADVELLRQITEASRGAITAFVEKTTNSKGQVVNVANNLSNILGFGLSEPWVQYQDNELGSGRGYWETSEENLDRLRELYSEVEDKIEGID

SEQ ID NO: 53781 - protein, 197 aa, Zea mays
  Coding DNA Sequence Number=SeqID_12002
  Gene Ontology: Mol. function=magnesium ion binding; Cellular component=membrane; Biological process=photosynthesis, light harvesting
  Homolog annotation: Hit_ID=Q9XQB6; Match level="QueryCoverage=91%, HitCoverage=70%, E-value=2e-95, Identity=92%"; Hit description =Chlorophyll a/b-binding protein CP24
  Pfam annotation: Domain name=Chloroa_b-bind; Domain location=15-186; Score=67.7; E_value=3.8e-17; Accession=PF00504.12; Description =Chlorophyll A-B binding protein
MELEADRDAAAATLQAPWRLRVRSAGAGQGPGVPQVVPGGGADPWAVGDGRRAGHLRGAGLERHPVVEAGADPGAIAPFSFGSLLGTQLLLMGWVESKRWVDFFNPDSQSVEWATPWSRTAENFANFTGDQGYPGGKFFDPLGLAGTVKDGVYVPDVEKLERLKLAEIKHARIAMLAMLVFYFEAGQGKTPLGALGL

SEQ ID NO: 53782 - protein, 123 aa, Zea mays
  Coding DNA Sequence Number=SeqID_12003
MARREEDGRNPMRPVGKVVVDRPRHVGMTAVTCGGLAVANAQQPQQTEKLVDAKKRRMEQQQLLRPPRRSRRAPGSNILPPSPRSRPCCSGGCPDGDAHGRRTDPTKRSSPSAIPGPGPGQGG

SEQ ID NO: 53783 - protein, 916 aa, Zea mays
  Coding DNA Sequence Number=SeqID_12004
  Gene Ontology: Mol. function=DNA binding; Biological process =regulation of transcription
  Homolog annotation: Hit_ID=Q5NB82; Match level="QueryCoverage=98%, HitCoverage=97%, E-value=0.0, Identity=77%"; Hit description=Nodule inception protein-like
  Pfam annotation: Domain name=PB1; Domain location=822-904; Score =84.8; E_value=2.7e-22; Accession=PF00564.15; Description=PB1 domain
  Pfam annotation: Domain name=RWP-RK; Domain location=570-621; Score =108.3; E_value=2.2e-29; Accession=PF02042.6; Description=RWP-RK domain
  Pfam module annotation: Pfam domain module=PB1::RWP-RK; Domain location=822-904::570-621
MDLDPAYPPSACADAWPFDSLTTSLLFSPQLTPIPANSSFSWLTPHSPLWLFEDRHLLPLDAPAVFEEVQRPRSGNSHTSSKPAEQISHRWQFHLSLDEDGTDNSSLFKEKLTHALRYFKESTDQHLLVQVWAPVKNGDRYVLTTSGQPFVLDHQSIGLLQYRAVSMTYMFSVDAENVGDLGLPGRVYKQKVPEWTPNVQYYSSGEYQRLNHAISYNVHGTVALPVFDPSAHSCIAVVELIMTSKKINYACEVDKVCKALEAVNLKSTEIHDHPNVQICNEGRQAALVEILEILTVVCEEHKLPLAQTWVPCKYRSVLAHGGGLKKSCLSFDGSCMGEVCMSTSDVAFHVIDAHMWGFRDACVEHHLQRGQGVPGKAFISHKPCFSKDIRKFCKLAYPLVHYARMFGLAGCFAICLQSSYTGNDDYILEFFLPPDCSDEDDQNALLESVLTLMKRCLRSLKVVGDRDLSGVSLHLSNVLKLENEEFKTDAQFDNSDGSLCQSPNGDRHGGSHEFDGGNKKVLDVPEGQLLTDDFSQGNGTSAGRPNGSGASDSSVLHKTNKPPERKRGKAEKTISLEVLQQYFSGSLKNAAKSLGVCPTTMKRICRQHGISRWPSRKINKVNRSLSKLKQVIESVQGSDAAFNLTSITGPLPIPVGPSLDSLNVEKLTQSKVAELSNIAVDGDRDSLQKSLGNDGHFGIVMPQQGSTDHNNDTQLEADKASHSRSSSGEGSINSRTSEGSCQRSPANQTFVCKPIASTFAEPQLNPEEFNKEPFQEPQLPLSRMLIEDSGSSKDLKNLFTSTSDQPFLAPPNNLVPMKHSGSVTIKASFKEDIVRFRFSCSGSVIVLKEEVAKRLRMDVGTFDIKYLDDDHEWVKLTCNSDLEECMEISRLSGSHVIRLSVSDIATHFGSSCGSSG

SEQ ID NO: 53784 - protein, 109 aa, Zea mays
  Coding DNA Sequence Number=SeqID_12005
MADVVPQSSGTGIVRRVTIRFRDFSTDGGHGAHCAVSLPPYRTGLGKNGNSDAGWLPLCGQLLTSLSHVFHLHTRERSAAMNMSTAVIWTASFGAKGEGTSAILVQDQR

SEQ ID NO: 53785 - protein, 680 aa, Zea mays
  Coding DNA Sequence Number=SeqID_12006
  Gene Ontology: Mol. function=protein dimerization activity; Cellular component=nucleus; Biological process=regulation of transcription, DNA-dependent
  Homolog annotation: Hit_ID=Q8S975; Match level="QueryCoverage=86%, HitCoverage=97%, E-value=0.0, Identity=55%"; Hit description=Auxin response factor 16
  Pfam annotation: Domain name=Auxin_resp; Domain location=264-342; Score=69.0; E_value=1.5e-17; Accession=PF06507.4; Description=Auxin response factor
  Pfam annotation: Domain name=B3; Domain location=189-291; Score=93.0; E_value=9.3e-25; Accession=PF02362.12; Description=B3 DNA binding domain
  Pfam module annotation: Pfam domain module=Auxin_resp::B3; Domain location=264-342::189-291
MDGNASACPLYISLQKEQEAGPFQSQASIQILSWITEALLAICTRAQAHAGTVLSHSLRSPPRDQEAKPRTANPQAVAMAQGAGRDPEELFEELWRACAGPLVELPQTNERVFYFLQGHLEQLQEPTDPALLAEQIKMFQVPNKILCKAETETDEMYAQITLQPEPDQVDLPQLPEPPLQETSRPVVHSFCKILTPSDTSTHGGFSVLRRHANECLPALDMSMPTPTQELITKDLHGSEWRFKHIYRGQPRRHLLTTGWSTFVTSKKLIAGDAFVYLRLSQSQYIVRLNKYLESSKIGFDVGMRFKMSFEGDDVPIKKFSGTVVDKGDLSPQWQGSEWKTLKVKWDEATNLNGPERVSSWEIEPFDASAPAITMPVQPSMKNKRPRETAEGLDIHALEPAQEFWLSGRPEQHEKTSVSSSEPKHQVAWTSERAGYSAMSSSICQNSAVTGSWFKGFNSSGSHPSLPEISQKLFQVTSNDARVPPWPGLSAYHADEPSSKLSCNTALCSYQTEEVAPRFSNAVEEEKKEPGMFRLFGVNLINHARSSATADKTSVGAGETSARAAGSFEDSAQLSRVTKDHTHMVNGSPREIQSHQSCSGRSRIKLMGEVGEMFEIKDLGSKEKEEWKVTFINDENETMEVGAVPWQEFCQMVRKIVIHSIGDRGHMEACPCLGQDGKRDY

SEQ ID NO: 53786 - protein, 261 aa, Zea mays
  Coding DNA Sequence Number=SeqID_12007
  Gene Ontology: Cellular component=cytoskeleton
  Homolog annotation: Hit_ID=Q5NB83; Match level="QueryCoverage=99%, HitCoverage=100%, E-value=4e-98, Identity=66%"; Hit description =Probable protein ABIL3
MEAVSMSPSTVSSHTHDDHDAASVTEAMSLQEGLLFSDTLKDLRNLRSQLYSAAEYFEVFYRNNSHKSTVMTSLKDYTVEALVSTVDHLGFVSYKVDNLVSEKAVEVKETEFLVSSVEQRVRICQQTTDQEARSQQALLIKAPKREPSPTPNDRSRSLSPSRKARAKSPSPRIVNTNTARETRAGSPIPNSSPMARSASTVARRPPSNSRHLRLASMQLHSDWEQQERSSSKGRRGFLRSLLTRRRWRNDESSLYSYLDEY

SEQ ID NO: 53787 - protein, 40 aa, Zea mays
  Coding DNA Sequence Number=SeqID_12008
MTMLHGTTDKHRRIQRGGCSLPYFRRRPIPDATPPDFTPS

SEQ ID NO: 53788 - protein, 126 aa, Zea mays
  Coding DNA Sequence Number=SeqID_12009
MGTNGHLDLDTGGKSVDQKVPKVHNRPIKRQRKGSNEERKSQSKAALVWRTGLSDAPLDSVRCTRESNSKLASLGNSESRSAKIHRTVRCYTRLSGVPAEQRLLRANGLLQNAFSALQCAPESEQR

SEQ ID NO: 53789 - protein, 282 aa, Zea mays
  Coding DNA Sequence Number=SeqID_12010
  Gene Ontology: Mol. function=oxidoreductase activity; Cellular component=peroxisome; Biological process=metabolic process
  Homolog annotation: Hit_ID=Q9LTV6; Match level="QueryCoverage=99%, HitCoverage=100%, E-value=1e-100, Identity=62%"; Hit description =Peroxisomal 2,4-dienoyl-CoA reductase
  Pfam annotation: Domain name=Epimerase; Domain location=15-243; Score= -64.6; E_value=0.064; Accession=PF01370.11; Description=NAD dependent epimerasedehydratase family
  Pfam annotation: Domain name=adh_short; Domain location=13-172; Score= 38.8; E_value=1.5e-08; Accession=PF00106.15; Description=short chain dehydrogenase
  Pfam module annotation: Pfam domain module=Epimerase::adh_short; Domain location=15-243::13-172
MESPFRADVVKDKAALVTGGGSGICFEIAAQLARHGAQVAIMGRRREAVGFDGDVRNQEDAARVLAATVAHFGKLDILVNGAAGNFLASPEDLTPKGFRTVLEIDTLGTYTMCYEALKYLKKGGPGKGPSTGGLIINISATLHYSASWYQIHVSAAKAGVDSITRSLALEWGTDYDIRVNGIAPGPIQDTPGLRKLAPEEMSKGLREMMPLFKFGEKRDIAMAALYLASDAGKYVNGTTLVVDGGLWLSHPRHIPKEEVRELSKVVEKKVRASGVGVTSSKL

SEQ ID NO: 53790 - protein, 367 aa, Zea mays
  Coding DNA Sequence Number=SeqID_12011
  Gene Ontology: Mol. function=prephenate dehydrogenase (NADP+) activity; Biological process=tyrosine biosynthetic process
  Homolog annotation: Hit_ID=Q5Z6Y1; Match level="QueryCoverage=79%, HitCoverage=92%, E-value=1e-111, Identity=64%"; Hit description =Putative arogenate dehydrogenase isoform 2
  Pfam annotation: Domain name=ApbA; Domain location=88-229; Score= -25.5; E_value=0.029; Accession=PF02558.6; Description=Ketopantoate reductase PanEApbA
  Pfam annotation: Domain name=PDH; Domain location=90-325; Score= -46.2; E_value=4.5e-06; Accession=PF02153.8; Description=Prephenate dehydrogenase
  Pfam module annotation: Pfam domain module=ApbA::PDH; Domain location= 88-229::90-325
  Subcellular localization annotation: CTP_CleavageSite=46; ConfidenceScore=5.46e-01
MASSLRHFAGLGCFSAAASSSASTSFLPGYAPDFCVFVALRPIKPPATAVANPPASPSPLEEEHRQQAAVPWHSDDPPAPSVPAPLRVGIVGFGNFGQFIAGGVQRQGHTVLAASRTDYSAYCAQHGIRFFRSVDALCEEQPDVLLICSSILSTESVVRAIPFHKLRPDTIVADVLSVKEFPRNLLLEVLPPGFGIICTHPMFGPESGKHGWGKLPFVFDKVRVADDGDQAATCDRFLSIFEQEGCRMVEMSCAEHDRYAAGSQFITHTIGRVLSQLNLSSTPINTKGYETLLQLLDRLEMAFEKVRQMLSGRLHDFIRKQIVERADPSGKLANGRSSSPAAHHLSTLTEENKTRVSPALTLASPTL

SEQ ID NO: 53791 - protein, 177 aa, Zea mays
  Coding DNA Sequence Number=SeqID_12012
  Gene Ontology: Mol. function=metal ion binding; Biological process =metal ion transport
  Homolog annotation: Hit_ID=Q5Z6Y0; Match level="QueryCoverage=97%, HitCoverage=96%, E-value=3e-38, Identity=46%"; Hit description =Copper-binding protein-like
  Pfam annotation: Domain name=HMA; Domain location=5-65; Score=42.9; E_ value=1.1e-09; Accession=PF00403.16; Description=Heavy-metal -associated domain
MTIVEMHVSIDCDGCEDNVRKALEKLKGVHHVSIDRMHGKVTVTGSVSQRKALRAARRTGKLAVLWPSAYNNPSYHQAHAMRAYYQYQYQANKPAQAQQHQYYSSVQRAGKNSGGISAVATKPAGHQYPQSKASSYNYHVHGYYDSELYGYYHDHEQPGDVVPAAVRSYSATRNESS

SEQ ID NO: 53792 - protein, 58 aa, Zea mays
  Coding DNA Sequence Number=SeqID_12013
MAGIYGGWQRDGSDDVEIEACDERLASRPHLSAPVATPYGMPNKVANWPCEGFSLAEH

SEQ ID NO: 53793 - protein, 214 aa, Zea mays
  Coding DNA Sequence Number=SeqID_12014
  Subcellular localization annotation: CTP_CleavageSite=48; ConfidenceScore=5.00e-01
MKAPNTFGSQLQHQACYTSGMGAIHGTITCTHKRKGKWEHTLANRSPRGGLKRRLSRRSASRNSKIKERAFLASLTDLGLDFVESASSLSDEELERHIGYKLNGLCFIADTTKGLCTMDRGDDVVGSGGKDISDDSIFEVSHSADDLTAEVEELTTALASQDTLIRLASRERKDFKSKYESTLRELESTRASVVVSNETEFDGCALHMSNITTL

SEQ ID NO: 53794 - protein, 134 aa, Zea mays
  Coding DNA Sequence Number=SeqID_12015
MEVESRAHARWAARGAIAGPGAKRWRGRHEAAGEGVNNRMGMGLRGKDEICGAVQRGVAKDEVWVMPKAAGSVRAAVAPSTAGICRPMLEGTATTRLSAPERSAAAYAVEGALGPVALSAMETPTAGVGDARRQ

SEQ ID NO: 53795 - protein, 188 aa, Zea mays
  Coding DNA Sequence Number=SeqID_12016
MTKIIGENLPRITRRESSGTTGSSPRRWCRSSSHDDCSSVRKPIVTCTGGRAGGASPVAARLGRARHQTCLVVAKEAHGHSALFSPAETQPKGGCTPAVATGVYRQAKPELVARSVGKGDLDAETRTSARKILGWAAEEADAHAIGRLTSGPSVIHPSSMATRVWRVQALLGWLDGCWATRLREKWAE

SEQ ID NO: 53796 - protein, 59 aa, Zea mays
  Coding DNA Sequence Number=SeqID_12017
MKAWESQWYECNEEWSCVQDYTRYDRVMGMVKEVTNKNTTKDRVKNSQMTKKRTRPREK

SEQ ID NO: 53797 - protein, 79 aa, Zea mays
  Coding DNA Sequence Number=SeqID_12018
MQRRARDAEDGCAGCRRGRGHQHLPQTARARAPCSRGLQMADIADGGADSPALVSGGAGESEERMSVQSARRLCAVGVL

SEQ ID NO: 53798 - protein, 113 aa, Zea mays
  Coding DNA Sequence Number=SeqID_12019
MARNTLNKIGRGSKLAGGSLSVLLPLIVCLAAWVKPRFFFNLENVCGATRGGQGSLIGVETRRRHDCLGIQQQFAGQEAAHRHWEWHRQAGRARTQHATMEEGERANVARGSS

SEQ ID NO: 53799 - protein, 113 aa, Zea mays; identical to SEQ ID NO: 53798
  Coding DNA Sequence Number=SeqID_12020

SEQ ID NO: 53800 - protein, 74 aa, Zea mays
  Coding DNA Sequence Number=SeqID_12021
MACSVAERKTPTSSTYSHMHRGRGSGVAWLCCYGDEGALGIGRSKLGQRLVSSERLRADFRSKDAKEKKHKKND

SEQ ID NO: 53801 - protein, 599 aa, Zea mays
  Coding DNA Sequence Number=SeqID_12022
  Gene Ontology: Mol. function=transferase activity, transferring hexosyl groups; Cellular component=mitochondrion; Biological process= metabolic process
  Homolog annotation: Hit_ID=Q1T4I9; Match level="QueryCoverage=67%, HitCoverage=78%, E-value=9e-60, Identity=32%"; Hit description =Pentatricopeptide repeat
  Pfam annotation: Domain name=PPR; Domain location=230-264; Score =21.4; E_value=0.0032; Accession=PF01535.11; Description=PPR repeat
  Pfam annotation: Domain name=PPR; Domain location=265-299; Score =34.2; E_value=4.5e-07; Accession=PF01535.11; Description=PPR repeat
  Pfam annotation: Domain name=PPR; Domain location=300-334; Score =48.2; E_value=2.8e-11; Accession=PF01535.11; Description=PPR repeat
  Pfam annotation: Domain name=PPR; Domain location=335-369; Score =31.1; E_value=3.9e-06; Accession=PF01535.11; Description=PPR repeat
  Pfam annotation: Domain name=PPR; Domain location=370-404; Score =45.4; E_value=1.9e-10; Accession=PF01535.11; Description=PPR repeat
  Pfam annotation: Domain name=PPR; Domain location=405-439; Score =47.3; E_value=5.1e-11; Accession=PF01535.11; Description=PPR repeat
  Pfam annotation: Domain name=PPR; Domain location=440-474; Score =47.8; E_value=3.6e-11; Accession=PF01535.11; Description=PPR repeat
  Pfam annotation: Domain name=PPR; Domain location=475-509; Score =33.2; E_value=9.1e-07; Accession=PF01535.11; Description=PPR repeat
  Pfam annotation: Domain name=PPR; Domain location=510-544; Score =41.3; E_value=3.2e-09; Accession=PF01535.11; Description=PPR repeat
  Pfam annotation: Domain name=PPR; Domain location=545-578; Score=2.8; E_value=3.5; Accession=PF01535.11; Description=PPR repeat
  Pfam module annotation: Pfam domain module=PPR::PPR::PPR::PPR::PPR::PP R::PPR::PPR::PPR::PPR; Domain location=230-264::265-299::300-334::335- 369::370-404::405-439::440-474::475-509::510-544::545-578
RRPPAADPPPPVSPPWYAAPRSTLPAATPPPGEADPLVVAASEIALGLPFHPAPLPAAAPAPLLRLLPAFTPTHFLSLLRRNPLALQPLPLLSLFRVLLASPPGLFRHTPASFLSMSHLLIAHRLSHLALPLLRLLVSRLGRDSPPRLLPLLVSAASTDDPAPLVSAVAKVYADEGLLPDGCSLLLLALRRGIRVPMPAWSDLMNRLPSVPEAYAFYLHLLDAGVPPEARQFNMLMRDMIRSGKLASARNVFDEMLRRGVQPTVVTFNTLMSGMCKASDLNNANALRGLMAKAGIAPDVYTYGAFIQGLCKTGRIQDAMEMFEEMCERGLNPNTVVLTTLIDAHCKEGDVTAGLELRWEMATRGVKADLVAYNALVNGFCRVRDMKAANDIVEEMRKDGLKPDKVTYTTLIDGCCKEGELDTAMEMKQEMSDEGVALDDVTYTALISGLSKAGRSVDAERILCEMMEAGLQPDNTTYTMVIDAFCKNGDVKTGFKHLKEMQNKGKNPGIVTYNVVMNGFCSLGQMKNADMLLNAMLNIGVCPNDITYNILLDGHCKHGKVRDTEELKSAKGMVSDFGVYTSLINEFVKKKSAKSYHDNG

SEQ ID NO: 53802 - protein, 204 aa, Zea mays
  Coding DNA Sequence Number=SeqID_12023
  Gene Ontology: Mol. function=anthranilate synthase activity; Cellular component=cyanelle; Biological process=glutamine metabolic process
  Homolog annotation: Hit_ID=Q42565; Match level="QueryCoverage=98%, HitCoverage=67%, E-value=2e-77, Identity=67%"; Hit description =Anthranilate synthase beta subunit
  Pfam annotation: Domain name=GATase; Domain location=2-195; Score =165.4; E_value=1.5e-46; Accession=PF00117.18; Description=Glutamine amidotransferase class-I
  Pfam annotation: Domain name=Peptidase_C26; Domain location=1-178; Score=-91.5; E_value=0.002; Accession=PF07722.3; Description =Peptidase C26
  Pfam module annotation: Pfam domain module=GATase::Peptidase_C26; Domain location=2-195::1-178
MKYMGELGLNFEVYRNDELTIEDVRRKNPRGILISPGPGEPQDSGISLQTVLELGPTIPIFGVCMGLQCIGEAFGGKIIRAPSGVMHGKSSPVYYDEELGKALFNGLPNKTFRVDAALAPFASMDSPFTAARYHSLVIEQETFPHDALEATAWTEDGLIMAARHKKYKHIQGVQFHPESIITPEGKKIILNFVRFIEELEKQRS

SEQ ID NO: 53803 - protein, 87 aa, Zea mays
  Coding DNA Sequence Number=SeqID_12024
MKREQEETITVPDTGTWRSVHYVAFLMTVEATEIGETMLQYGLEPQEYGPVIDGSFYWESATHQCTAIIGALASAAAYGMEKAVQAR

SEQ ID NO: 53804 - protein, 308 aa, Zea mays
  Coding DNA Sequence Number=SeqID_12025
  Gene Ontology: Mol. function=hydrolase activity, acting on ester bonds; Cellular component=cellulose and pectin-containing cell wall; Biological process=lipid metabolic process
  Homolog annotation: Hit_ID=Q941W9; Match level="QueryCoverage=88%, HitCoverage=78%, E-value=1e-125, Identity=78%"; Hit description =Putative family II lipase EXL1
  Pfam annotation: Domain name=Lipase_GDSL; Domain location=48-307; Score=86.1; E_value=1.1e-22; Accession=PF00657.12; Description=GDSL -like LipaseAcylhydrolase
  Subcellular localization annotation: CTP_CleavageSite=69; ConfidenceScore=5.05e-01
MARPLRPAGSPNVRAHAHHPLLLLILLLFLSSTAIPSSKRTQPKFSAVFYFGDSVLDTGNNNHLPTVAVANHAPYGRDFPGKKPTGRFSDGRLIPDLLNERLQLKEFSPPFLDARLPNSDVATGVNFASAGSGFNDQTSRLSNTLPMSKQVDLFEDYLLRLRGIVGDKEASRIVARSLIFISSGTNDFSHYYRSPKKRKMEIGDYQDIVLQMVQVYVKELYDLGGRQFCLAGLPPFGCTPIQITLSGDPDRACVDEQNWDAHVYNSKLQRLLAKLQGSLHGSRIVYVDAYRALMEILENPAKYGNAFC

SEQ ID NO: 53805 - protein, 130 aa, Zea mays
  Coding DNA Sequence Number=SeqID_12026
  Subcellular localization annotation: CTP_CleavageSite=44; ConfidenceScore=5.37e-01
MDVGSSERAQDIAQQREGMLRRCCTSSPNPSTSSRSPTSSRRPRAGAAEPKLRPAPKTEGKDRSAAQPAAANVDSEESRAEVVGGGSFHSINDGVLLTFYMSRAPTWELHRAPCSNAVVRLHLPEPQHRI

SEQ ID NO: 53806 - protein, 108 aa, Zea mays
  Coding DNA Sequence Number=SeqID_12027
  Gene Ontology: Mol. function=phosphoinositide binding; Biological process=cell communication
MQRHDFVNQRCATLQRYLRRLAVVGHSPVLHASLTATGPNGIPTSDAVRPPPVEEEIDTKYLVHKAKLEDLEKHLVTASQQATYSDHFASIWTKRENSYTIENHATGV

SEQ ID NO: 53807 - protein, 353 aa, Zea mays
  Coding DNA Sequence Number=SeqID_12028
MKIVYNVATQINSTDSRSSAAASQTADETNLEAATSPEIRPDAPPPKSPAPAARSHGRQRTRPRPARPYGGDEPWRPASVSSQARLSLLLSRPGWRSSALGSRANADLGGGLAASACQPVRRARLPPPISTFHSHLASGTPTHQDSSPPVAINQLAPSRSSKPIKKPPTSTTDDEDDSVMGNSLRCCLACMVPCGALDVVRVVHLSGRVDEFSCPVAAATVLAANPAHTLTTAWSPSGAPGCGSRKLAIVSPDSDLKRGRIYFLIPSATLPADRRSKKQSSKRPSQSQSQSQSRLRHHAKKQSAGGTAEQDNYLRELLSEKAASGGGHRRRRSGARVGVWRPRLESIVEEASD

SEQ ID NO: 53808 - protein, 159 aa, Zea mays
  Coding DNA Sequence Number=SeqID_12029
  Homolog annotation: Hit_ID=Q7FNW1; Match level="QueryCoverage=48%, HitCoverage=100%, E-value=4e-18, Identity=62%"; Hit description=ATX protein
  Pfam annotation: Domain name=HMA; Domain location=86-155; Score=20.3; E_value=0.007; Accession=PF00403.16; Description=Heavy-metal -associated domain
MRKTFLLLEAGGALDQQPPTDETQWLFCWACTGEKRKVRVQLYKLQEAESQASLLESCLKSLCTVGLLLGYSVLLLYSPETMAVVELKVGMHCERCIKAIKKAIKTIDGELITCLWSNMESYRLETEINKVTVTGSVTPEEVVKALHKIGKTATCWTQD

SEQ ID NO: 53809 - protein, 158 aa, Zea mays
  Coding DNA Sequence Number=SeqID_12030
MPGMKKKLSAKSQRGGFLKKESLGDGKTECSTLVKPRPPIGFRVSWWSAHSGLVPIGHECAAGQGLCGSPLTPFCLEPFFWYGALSVQFSLVRHTRVGRALEPLLDEGVRLGGLSRLFSFTLPSYSLRKDGGGEPKHAFLDGLAMSLEGFVRMRVVLG

SEQ ID NO: 53810 - protein, 203 aa, Zea mays
  Coding DNA Sequence Number=SeqID_12031
  Homolog annotation: Hit_ID=Q9FNZ8; Match level="QueryCoverage=34%, HitCoverage=15%, E-value=2e-07, Identity=40%"; Hit description =Putative Na+-dependent neutral amino acid transporter
MRVLGVVPAALLIAAVAALADVSVEFMLRYTGRGWGGGGKDEAATSYAGTMGDAFGRAGAALLNVFVALTTTGTLVVYLIIIGDVMSGSVGGGDEHAGVLQELFGARWWTGRQFVLLVTAVFVLLPLVLRRRVAPGLNGQWWTGDLFISVHVWADNNGLMVNFGYPTNYPRIFSPSSLWLGLKDVEIDVISLAHARQYRLGHD

SEQ ID NO: 53811 - protein, 187 aa, Zea mays
  Coding DNA Sequence Number=SeqID_12032
  Gene Ontology: Mol. function=sugar binding
MASNRALFVLPMLLAVAVLLPEQIALSSADFPLGRQATVQLPPAPYQPGFAARAVVLDAKQGHRQPAFAAAVSAEAGAGRCTCSLVVLLGGVKVWASDHLEKFVPAALCRLELTEDGQLRLTDGAGKVGWLSGTAGQGVKVMHRDLCLLFLHCLFTSFVVVHCLAIVLRLLPGINDWDLFVDFRGRR

SEQ ID NO: 53812 - protein, 317 aa, Zea mays
  Coding DNA Sequence Number=SeqID_12033
  Gene Ontology: Mol. function=sugar binding; Biological process =protein amino acid phosphorylation
  Homolog annotation: Hit_ID=Q5JK65; Match level="QueryCoverage=74%, HitCoverage=54%, E-value=1e-11, Identity=29%"; Hit description =Protein kinase-like
MELSNLTVEDLYHQALHLDRRTGNLVLLDAQNCTMWQSLDDPTDTFLRGQQRRLPVYLIAPTTNMAASSVFYSFELDGDRIATYVNFGDTRYSYWELAPPANRTMAAARLNGSGLGMLDLRGVTVAQITPPVKKPPVSFLALGGDGNLVMYYYDTRHQKFRASYKALGFCQLPLSCSVHEVCSSAGKCKDFSEYADRPAARAGNASSSNPREGAGDKARMVHLRGVTTVLRTASPLANVTLRECVVQCARNLSCNAALYVRDNAGVAAADHGVCSHYKVTAGAREVTDGSRRYSYWVKFPEAAAGGDEEDDDSFSRH

SEQ ID NO: 53813 - protein, 56 aa, Zea mays
  Coding DNA Sequence Number=SeqID_12034
MGGGGAPLVTRAGALAARAPMAPNTPIGFEFVIDFDKKNSLNDFIDWYHNLRIILK

SEQ ID NO: 53814 - protein, 87 aa, Zea mays
  Coding DNA Sequence Number=SeqID_12035
  Gene Ontology: Mol. function=hydrolase activity, hydrolyzing O -glycosyl compounds; Biological process=carbohydrate metabolic process
  Homolog annotation: Hit_ID=Q6L597; Match level="QueryCoverage=84%, HitCoverage=14%, E-value=5e-23, Identity=69%"; Hit description =Putative beta-glucosidase
MGSALAALRNGANVKRYFVWLFLDMFELLAGYYSRYDLYHVDFQDPELPRTPKLSALWYDEFLKNEIDIIENVVVSATDDARWACCW

SEQ ID NO: 53815 - protein, 167 aa, Zea mays
  Coding DNA Sequence Number=SeqID_12036
MVINGQDRHRGPEEAMATCLKVHMCLAWEEGLLVGISFGAKLATCLKVHMCAQGPYEKFLNQLYMLVRHMWDFKEEEDRRLLLLLTFVTPTSRTERFVCSILFHSLFDAVDDDCLVKFGRWEMEVVATPSVEHMKATRSANLTFCEEGWLLFCTTIIVGSRLAAYNF

SEQ ID NO: 53816 - protein, 81 aa, Zea mays
  Coding DNA Sequence Number=SeqID_12037
  Subcellular localization annotation: CTP_CleavageSite=34; ConfidenceScore=5.06e-01
MSPPPAAAPTPPFTAPRPAPTRPGCDSGAERQPRAAELEIEVSPGLAKSKKASNSKLEEGVKIMCVGLAESPVISGGVIQM

SEQ ID NO: 53817 - protein, 147 aa, Zea mays
  Coding DNA Sequence Number=SeqID_12038
  Subcellular localization annotation: CTP_CleavageSite=71; ConfidenceScore=5.17e-01
MARGACVEAVAPVPGPAAPACRGRTPALVPSQAPLSAERSRRALARADRAALGCPQAGTPVPVPGSSGRVSARHEPYTPCRCVLGACARTEGPAPCRCVLGACARTEGPTPGPVCAGAEHAAHTGGMPASCQWLTRHAGSPKGLNAG

SEQ ID NO: 53818 - protein, 162 aa, Zea mays
  Coding DNA Sequence Number=SeqID_12039
  Gene Ontology: Mol. function=sequence-specific DNA binding; Cellular component=nucleus; Biological process=regulation of transcription, DNA-dependent
  Homolog annotation: Hit_ID=Q8H7Y6; Match level="QueryCoverage=65%, HitCoverage=27%, E-value=8e-10, Identity=42%"; Hit description =Putative heat shock protein
  Subcellular localization annotation: CTP_CleavageSite=40; ConfidenceScore=5.23e-01
MVFLFTMQINSFIQPNHTFSDSKTKTRLSPTTHVTGINLYDTMKSGTRPIGAAPVHDGVQEEEPQQGDDDPIATRALFAELDERGTTSELENLALNIQGLGKRRQDGGEKQSGRARSQQQHGFETAEVTDDFCEELLNEGMKGGAEAETRRLWGLGGGGSVR

SEQ ID NO: 53819 - protein, 593 aa, Zea mays
  Coding DNA Sequence Number=SeqID_12040
  Gene Ontology: Mol. function=sequence-specific DNA binding; Cellular component=nucleus; Biological process=regulation of transcription
  Homolog annotation: Hit_ID=Q6B6R4; Match level="QueryCoverage=81%, HitCoverage=82%, E-value=1e-157, Identity=64%"; Hit description =Transcription factor WRKY24
  Pfam annotation: Domain name=WRKY; Domain location=245-303; Score =147.9; E_value=2.7e-41; Accession=PF03106.6; Description=WRKY DNA -binding domain
  Pfam annotation: Domain name=WRKY; Domain location=411-470; Score =149.6; E_value=8.1e-42; Accession=PF03106.6; Description=WRKY DNA -binding domain
  Pfam module annotation: Pfam domain module=WRKY::WRKY; Domain location=245-303::411-470
  Subcellular localization annotation: CTP_CleavageSite=42; ConfidenceScore=5.74e-01
MTTSSSGSIEAPANSRPGSFAFASTSTSTSTSFTDMLGGSTDAAGGASRYKAMTPPSLPLSPSSFFSNNPGGLNPADFLDSPALFSSSCSGARCRAAHVPGNANALCTFQIFTSPTTNAFASQQFSWLATSGAEQSGKDERRPSSYPDFSFQTAPTTEEAVRTTTTFQPPIPAASLGEEAYRSQQQQPWAYQQQQPGMDAGSSQQAAPYGEPFQAASSDAATMAPHVPASGGYSHQAQQSQRQSSDDGYNWRKYGQKQMKGSENPRSYYKCTFPGCPTKKKVERSLDGQITEIVYRGTHNHAKPQNTRRNSSAAAQLLQSGGGDASEHSFGGMLGTPVATPENSSASFGDEEAGVGSPRAGGNAGGDEDEPDSKRWRKDGDGVGEGISMAANRTVREPRVVVQTMSDIDILDDGYRWRKYGQKVVKGNPNPRSYYKCTTPGCPVRKHVERACHDLRAVITTYEGKHNHDVPAARGSAALYRPAPPPGDNAGHYLGGAAGAAQTGMAYQLAGQQYGFGGQLGSFGLSGGAPAQSSGPSGSLALSSGFDNPMPMGSLYMSQSQQQGQHDAMHAPRAKEEPREEDMFFQQSMVYTD

SEQ ID NO: 53820 - protein, 159 aa, Zea mays
  Coding DNA Sequence Number=SeqID_12041
  Gene Ontology: Mol. function=DNA binding; Biological process =regulation of transcription
  Homolog annotation: Hit_ID=Q6Z869; Match level="QueryCoverage=86%, HitCoverage=30%, E-value=2e-18, Identity=42%"; Hit description=Myb family transcription factor-like
MPDWLQSVQLWSNQQQPSASPPQHQDELLLPCRPVALNACRKPGGTFQPFEKEEKKKDKEEKQRAELELELPLPAAASSAVVGDSCDRAGATDTDTAENNKASSTKGGKDKEAQLSSQAPSRKARRCWAPELHCRFLQALFLYKPDIHKINRFYIKTTV

SEQ ID NO: 53821 - protein, 106 aa, Zea mays
  Coding DNA Sequence Number=SeqID_12042
  Subcellular localization annotation: CTP_CleavageSite=37; ConfidenceScore=5.07e-01
MAEGVCVEQPNHKLTTQIKSPKNQTNQRSSNYPLTTPAKAAAPLHMAEAMPECPNRSSIAPNLNPPSPSRCRHHCKHIGRYTTKGRSIKGSARDKGLGLHDGDQRR

SEQ ID NO: 53822 - protein, 86 aa, Zea mays
  Coding DNA Sequence Number=SeqID_12043
MALPRESVSDTERLRNKGLTVNDLGQVVEVGAYQVSTYSGIEASVELFLYMEILYFRVVTVSLEEKPEMKHKSFRKSVKKDKYRCC

SEQ ID NO: 53823 - protein, 100 aa, Zea mays
  Coding DNA Sequence Number=SeqID_12044
MTNGQVERANAATVDPSLRRVPVAAEESPEPALRLTPPPSRPAVNRPPPVPLPRPKPYRRTPRALPDLPDHSDCPRAPSVARAPRLWRALRRGDERRRPS

SEQ ID NO: 53824 - protein, 141 aa, Zea mays
  Coding DNA Sequence Number=SeqID_12045
HPRRARCGAIPTPDSRCEMNVALCAAPCYTMAYHGSRALCPLPVSVLVIPEIFSAPCVLLASLVPGPFPQLINWLPPQPTSKILTAEESSSPGMLPTTPSRIPSFIAHEVRWQTLDAALVAVDLSKRGCDLAQSDDHQQPC

SEQ ID NO: 53825 - protein, 86 aa, Zea mays
  Coding DNA Sequence Number=SeqID_12046
MAGGIELAGAKENWLAGEGYHADTDDKKRDGFRRGLSTKLRDRLNTVRANSYNELVNMAISQEDYITARLAEKKKKTPMAGPSAQP

SEQ ID NO: 53826 - protein, 154 aa, Zea mays
  Coding DNA Sequence Number=SeqID_12047
MADGMVLRRRRRPVDNHSRRICPCLSQCRPQRVQGAIMPYFIGPHLRISQQGWNFMFGANTRKRTFLFQEKYKDVEHSTIDLFKETHYNKNKGFSENFKKAIVDMEEMVVAPVQYGQQPKYPIEVVSNVLPGSSVFLHNIGLQSASKKRSTTTV

SEQ ID NO: 53827 - protein, 39 aa, Zea mays
  Coding DNA Sequence Number=SeqID_12048
MTRDEEPTLREVLRDTPGDGSGWAASSGCRRRRLPRLLD

SEQ ID NO: 53828 - protein, 65 aa, Zea mays
  Coding DNA Sequence Number=SeqID_12049
MGAGLRPWARGGAAWDRQPWAGAATVGSDECPSGQGVMLHKIVTAIGSGVSVSKAHRLWKAVVGP

SEQ ID NO: 53829 - protein, 65 aa, Zea mays
  Coding DNA Sequence Number=SeqID_12050
MEASTTGNKARSLPGELYCVDYFAVRTAAAMHTTLPRHDTTTTRNRGVHREVGAQGTAAVSIGNL

SEQ ID NO: 53830 - protein, 338 aa, Zea mays
  Coding DNA Sequence Number=SeqID_12051
  Gene Ontology: Mol. function=protein serine/threonine kinase activity; Biological process=protein amino acid phosphorylation
  Homolog annotation: Hit_ID=Q1SD79; Match level="QueryCoverage=70%, HitCoverage=56%, E-value=2e-51, Identity=54%"; Hit description =Tyrosine protein kinase, active site
MPPAAAAEAEQGGWASISVGPRDGGLLVLLFDSFLVEVAVGFGGAAGKYPISFFASFSLRYQSPDRTSVGSASAPKKHSASSRGRRRNFSSSTCKDFLRKFVDSELLTSSLEDWFSGHSEDCGFRKPGFNVPFELTELQNFDYALEGVTFQQLFGGVVKVQGDLNKLDFDLNNVFDCAAEWIKKHSRISVCSVDRVWNKLGNANWGDIGTLQVLIAIFHSMIQFYGEPKYSLDELATEHSSRLQSRRSERHLVDRQANGNGLFRFQQRSHSPEIVELQEEAAVDVKPHETLRLEIGYVVLMDDAYTQKGFQISDILTGSDPPIYTSAPVEEPTKTCYC

SEQ ID NO: 53831 - protein, 141 aa, Zea mays
  Coding DNA Sequence Number=SeqID_12052
MSYALLVTYEGAAKALSREGCTHFEVFDRVTEDFDSGIFQVGDEVLKRSARALYDRMWGPHGRDTIRERADRALAQMINDEEVEDFGSLESSMTQTEGTETRAEGHSAPQAGPSEDPTAATALVGEDSAAAAAPSQVAGSR

SEQ ID NO: 53832 - protein, 459 aa, Zea mays
  Coding DNA Sequence Number=SeqID_12053
  Gene Ontology: Mol. function=DNA binding; Cellular component =mitochondrion; Biological process=DNA integration
  Homolog annotation: Hit_ID=UPI00004C1731; Match level="QueryCoverage =93%, HitCoverage=33%, E-value=0.0, Identity=75%"; Hit description =UPI00004C1731 related cluster
  Pfam annotation: Domain name=RnaseH; Domain location=37-164; Score= -5.9; E_value=0.0002; Accession=PF00075.14; Description=RNase H
  Pfam annotation: Domain name=rve; Domain location=166-341; Score =90.8; E_value=4e-24; Accession=PF00665.16; Description=Integrase core domain
  Pfam module annotation: Pfam domain module=RnaseH::rve; Domain location=37-164::166-341
MGETISFAPRKAIKSQVLADFVAEWVDIQLPTALIQPKLWTMFFDGSLMKTGAGADLLFISPLGKHLRYVLRLHFPASNNVAEYEALVNDLRIAIELGVRRLDARGDSQLVIDQVMKNSHCHDPKMEAYCDEVRRLEDKFYGLELNHIARRYNETVDELAKIASGRTMVPPDVFSRDLHRPSVKTDDTPESEVPSAQSEKAPGGYTHLLVAIDKFSKWIEVRPLNSIRSEQAVAFFTNIIHRFGVPNSIINDNGTQFTGRKFLDFCEDHHIWVDLATVAYPMTNGQVERANGMILQGLKPRIYNDLNKFGKRWMKELPLVVWSLRTTPSRATGFTPFFLVYGAEAILPTDLEYGSPRTRAYIDQSNQANREDSLDQLEEARDVALLHSARYQQSLRRYHARGVQSRDLQVGDLVLRLRQDARGRHKLTPPWEGPFVIAKVLKPGTYKLANSQGEVYSNA

SEQ ID NO: 53833 - protein, 98 aa, Zea mays
  Coding DNA Sequence Number=SeqID_12054
  Subcellular localization annotation: CTP_CleavageSite=54; ConfidenceScore=5.67e-01
MQAACNHAKWAHPSDFQRTQHGAPGPRVMQPVRRLLRASNCTATRTTTTPPRLRNQYRDSRQPCERPNSASQARRDRERGIPRKGSFSVKETGPEPPY

SEQ ID NO: 53834 - protein, 249 aa, Zea mays
  Coding DNA Sequence Number=SeqID_12055
  Gene Ontology: Mol. function=carboxyl- and carbamoyltransferase activity; Cellular component=ornithine carbamoyltransferase complex; Biological process=amino acid metabolic process
  Homolog annotation: Hit_ID=Q6QP54; Match level="QueryCoverage=39%, HitCoverage=27%, E-value=8e-11, Identity=52%"; Hit description =Putative kinase
  Subcellular localization annotation: CTP_CleavageSite=73; ConfidenceScore=5.10e-01
MAPSDRRRGTLKTPNSELVTPISIKLQRPDGARTRAKTRKTANSAPPDPRAWTRAKTRKTVNSAPPDPRGRTRAKTRKTANSAPPDPGLGLGLRPGRRRTPLRPTPGLGLGLGPGRRRTPPRPTPGLGLRPGLCRTTSAPPDPRARTRAKTRKTANSAPPDPRARTRARPRKTTNSASPDPRARTPPWPLPNDFRSARPQGSDSGSAPKDDELRLARPQGSDSTLASAERLPPRPTQGLGLGLGNGRQI

SEQ ID NO: 53835 - protein, 287 aa, Zea mays
  Coding DNA Sequence Number=SeqID_12056
  Gene Ontology: Mol. function=oxidoreductase activity; Cellular component=cytoplasm; Biological process=flavonoid biosynthetic process
  Homolog annotation: Hit_ID=Q6ES21; Match level="QueryCoverage=97%, HitCoverage=100%, E-value=3e-58, Identity=55%"; Hit description =Putative iron/ascorbate-dependent oxidoreductase
  Pfam annotation: Domain name=2OG-FeII_Oxy; Domain location=131-233; Score=117.0; E_value=5.5e-32; Accession=PF03171.10; Description=2OG -Fe(II) oxygenase superfamily
MADESWRIPMLVQELAAKVQQPPSRYMQPEQYHPVSLDVGAETLEPIPVIDLSRLSTAGGADDDESGKLRLALQTWGALPVRVEPEDERNLVHWPQHPKTFRGLLHEYTLNCKRIKDCILGTTAKTLGLGEDCFARFNYYPPCPRPDLVFGVKPHSDSSGVLTILLIDKDVSGLQVLRDGVWHNNVPASPFMLLINVGDFMEIISNGVLRSPVHRAVSNAEKERISLAMFHGLDPDEEIEPAPAALLSENQPARYRTLKAKEYLLAGFYEHFFCRFIESVKIHLNEV

SEQ ID NO: 53836 - protein, 101 aa, Zea mays
  Coding DNA Sequence Number=SeqID_12057
MRSSSSSGAEPESKPWGRAKRSSSSSGAEPESEPWVGRGGVSYGARDRTWLLSASLCRVAQQSERRRRRCPLVRPPPCRSKVAMERRPPRPTAQRLCILSR

SEQ ID NO: 53837 - protein, 393 aa, Zea mays
  Coding DNA Sequence Number=SeqID_12058
  Gene Ontology: Mol. function=hydrolase activity; Cellular component =membrane; Biological process=proteoglycan metabolic process
  Homolog annotation: Hit_ID=Q5SNA6; Match level="QueryCoverage=98%, HitCoverage=71%, E-value=1e-150, Identity=66%"; Hit description =Putative beta-glucuronidase
  Pfam annotation: Domain name=Glyco_hydro_79n; Domain location=1-184; Score=75.1; E_value=2.2e-19; Accession=PF03662.4; Description =Glycosyl hydrolase family 79, N-terminal domain
AKVVFGLNALNGRVPLPDGSMGGPWDYTNAASLIRYTANKGYRIHGWELGNELSGTGVGARVGADQYAADVIALKALVDDVYRSEPSKPLVVAPGGFFDQAWFTELVVKTGPDLLSVVTHHVYNLGPGTLAATLRRSCDLQRLLKSTGTSAVAWVGEAGGAYNSGRHLVTDAFVFSFWYADELSDQLGMAARFDTKSYCRQSLVGGNYGLLNTTTFQPNPDYYSALLWHRLMGTKVLAVTFSGTNKIRAYAHCARDSPGITLLLINLSGNATARVSVTAQGAAAAHAHRHRHDARKHGGGRKFRHVHVPGFAGGGEAAAGAVRHEYHLTPKDGDLTSQVVMLNGRALATDAAGNIPALEAVEVDAARPIAVTPYSIVFARVPHFSAPACRVDR

SEQ ID NO: 53838 - protein, 56 aa, Zea mays
  Coding DNA Sequence Number=SeqID_12059
  Homolog annotation: Hit_ID=O24587; Match level="QueryCoverage=87%, HitCoverage=7%, E-value=1e-18, Identity=62%"; Hit description=Pol
MKVDPVDGVASSVNGFRPKALGGSGELVLDPFLFKELLHLKVLELGSVVGSLSSSL

SEQ ID NO: 53839 - protein, 240 aa, Zea mays
  Coding DNA Sequence Number=SeqID_12060
  Gene Ontology: Mol. function=succinate-CoA ligase (ADP-forming) activity; Cellular component=mitochondrion; Biological process =metabolic process
  Homolog annotation: Hit_ID=Q6DQL1; Match level="QueryCoverage=82%, HitCoverage=67%, E-value=4e-79, Identity=68%"; Hit description =Succinyl-CoA ligase alpha 2 subunit
  Pfam annotation: Domain name=CoA_binding; Domain location=38-134; Score=184.6; E_value=2.4e-52; Accession=PF02629.9; Description=CoA binding domain
  Pfam annotation: Domain name=Ligase_CoA; Domain location=142-238; Score=58.2; E_value=2.7e-14; Accession=PF00549.10; Description=CoA -ligase
  Pfam module annotation: Pfam domain module=CoA_binding::Ligase_CoA; Domain location=38-134::142-238
  Subcellular localization annotation: CTP_CleavageSite=28; ConfidenceScore=5.23e-01
MAASSPRALQSLGSAASRFLHARGFAAAAAAAPSPAVFVDKSTRVICQGITGKNGTFHTEQAIEYGTNMVGGVTPKKGGTEHLGLPVFNSVAEAKAETKANATVIYVPPPFAAAAIMEAMEAELDLAVCITEGIPQHDMDGTQILVNRCYIHKPGRIGIVSRSGTLTYEAVFQTTAVGLGQSTCVGIGGDPFNGTNFVDCLEKFVNDPQTEGIVLIGEIGGTAEEDAATFIQSILKYPYL

SEQ ID NO: 53840 - protein, 460 aa, Zea mays
  Coding DNA Sequence Number=SeqID_12061
  Pfam annotation: Domain name=SRF-TF; Domain location=26-76; Score =33.6; E_value=6.8e-07; Accession=PF00319.9; Description=SRF-type transcription factor (DNA-binding and dimerisation domain)
MTGKRRSAERAQEGAAGRGRGRRALGLIRDRRARVDTFGRRKETLKAKAFELSVLCGVDVALVVAAADGDGDAAADVWESTEGAVLARYRALDPEVRARARHTHRAYLEGGLGKEEAKLARVHQAGPTALDPWPWDKALDGTATAEEAQRLLEAIDAAIRASEDRMRALGLPVDGEDVVGPGAALEMIATLDSAGVDGYPLHPPGGGDTYDNQAIWSNEGFNAYNFQQCPAGSSSAGMEGYHLQVAPEMYTGSGHNNGRIATDAHMYQPPDAGTMQHGYGFHQCAGIDCFGMPAGHQMQELPGWGTAQANMAMWRTEEPRHAMVPVHYPSAQTGLSYMETLAALGAQGGGGLSFAMGTSCNFVNAPPVLPLAMGTAGCGGRDFINARPVAFSHAICGTSDNCTDTTPAGPLAMSYGADLTIAGGYATQWQAGRSGHQSGIELLRYLGRLEENTQLHLWGN

SEQ ID NO: 53841 - protein, 778 aa, Zea mays
  Coding DNA Sequence Number=SeqID_12062
  Gene Ontology: Mol. function=serine-type endopeptidase activity; Cellular component=cytoplasm; Biological process=negative regulation of enzyme activity
  Homolog annotation: Hit_ID=Q6ZL89; Match level="QueryCoverage=99%, HitCoverage=99%, E-value=0.0, Identity=53%"; Hit description =Putative subtilisin-like serine protease
  Pfam annotation: Domain name=PA; Domain location=379-466; Score=23.1; E_value=0.00099; Accession=PF02225.12; Description=PA domain
  Pfam annotation: Domain name=Peptidase_S8; Domain location=132-608; Score=85.7; E_value=1.4e-22; Accession=PF00082.12; Description =Subtilase family
  Pfam annotation: Domain name=Subtilisin_N; Domain location=43-125; Score=55.7; E_value=1.6e-13; Accession=PF05922.7; Description =Subtilisin N-terminal Region
  Pfam module annotation: Pfam domain module=PA::Peptidase _S8::Subtilisin_N; Domain location=379-466::132-608::43-125
MATTITRLLHHLALLLLVVQFADAVFVPKTKNYAVLKPQSWGTTYIVHANFLAKPPHFGSLKEWYRSMVTTHASSTRAASSSSILYTYDTVMHGFAVQLTGDEARLMSSAPGVIGVYEDRVLYPQTTRSPGFMGLEPGNGAWKQTDFGDGVIIGFIDGGIWPESASFNDSGLGPVRSGWRGKCVDAHGFDANLCNNKLVGAKAFSAAADAVAGRKSRGVPSPRDKDGHGTHVASTAAGAEVRNASLYAFSQGTARGMAPKARIAMYKACSENGCMHADIVAAVDAAVKDGVDIISISLGRSFPIAFHDDVLAVALFGAERKGVFVVVAGGNAGPQAARVVNSAPWMTTVGAATVDRLFPAHLTLGNGVVLAGQSLYTMHAKGTPMIPLVSTDGINSWTPDTVMGKIVVCMFGASDADGILLQNAGGAGIVDVDSYEWSRDGSALYSFTLPGLTLSYTAGEKLRAYMVSVPYPVASLSFGCETVISRKNRAPVVAGFSSRGPNPAAPELLKPDVVAPGVNILAAWSGDAPLAGVFVPDGRRANYNIISGTSMACPHVAGIAALIKKKHPSWTPAMVRSALMTTAGTVDNRGGHILDNGHTDTLGRTDNVRVATPLVAGAGHVHPDLALDPGLVYDAGERDYVDFLCALNYTAEQMRRFVPDFVKCTGTLAGGPAGLNYPSFVVAFDSRTDVVRTLTRTVTKVSEEAEVYTATVVAPEHVKVTVTPTTLEFKEHMETRSYSVEFRNEAGWHREAGWDFGQIIWANGKHKVRSPVAFQWKN

SEQ ID NO: 53842 - protein, 397 aa, Zea mays
  Coding DNA Sequence Number=SeqID_12063
  Gene Ontology: Mol. function=calcium ion binding; Cellular component =integral to membrane
  Homolog annotation: Hit_ID=Q8SA97; Match level="QueryCoverage=45%, HitCoverage=24%, E-value=5e-15, Identity=37%"; Hit description =Ornithine carbamoyltransferase
MGLSVIPFIIAQFPKMLKMHREQRLAMLLALVVSFALMLAYCLLFRKIDMDESRSLSRAELHALIVGIKLRGGSACPWGGAFSSKFIHEYHEVQERTASQWVIRNCALTEWNGTVQRTRQEHDELVNSEVVSAIIFASRKKQRTCSLTFSEVYGCVTMNNTLCLGVLLALIYFRNLTWDFSSEVLIILLVCVVTTLFTSFWTTVWQTNLSGTIIRGTLKAPNSQLAVRPDLRHHRKLRSARPRARTRAKPRKTANTAPPDPGLGLGLSPRRRRTPLRPTQGSDLGSAPEDGELRSARPRARTRAKPRKTANSAPPDPGLGLGLSPRRRRTPLRPTPELGLSPGLSRRSPPRPTQGLGLDHGHGRQTRPRPRRSLHIAQPKARAGHVNGRHHHYPTPS

SEQ ID NO: 53843 - protein, 284 aa, Zea mays
  Coding DNA Sequence Number=SeqID_12064
MSPNSPTPCPCPTLERGSRRFLPHARAATTDLAHSLAVIVDLAPPCPRSMDSRSPSALRPPSWCPPPTPLLPGHDPHPRPMHAPVVTSARFPSRPPAYAHLPPAKPGANRPHDRRDCSARPPRTSRLLQTTRMLHLPTPACQPLTSPLTPPLTARTLQTFRTLRLPTPASRDRRQPCRDRSAKAANVAFRRHARARFAPSSIPRRKGANMSSVHAANKRPDQSAVSNLFPCSIPGPFISPPRPLHSHASVPLERKDEGEGDCPAIGEDRYLILLNRAGLDQGMP

SEQ ID NO: 53844 - protein, 56 aa, Zea mays
  Coding DNA Sequence Number=SeqID_12065
MDKTHFHLLVTDFQSTNLPDSDVDSDVTLIEKHVITICGDIFIQIEKISVYGVMAI

SEQ ID NO: 53845 - protein, 121 aa, Zea mays
  Coding DNA Sequence Number=SeqID_12066
  Subcellular localization annotation: CTP_CleavageSite=65; ConfidenceScore=5.07e-01
MDMAPMRSVPSPMESKDCSSVLYPASTSKYGSYYCHVVMQPIADVSRSRRIAVTHRLSQSPSAVSASPARRVAIVAKLLSDGILNSPFTAQGKGRSERDETDSESNSFGKNDEMSEDEMAV

SEQ ID NO: 53846 - protein, 191 aa, Zea mays
  Coding DNA Sequence Number=SeqID_12067
MTTAALSSLTEAAGHQQGLDRSDSCPSAKLRCSSDSHNITPAGCQDLSGCHIGMKGQGLLREGWPRGDEGGTGALLGPLTSLTRVDACNPLLQAHPTWARDEHEGRGTFHLSHTRLRPPRSPPFALAHALDPSGLGHATHSLVGLGTPRFRNADTYLNKTLRRTNAIGSNQSSKEHAYYKTLIKSLRSKVL

SEQ ID NO: 53847 - protein, 178 aa, Zea mays
  Coding DNA Sequence Number=SeqID_12068
  Homolog annotation: Hit_ID=Q6QP54; Match level="QueryCoverage=43%, HitCoverage=36%, E-value=1e-14, Identity=52%"; Hit description =Putative kinase
MALPVDAAGPHPRPGDVGAPPKLGSSLSSVAEAEPEPLGRARRRSFGRGQGGVRALRSGEADPSPSPGSGGAEFAVFRGLARVRALGRAERSFPWRLWQVLAVCQSYSVKCTAVGVAQAALSFCQTGLWSGEVTAVTSALGGARQDKGLYADGGYQLRIRRLEGFIGLVVKALLGRFE

SEQ ID NO: 53848 - protein, 81 aa, Zea mays
  Coding DNA Sequence Number=SeqID_12069
  Subcellular localization annotation: CTP_CleavageSite=18; ConfidenceScore=5.08e-01
MADAKIGKGLQVTTGRIVSGLGSAFPRTRGARSEGARTLVVGRAAPALGEEAECHGEQKVHHGGGWSRGRSVLDTTTRTGR

SEQ ID NO: 53849 - protein, 578 aa, Zea mays
  Coding DNA Sequence Number=SeqID_12070
MELEARQLVAHRGGCRCQRWTCERAEGRLTSLHLGTQRNGCAVAWAAGPGADAITGGGGPPATAAAAAAAAAWAIFRAGGTVGEPSTQLPDKQHYNPAKQVKDISPEAHPPVTALLVVTYRSSTCGPSKRGLAHARRENSTEGTSNRESGNRKRCVDGKSKSLLKLTEWPPACLPYNCTSCRARGSKPPPLLLLQALYFQACYSAPIASMKKAVSVRGGGKGGTAPTDLLVCFAARQHLALMPKPICSPSRATMDKAAAARRRQLQLQLPGASAAAGGARVRGGSSPMFRGSKAKQRAEEEEEPQSPKVTCAGQIKVSRPKKVKPASTAAAKHSSDGAGGARSWLTVMEEIERLHGRRKKAGWLENLGIRRHALPFVGGALRSLRSKARCFGSLHAAAVDSSVDSDGNGNGNDAAGRGSERGAGGSAAASVFYKWLMVLEGDQEPLEQDETRYDEEFGQGEDVERQVGKETDEGTNGPTSAPPPNALLLMRCRSAPATGLSMSRRRTCEQLAGVVEQGKGAAGGVPGDAETEEDKEELAFTCTAPGFMKLSLDIAKETWVVGGRDPIARSRSWKRSLH

SEQ ID NO: 53850 - protein, 252 aa, Zea mays
  Coding DNA Sequence Number=SeqID_12071
  Gene Ontology: Mol. function=DNA binding; Biological process =regulation of transcription
  Homolog annotation: Hit_ID=Q10S98; Match level="QueryCoverage=26%, HitCoverage=17%, E-value=7e-21, Identity=71%"; Hit description=Myb -like DNA-binding domain, SHAQKYF class family protein, expressed
  Pfam annotation: Domain name=Myb_DNA-binding; Domain location=19-70; Score=38.3; E_value=2.6e-08; Accession=PF00249.21; Description=Myb -like DNA-binding domain
MRGFERKGVRQYNRSEVPRMRWTEELHRQFVEAVECLGGQDEATPKRILQLMGAKGVSISHIKSHLQMYRASISSSSSTHHQPSLQKSTSTAASNNKRVFFTREDCASQEGNAPASDKNIYTTTVRGCGQYSSPYQIPSLQQVFRCWEQKRGRVAWNSDVLTTEKGVIIRPSHTRKHETQQHTGCDLTLSIGLWEDASSSDDADGSSSISEELLPAPAAGGARRVAAVVKEEEESKPAALNLDLTISSSWLA

SEQ ID NO: 53851 - protein, 256 aa, Zea mays
  Coding DNA Sequence Number=SeqID_12072
  Homolog annotation: Hit_ID=Q6QP51; Match level="QueryCoverage=18%, HitCoverage=21%, E-value=2e-12, Identity=72%"; Hit description =Putative growth-regulating factor 1
MTASKKVRHVVRFHILFLFLFLSLATGTGKGDTPKGIILREGSGPRAPLLIRGSKAGPSEGFDNRLRALGLRALLLIRGSNAGPSEGFDSRLRALGLRAHHWSEVRRLAPQRGSTAASGHSGSAPTTDQGFVGWPPKGSTAASEHVERGMTLGSSASPDPRARAQPQCRTTDSASPDPRARTQPRPRKTDSTSPDPRARTQPRLRKAVSASPDPRARTQPQPRKMDSASPDPRARTQPRLRKAVSASPDPRARTQP

SEQ ID NO: 53852 - protein, 51 aa, Zea mays
  Coding DNA Sequence Number=SeqID_12073
MAGTPSAMEKQSSMDPAEKRTRAEKGLRLGNLARCGRVRLKIIFVTILATM

SEQ ID NO: 53853 - protein, 102 aa, Zea mays
  Coding DNA Sequence Number=SeqID_12074
MAGTPSAMEKQSSMDPAEKRTRAEKGLRLGNLARCGRVRLKVRHGRPREGRASAGEERGALHGRSGASRQQRIAVEKKPARQGTSRAHDRGGEHRAELRRDL

SEQ ID NO: 53854 - protein, 102 aa, Zea mays
  Coding DNA Sequence Number=SeqID_12075
MAGTPSAMEKQSSMDPAEKRTRAEKGLRLGNPARCGRVRLKVRHGRPREGRASAGEERGALHGRSGASRQQRSAVEKKPARQGTSRAHDRGGEHRAELRRDL

SEQ ID NO: 53855 - protein, 1069 aa, Zea mays
  Coding DNA Sequence Number=SeqID_12076
  Gene Ontology: Mol. function=protein kinase activity; Biological process=protein amino acid phosphorylation
  Homolog annotation: Hit_ID=Q0WP97; Match level="QueryCoverage=92%, HitCoverage=88%, E-value=1e-165, Identity=36%"; Hit description=COP1 like protein
  Pfam annotation: Domain name=WD40; Domain location=1029-1067; Score =7.7; E_value=4.6; Accession=PF00400.22; Description=WD domain, G -beta repeat
  Pfam annotation: Domain name=WD40; Domain location=752-789; Score =12.7; E_value=1.2; Accession=PF00400.22; Description=WD domain, G -beta repeat
  Pfam annotation: Domain name=WD40; Domain location=801-839; Score =1.9; E_value=22; Accession=PF00400.22; Description=WD domain, G-beta repeat
  Pfam annotation: Domain name=WD40; Domain location=881-919; Score =21.2; E_value=0.0037; Accession=PF00400.22; Description=WD domain, G- beta repeat
  Pfam annotation: Domain name=WD40; Domain location=924-961; Score =29.7; E_value=1e-05; Accession=PF00400.22; Description=WD domain, G -beta repeat
  Pfam module annotation: Pfam domain module=WD40::WD40::WD40::WD40::WD4 0; Domain location=1029-1067::752-789::801-839::881-919::924-961
MEGTAAEVGGAGADAAGDVQIKGAKENAQPTAAQQQQPSGSEALEMPATPLQRDIDWSEHFSFFTSLGGFGGSSDGARGLTSVGLSNSESRPDSVAQRGLDHDTEERVEELTLKNCINTGIQPEVSAGGSTSSRDRPTRIKGLWGNFTRIARRTSDLASRENTALSSGDIANLRAGDASSMEKLATSLASNIISRNNNASGNEAPMSHVGYVNNEFMMCSQQILLSPWSNQDNALKVSSFSNRILNRMRSKTVAPSSRVLRSPLQIKSKGKGVVCQGAREEIQVQANARPRDPLDKIPTIPSSIHDCMARVDHMLFSTGGNVTKSHSEGSSLRELIKPGWQTMTKFEKMHLFKQIIDLVDKCHAQGFTLQHLRPSYFMVLSSNQVKYIGSYTTQDLPTSIKQEVAREDLVNRKRTFGQRIDHQESNDHGNLTLKYQKVDEQGSVAIRQPANTFWTDKICDNQNEDVNRGVLRQENFSHTAREGFKLVEPYGSNISCAQHVSSSATQQPAFELRNLEESWYKSPEELSQFKGTFPSNIYSLGVLLFEPAYCFFREILGCDLINGGQDLSLLDEAPVSIGEDDTESSLLLNFLSQLKEEKAMQSAKLSAELGSLQTDITEVDKRHSARMRLSLDDTDVLPSSSALSGASVSALQGALLSGLLPASYKSSIYEERVMRNLVQLENAYYSMRSSLDTCETNVIKRPDNEALRARENFHQLHSDSDAKDEKTDRLGCFFDGLCKYARHNRFEVRGILKNADILNSPNVICSLSFDRDEEYFAAAGVSKKIKIFEFDALLNDRVDIHYPLIEMPSKSKLSCVCWNNYIKNYLASTDYDGTVQFDAHVPLKSLRACLGVDYVLGRLWDASSGQGFTQFTEHRKRTWSKNCVDTIRNVANVCCVQFSPYSSRMLAFGSADYKIYCYDLRNTRIPWCTILGHGKAVSYVRFLDPYTLVSASTDNTLKIWDLNQTNCSGLSTDSCSLTLNGHTNEKNFVGLSVHDGYITCGSETNEVFSYYKTFPMPITSHRFGSIDPITGQVTNEDNQQFVSSVCWRGKSNMVVAANSSGSIKVLELV

SEQ ID NO: 53856 - protein, 89 aa, Zea mays
  Coding DNA Sequence Number=SeqID_12077
  Subcellular localization annotation: CTP_CleavageSite=47; ConfidenceScore=5.25e-01
MAPTPGSAALAVARVRPPAPACLARVVMAPARPRARPAHGPDACATRSQHVKRGFARGNETDGFRYDYGNGEDEAVEGDFQEFQDYDEF

SEQ ID NO: 53857 - protein, 71 aa, Zea mays
  Coding DNA Sequence Number=SeqID_12078
MEDQLESSVPEKLIRGVNWVPDSSDEEDKDQQENIAAEEDDVDVHALMQLASTEFAFELMNLISLTKTDTC

SEQ ID NO: 53858 - protein, 180 aa, Zea mays
  Coding DNA Sequence Number=SeqID_12079
  Homolog annotation: Hit_ID=Q6QP51; Match level="QueryCoverage=67%, HitCoverage=54%, E-value=3e-09, Identity=46%"; Hit description =Putative growth-regulating factor 1
MAGKHPQTNRRARFKSRLRLPKGRDLARAQPRAGAVVPDEFTPRPRTSSGSEHTLGSPEAWLGENSAARPAPTTVPTTQAKLTTSHDQPPSSASGATGSSASPDLRLRPREEVSASPDLRLQPRKEVSASPDLRTRPRPRSREESCPRPTPASASREASTSPDLGLGPTAPTGDTSLPYS

SEQ ID NO: 53859 - protein, 154 aa, Zea mays
  Coding DNA Sequence Number=SeqID_12080
MEKPRRWDRLGARRRPWVHGEPPHVRPHRPQQQEKERRGARVKSSCAERSGSMEEGDGGRAEGARRVDPAPCTMDPREEDNGGRAGGWRGGAVGQGQRGCSARGTHRCAREQGEELAEWRSWRSWRQGMRVWTDAVAAAVARTKAPSHVDLSRD

SEQ ID NO: 53860 - protein, 134 aa, Zea mays
  Coding DNA Sequence Number=SeqID_12081
MGEEERIHGKKNGALGRACKEGRSACWGGSQGRAPGRGQGAPTMERLLATCREGAPWGSSSLSHGAGEEEGDSARAGLREGEGAGRALGHGGKLGCLSYTGAMGGAALVCMRSWKEDGVGRRSQGEIKWRLGGR

SEQ ID NO: 53861 - protein, 121 aa, Zea mays
  Coding DNA Sequence Number=SeqID_12082
  Homolog annotation: Hit_ID=Q67UZ9; Match level="QueryCoverage=53%, HitCoverage=19%, E-value=9e-07, Identity=34%"; Hit description =Putative aspartic proteinase nepenthesin I
MTFSVGTPPQKLSALADTGSDLIWVKCGACKRNLCNDLPAHQYSAAAGAECSYKYSYGLASIVLGCTNMSEGGYGSGSGLVGLGRGLLSLVSQLECQEHYIRSTSLVGEASSSILTSTQWS

SEQ ID NO: 53862 - protein, 80 aa, Zea mays
  Coding DNA Sequence Number=SeqID_12083
MNSGLNKIAGSVHLSPPVISTPRSAAVTAIHAQLGQDITVDVKRSEGEWIEPTPPYPLARRRGRATVTEVAAVYFGHATP

SEQ ID NO: 53863 - protein, 155 aa, Zea mays
  Coding DNA Sequence Number=SeqID_12084
  Homolog annotation: Hit_ID=Q2QTF1; Match level="QueryCoverage=56%, HitCoverage=64%, E-value=1e-17, Identity=57%"; Hit description =Expressed protein
MAACIVIVASEEEHGDDIALAQEDMECKARDVPGGASALGNKRPAQASGEGEEHENSGPSDKHGGCGKGERDGHVQQAEHNVVHDGCIERDWPENEEEIMVEEEVVTPAENPPTENNFYFDIRGVDPEPLATQGKARCIIPFPVVLKSLSPYMMH

SEQ ID NO: 53864 - protein, 75 aa, Zea mays
  Coding DNA Sequence Number=SeqID_12085
MDNGKDIHDAEVEAKRLVKFLPALELRSCPPRSAVTSDDIKISTTISCSLPNPRSPVIPSSLVGRILKNSVAQGF

SEQ ID NO: 53865 - protein, 69 aa, Zea mays
  Coding DNA Sequence Number=SeqID_12086
MACGYTCIAGGGRVVPNFVVPINGVLVKWGKLTGGARRAVKGEGRGEAGSQDQAVSDIAGHERGRAQLG

SEQ ID NO: 53866 - protein, 77 aa, Zea mays
  Coding DNA Sequence Number=SeqID_12087
MDPLLSSLYAALTITVRSHLCKQQAKDRRNGAGGWCKKKETARSRCSREDCGAGREGVGFFLRANNLRLGSLQFTTY

SEQ ID NO: 53867 - protein, 333 aa, Zea mays
  Coding DNA Sequence Number=SeqID_12088
  Gene Ontology: Mol. function=DNA binding; Biological process =regulation of transcription, DNA-dependent
  Homolog annotation: Hit_ID=Q851V5; Match level="QueryCoverage=98%, HitCoverage=85%, E-value=5e-72, Identity=38%"; Hit description =Putative auxin response factor
  Pfam annotation: Domain name=B3; Domain location=248-333; Score=18.2; E_value=0.00062; Accession=PF02362.12; Description=B3 DNA binding domain
  Pfam annotation: Domain name=B3; Domain location=28-122; Score=71.4; E_value=2.8e-18; Accession=PF02362.12; Description=B3 DNA binding domain
  Pfam module annotation: Pfam domain module=B3::B3; Domain location =248-333::28-122
MRKPSKGCKERDANYHRNDHTDDHGGKHFFKVLVGDFHKRLVIPGKFAKHFADKVEGSITLESLGGYTFDVQVAKDLGRVVLQSAGWKSFVSAHYLKKMDFLVFKYDGMSRMKVLIFDPSGCEKVPPSFVAENASSGGVKREAPIGLSGSYARLPMKAPETKRKSWKQMDRSRIIMNASSSLSNSSGGMASSEDDEAHPVPSYMLPQGTRLDRLQKKILKERLRDICSEIPIYVCVLKKTNISGHSQALEFSINYSDLYLPFKSRELILRCHGNSWEVLLRVKLPGAPRKCKRLCKGWARFAGDNSLQLGDICLFEPLDTKNGTMNVHIIRRD

SEQ ID NO: 53868 - protein, 343 aa, Zea mays
  Coding DNA Sequence Number=SeqID_12089
  Gene Ontology: Mol. function=zinc ion binding
  Homolog annotation: Hit_ID=Q94IQ6; Match level="QueryCoverage=71%, HitCoverage=81%, E-value=1e-131, Identity=94%"; Hit description =Putative methyl-binding domain protein MBD111
  Pfam annotation: Domain name=MBD; Domain location=135-212; Score =34.5; E_value=3.7e-07; Accession=PF01429.10; Description=Methyl-CpG binding domain
  Pfam annotation: Domain name=zf-CW; Domain location=75-128; Score =86.7; E_value=7e-23; Accession=PF07496.5; Description=CW-type Zinc Finger
  Pfam module annotation: Pfam domain module=MBD::zf-CW; Domain location=135-212::75-128
  Subcellular localization annotation: CTP_CleavageSite=32; ConfidenceScore=5.05e-01
METSKSPQSSKNSHIVVPSDSNGPRFDNDGFSSEAASNQMVVFNSEAGDKEQDELGENRLQKSIITRGISPSIGAFTVQCAKCFKWRLIPTKEKYEEIRERIIEEPFVCKRAREWRPDVTCNDPEDISQDGSRLWAIDKPNIAQPPRGWERQIRIRGEGGTKFADVYYTSPTGRKLRSLVEVDRFLQENPEYGAQGVTLAQFSFQIPRPLRQDYVKKKPKLINPSDEASMIASKSFQPEEVEGAAEVAQDLLESGEMGLPPGVHVQAHLLDDVGDVGPGEGQVLERVGQTPVGCRAGVWGPVVLRELHLSVNRRGAGLAVGHASPLQDVDGVLALVEELRKRP

SEQ ID NO: 53869 - protein, 67 aa, Zea mays
  Coding DNA Sequence Number=SeqID_12090
MAWMRNTVACLLAFIATIEFLSLHRGSGRMDMGAAMATTTGSCDSVRLLHRWTDLLEYNLFLNPKDI

SEQ ID NO: 53870 - protein, 203 aa, Zea mays
  Coding DNA Sequence Number=SeqID_12091
MAGGNTLAGAKERWLAGEAPAAFTGVRRGRALLRRAARQGSPAAFTGVQGCPGAARHGTARVPDVRGQILAVRGQVPGARRRPPQPQEPFARTARQADLGLRGRSGGRISACTVCSGGWLLRGRISAAAVCSGRRISASAVCSGRRLLRGRFGGRISAATVCSGERLLRGRARRGGGHGREQPAASELDAERALLRRAPREVA

SEQ ID NO: 53871 - protein, 93 aa, Zea mays
  Coding DNA Sequence Number=SeqID_12092
  Gene Ontology: Mol. function=zinc ion binding
  Homolog annotation: Hit_ID=Q94IQ6; Match level="QueryCoverage=64%, HitCoverage=20%, E-value=4e-27, Identity=100%"; Hit description =Putative methyl-binding domain protein MBD111
MDKIKGLSSGGKRKTRVTTELTSMTEALRGTPVKPIAWAVATKHEGDASEEASLTDEAPTSEVMLARKRKAGSSLSIEPNHLSDELEPKLEDA

SEQ ID NO: 53872 - protein, 633 aa, Zea mays
  Coding DNA Sequence Number=SeqID_12093
  Gene Ontology: Mol. function=protein serine/threonine kinase activity; Cellular component=nucleus; Biological process=protein amino acid phosphorylation
  Homolog annotation: Hit_ID=Q6ZI89; Match level="QueryCoverage=96%, HitCoverage=79%, E-value=1e-169, Identity=58%"; Hit description =Putative MEK kinase
  Pfam annotation: Domain name=Pkinase; Domain location=179-446; Score =287.3; E_value=3e-83; Accession=PF00069.15; Description=Protein kinase domain
  Pfam annotation: Domain name=Pkinase_Tyr; Domain location=179-446; Score=94.2; E_value=3.9e-25; Accession=PF07714.7; Description =Protein tyrosine kinase
  Pfam module annotation: Pfam domain module=Pkinase::Pkinase_Tyr; Domain location=179-446::179-446
MELIPSAGARCARMTKEAPPARCADPFVYPGARTVPPDAHKRTAEEKHLLSCSAPPPREHQKFFEVPVTNARKVHLQSYEAATSGTTLRGRMFHKNTRARTRSLSPGPRGHDFASSFASPRDVGVSSRSVVKRMDDLNSRSQPFFASSLSQPLPRPPAHIASCLIPSSPIASAQSQSQWKKGKALGSGTFGQVYVGFNSESGKFCAIKEVKVILDDSKSKERLRQLNQEVDMLRQLTHQNIVQYYGSELTDEALSIYLEYVSGGSIDKLLKYYGPFKEPVIRNYTRQILSGLAYLHGRKTVHRDVKGANVLVGPNGEVKLADFGMAKHITSLAEIHSLRGSPYWMAPEEKLCEVLQILQVIMNKNGYSFEVDIWSLGCTIIEMGTGRHPWHQYEHVHAMFKIVNTKDMPEIPERLSKEGKDFLSLCLKRDPAQRPSATQLLRHPFVQDNQEISGAKCNTTLRNGLSSPAEACHKKVAYMLSNKEPSLKRSVAPLRDIGGIRARGFTGSSSACVSPHKTSRHSNLHLLTILLSGSSHHTQYLDFCHHPSCSRHIDVRANMSLPVSPCSSPLRQLKQWNWSCVASPSHLAFSSGSVAHNTVSDMQNQMRGSDPVPDPWRDISHRRQSPYDSPKRF

SEQ ID NO: 53873 - protein, 300 aa, Zea mays
  Coding DNA Sequence Number=SeqID_12094
  Gene Ontology: Mol. function=heat shock protein binding; Cellular component=integral to membrane; Biological process=protein folding
  Homolog annotation: Hit_ID=Q6ZI90; Match level="QueryCoverage=99%, HitCoverage=100%, E-value=1e-127, Identity=66%"; Hit description =Putative DNA J domain protein
  Pfam annotation: Domain name=DnaJ; Domain location=6-68; Score=116.2; E_value=9.1e-32; Accession=PF00226.21; Description=DnaJ domain
MAKETEYYDVLGVCPAASDEEIRKAYYIKARQVHPDKNPNDPHAAENFQALGEAYQVLSDPLQRKAYDGYGKNSVSRENILDGTVVFTLLFGSELFEDYIGHLAMATMASSELTSDNDTPEKLQDRLKTKKDLLIVPKLRQRSSHALVSLLIPAAKELGKKAMYLGVPFVAEWVRNKGHLWKSQITAAKGALQLLQLQEEACRQSSKDGNATEQDVDLQMRMNKDLMMSSLWKLNVVDIEMTLLHVCEMVLSENNVKKDDLKARATALKFLGKIFMGIGRLFRCLCNPAYDVDDDFEPHK

SEQ ID NO: 53874 - protein, 126 aa, Zea mays
  Coding DNA Sequence Number=SeqID_12095
  Subcellular localization annotation: CTP_CleavageSite=21; ConfidenceScore=5.05e-01
MAPSQRGHRPPTPAMSSKRRRSAMRVGDLHVLNELSRLRTASRDADWVPKAMIRFRNLDFVLYGNEERGNQFLVTSKSNDIQFLPLLHTLTSSARKPKEPTEALHSPTLLADNRVSELLGFPEEAS

SEQ ID NO: 53875 - protein, 841 aa, Zea mays
  Coding DNA Sequence Number=SeqID_12096
  Gene Ontology: Mol. function=oxidoreductase activity, acting on the CH-CH group of donors; Cellular component=mitochondrion; Biological process=electron transport
  Homolog annotation: Hit_ID=Q6ZDX3; Match level="QueryCoverage=99%, HitCoverage=99%, E-value=0.0, Identity=81%"; Hit description =Putative acyl-CoA dehydrogenase
  Pfam annotation: Domain name=APH; Domain location=42-311; Score =178.3; E_value=1.9e-50; Accession=PF01636.13; Description =Phosphotransferase enzyme family
  Pfam annotation: Domain name=Acyl-CoA_dh_1; Domain location=685-836; Score=158.7; E_value=1.5e-44; Accession=PF00441.14; Description=Acyl- CoA dehydrogenase, C-terminal doma
  Pfam annotation: Domain name=Acyl-CoA_dh_2; Domain location=700-825; Score=36.0; E_value=1.3e-07; Accession=PF08028.2; Description=Acyl -CoA dehydrogenase, C-terminal doma
  Pfam annotation: Domain name=Acyl-CoA_dh_M; Domain location=572-626; Score=68.4; E_value=2.3e-17; Accession=PF02770.9; Description=Acyl -CoA dehydrogenase, middle domain
  Pfam module annotation: Pfam domain module=APH::Acyl-CoA_dh_1::Acyl -CoA_dh_2::Acyl-CoA_dh_M; Domain location=42-311::685-836::700 -825::572-626
MTKLTSELLRPVVPAAALDEAALLRYLVANVPGFPGPAPALSLTQFGHGQSNPTYCIHASAPGGGQPRRYVLRKKPPGAILQSAHAVEREYQSFPIGKQVLKALGDHTDVPVPKVYCLCTDASVIGTPFYIMEYLEGIIYPDSALPGVTPSKRRAIYLSTAKTLAAIHKVDINAIGLQKYGRRDNYCKRQVERWERQYLASTGEGKPARYQRMLDLARWLKEHVPEEDSSPGPGTGLVHGDYRPDNLVFHPTEDRVIGVIDWELSTLGNQMCDVAYSCLPYIIDAAPSARTSYGGFQDTGIPDGIPQLEEYLSIYCSFAARPWPAANWKFYIAFSLFRGASIYAGVYHRWTMGNASGGERAKFAGRVANAMIDCAWDFINRVNVLQELPSKGSQVLGASWQEFHREEESSTSEKNQGKFVPSEKVMQLRKKLIKFIEDHIYPMEAEFYKHAQSTSRWTIHPEEENLKALAKKEGLWNLFIPLDSAARARKLLFEDHSQISLGSSNNLLLGAGLTNLEYGYLCEIMGRSVWAPQIFNCGAPDTGNMEVLLRYGTKEQQKQWLVPLLEGTIRSGFAMTEPQVASSDATNIECSISRQGDFYVINGRKWWTSGAMDPRCKILILMGKTDFSAPKHKQQSMILVDINTPGVQIKRPLLVFGFDDAPHGHAEITFENVRVPVTNILLGEGRGFEIAQGRLGPGRLHHCMRLVGAAERGMNLMVERALNRTAFGKRIAQHGSFLSDLAKCRIELEQARLLVLEAADQLDRHGNKKARGILAMAKVAAPNMALKVLDMAMQVHGAAGVSSDTVLSHLWATARTLRIADGPDEVHLGTIAKLELRRARL

SEQ ID NO: 53876 - protein, 216 aa, Zea mays
  Coding DNA Sequence Number=SeqID_12097
MVVRSIPKLTESEARTVSQNLYNLVERAVVQQAEIDCHAAAAVQVQGRTAQGRLHGWALSAVACSRACMGQAAGAHAAQRAGAAGLRRSGRRVVCRCRGGSASGRAQAAWDWDSGSQEGETAARHGETETDSILGVVAGATTNTNGTFSMELDMTNALAAFIGGCTLVVDTPLVKCNADLTDVGSLVSYLQGPLTRLLGGIFHLFPAGFSFHVRRA

SEQ ID NO: 53877 - protein, 170 aa, Zea mays
  Coding DNA Sequence Number=SeqID_12098
  Homolog annotation: Hit_ID=Q10LP9; Match level="QueryCoverage=41%, HitCoverage=44%, E-value=3e-15, Identity=54%"; Hit description=Zinc finger, C3HC4 type family protein
  Pfam annotation: Domain name=PHD; Domain location=118-163; Score=1.2; E_value=0.043; Accession=PF00628.19; Description=PHD-finger
  Pfam annotation: Domain name=zf-C3HC4; Domain location=119-160; Score= 34.7; E_value=3.1e-07; Accession=PF00097.15; Description=Zinc finger, C3HC4 type (RING finger)
  Pfam module annotation: Pfam domain module=PHD::zf-C3HC4; Domain location=118-163::119-160
MEDDSTEAASSARATVPPPGWTRALANTGASGLAAASLVLLLLYLTGRFLWLYNKNAARAADSSRTPGAAAGASTSLLPAASPPPRRDVPLPSSLSTIPVFFVLHVAAPGLGGGEKAECAVCLAEFGEWEAGRLLPRCGHAFHEECIATWLRVSTTCPLCRAATAPCASV

SEQ ID NO: 53878 - protein, 38 aa, Zea mays
  Coding DNA Sequence Number=SeqID_12099
MSLGIEENVGEVFDELGMTSMAQRTNGEQHDTTTMNRR

SEQ ID NO: 53879 - protein, 151 aa, Zea mays
  Coding DNA Sequence Number=SeqID_12100
  Gene Ontology: Mol. function=hydrogen ion transporting ATP synthase activity, rotational mechanism; Cellular component=proton -transporting ATP synthase complex, catalytic core F(1); Biological process=ATP synthesis coupled proton
  Homolog annotation: Hit_ID=Q9MRJ6; Match level="QueryCoverage=97%, HitCoverage=58%, E-value=1e-42, Identity=76%"; Hit description=ATP synthase beta subunit
  Pfam annotation: Domain name=ATP-synt_ab; Domain location=1-151; Score=27.4; E_value=1.2e-09; Accession=PF00006.15; Description=ATP synthase alphabeta family, nucleotide-binding domain
MEVIDTGTPLSVPVGGATLGRIFNVLGEPIDNLGHVDTSATFPIHRSAPAFIELDTKLSIFETGSEVSALLGRMPSAVGYQPTLSTEMGSLQERITSTKKGSITSIQAVYVPADDLTDPAPATTFAHLDATTVLSRGLASKGIYPAVDPLD

SEQ ID NO: 53880 - protein, 85 aa, Zea mays
  Coding DNA Sequence Number=SeqID_12101
MAHRSYSGPPETFSLPFSPLCLWIHDLFPAIEFVVAPSPSLPNSGDPGATLARASLNSGDLTAVERSDAACSRLFSPWSDPLRSI

SEQ ID NO: 53881 - protein, 81 aa, Zea mays
  Coding DNA Sequence Number=SeqID_12102
MASEDARDQRECRALDGGVERKAGGEQGEDSVTSITMGRDQVKSEQRAQLHAQAGRGAPRRARGRQAEGERGGAAGLDIWN

SEQ ID NO: 53882 - protein, 114 aa, Zea mays
  Coding DNA Sequence Number=SeqID_12103
MVELEYDGDLTDGDDLQFLVDGELDSDTSTDWSWTYDGESLDVESFDNNDDPMSGHWMGIGSSDDDDENDNGSSDYGSSDEDNDGSGNDDSDDDGGACQCNEMPPVTPKVLPYA

SEQ ID NO: 53883 - protein, 32 aa, Zea mays
  Coding DNA Sequence Number=SeqID_12104
MEEADESDIQGPHGREGSEHATNAFKYKAHTH

SEQ ID NO: 53884 - protein, 117 aa, Zea mays
  Coding DNA Sequence Number=SeqID_12105
MGSFPLATVTTERKKGGAAYRRRSGSSGGRVLRLLTAVGLKSKWHKGASRDAKDDIGTKESMNGSPWGSVYVRRRSVEVRRCRFSVSGEGCALGSLATFCYFDQVVFGARHKDSKGR

SEQ ID NO: 53885 - protein, 134 aa, Zea mays
  Coding DNA Sequence Number=SeqID_12106
MGQKPSYLVLLVGLLAIAMLCAGPGHALRQRNDANGGGLEFSLGSKAATAGVKTEPLDPSLSDDYEVCAVMGSGDGCFVAGGGRMVAVGLRAAVWGGLWFWWRGFHVVAGRLGPPNLPGDADFGGVWLEGLKIL

SEQ ID NO: 53886 - protein, 120 aa, Zea mays
  Coding DNA Sequence Number=SeqID_12107
  Homolog annotation: Hit_ID=Q10L77; Match level="QueryCoverage=46%, HitCoverage=6%, E-value=5e-12, Identity=69%"; Hit description =Pleckstriny domain-containing protein, putative, expressed
MLQEQLQAERDLRAALEVGLSMPSGQFSSARSMDMKTKAELEEIALAEADVARLKQKPQFKLSKHPKLQQRQLEGKLNLQGTTTEAQRLGEWRLDRVRVEVEMAMGTRNPTGFYPIKVRV

SEQ ID NO: 53887 - protein, 123 aa, Zea mays
  Coding DNA Sequence Number=SeqID_12108
  Homolog annotation: Hit_ID=Q75I82; Match level="QueryCoverage=47%, HitCoverage=14%, E-value=3e-20, Identity=77%"; Hit description =Expressed protein
MEDLYAKNENEHGGNDDGAMSHTRTLHSACSYSTFPLNPSRLASTKAEENRLELLYIQWTEHHKRLSNFLRTKAEPPIYYMPTKPIIDDLAIVEQNKEKLNQYIERVAAGAALLTPRAPPAGS

SEQ ID NO: 53888 - protein, 120 aa, Zea mays
  Coding DNA Sequence Number=SeqID_12109
MAQRTPWARAHASERGGLTAWNGDGGEGADFGSTAGEIPRRFSAGSPVLRRGSGGEARARVGDLGGGVNLTGGGLGWPVHGGWRALAVVKSLARPPGAIGDEQVCARLVTGRRTLRARAI

SEQ ID NO: 53889 - protein, 109 aa, Zea mays
  Coding DNA Sequence Number=SeqID_12110
  Subcellular localization annotation: CTP_CleavageSite=10; ConfidenceScore=5.11e-01
MQGSCLTAIAAKSTKDLPTLATPLLPLPLSAIANYPSDSGVNKRSNGIHMIMDRRLTFIREGVSGNMILSRSLRIPRFRFNRTTSWAEEKYKNQNGRALGSWPRGLEEF

SEQ ID NO: 53890 - protein, 89 aa, Zea mays
  Coding DNA Sequence Number=SeqID_12111
MRNRVKGTGVREGEKHGHGKTRKRWFGKMNMALAAAARWGRATWGGMGWGALGRAGLTAWACGAGLRRKSAGEGQVGRTRRPAMGEELG

SEQ ID NO: 53891 - protein, 64 aa, Zea mays
  Coding DNA Sequence Number=SeqID_12112
MAVVNIGDVPTLAVWTLANVAGHSAECRDIVLANGTFAMKNTTLDMYGGPLSDGVLAIFLEKLL

SEQ ID NO: 53892 - protein, 135 aa, Zea mays
  Coding DNA Sequence Number=SeqID_12113
MVDDGCVFSGVHTVRGEDGNSKGVRVRDGRGVSGGATLEGVRRVGSDLRLQVYLGPIVRGAISMMTTWRRAVRLLSPNRGGGTILLMAVLCALIMQSRSIRTSLAQLVKGMVQLGVEHGDQIDHATQSRNALTNG

SEQ ID NO: 53893 - protein, 69 aa, Zea mays
  Coding DNA Sequence Number=SeqID_12114
  Subcellular localization annotation: CTP_CleavageSite=41; ConfidenceScore=5.21e-01
MSLRPSELAKLRRSSFKASVSAADGLRQRVSVMDSIREASRCSALRKKRSFEAVALAQSHPLALEKTIE

SEQ ID NO: 53894 - protein, 83 aa, Zea mays
  Coding DNA Sequence Number=SeqID_12115
  Subcellular localization annotation: CTP_CleavageSite=44; ConfidenceScore=5.68e-01
MATSKSMARRASPTPMATICAMQSPILCVPSLTAAPRSAAGRQRAAVVRLGASLCETLARPAQEDRPGPCSPLARRSVTIPAS

SEQ ID NO: 53895 - protein, 240 aa, Zea mays
  Coding DNA Sequence Number=SeqID_12116
  Gene Ontology: Mol. function=catalytic activity; Biological process =metabolic process
  Homolog annotation: Hit_ID=Q9LEA0; Match level="QueryCoverage=96%, HitCoverage=97%, E-value=3e-43, Identity=42%"; Hit description =Carnitine racemase-like
  Pfam annotation: Domain name=ECH; Domain location=18-184; Score=18.0; E_value=1.8e-09; Accession=PF00378.10; Description=Enoyl-CoA hydrataseisomerase family
MESSSKGMCTVERRGRVHLITMTGAGEHRLNPDLLAALRSAVAASAGAGALVLAAEGKFFSNGFDLAWARAAPPGLHGAMDGGLRALLADLLALRVPTVAAVTGHAAAAGCALALAHDAALMRASRGLLYMSEVDVGIKFVDFVAAVLRDKVPDAAARRDLVLRGDRVAAAEAVRRGLVDAAVDGGPEDVVAAAVAEAERLAARGWDGEAVAEIRKAAWPQLWAQVKDHGAGPAPARPRL

SEQ ID NO: 53896 - protein, 347 aa, Zea mays
  Coding DNA Sequence Number=SeqID_12117
  Gene Ontology: Mol. function=protein-tyrosine kinase activity; Cellular component=integral to membrane; Biological process=protein amino acid phosphorylation
  Homolog annotation: Hit_ID=Q5QNM3; Match level="QueryCoverage=88%, HitCoverage=45%, E-value=1e-137, Identity=74%"; Hit description =Leucine-rich receptor-like protein kinase-like
  Pfam annotation: Domain name=Pkinase; Domain location=67-316; Score= -54.2; E_value=2.5e-05; Accession=PF00069.15; Description=Protein kinase domain
  Pfam annotation: Domain name=Pkinase_Tyr; Domain location=73-316; Score=-70.0; E_value=3.6e-08; Accession=PF07714.7; Description =Protein tyrosine kinase
  Pfam module annotation: Pfam domain module=Pkinase::Pkinase_Tyr; Domain location=67-316::73-316
MGARRRLRQGSGRLQLLFSFLVLLLQAQASVGAASINGEGAQKLNRAELEVACEDFSNIINTFPTCTVFKGILSSGVEIGVVSTTISSSKDWSRSAESCFKKKIDRLSRVNHKNFINLLGYCLENEPFTRMMVFEFAPHGSLSQHLHVKEFEHLDWAARMRVIMGVAYCLQYMHHELSPPMAIHDVRSDTTFISDDYAAKIADVGVWNELAAKAKAGKEDGSSRAEAPPDLPSNAYCFGALMIETISGRVPDPYDHKPICSWASEHLKDKNYGKLVDASLKEHKESELEAVCEVIQECIDPDPTRRPSMRDVVGKLRDALGISPEAAAPRLSPLWWAELELLSVKST

SEQ ID NO: 53897 - protein, 461 aa, Zea mays
  Coding DNA Sequence Number=SeqID_12118
  Gene Ontology: Mol. function=protein serine/threonine kinase activity; Biological process=protein amino acid phosphorylation
  Homolog annotation: Hit_ID=Q8S1J0; Match level="QueryCoverage=82%, HitCoverage=62%, E-value=1e-152, Identity=62%"; Hit description =Putative serine/threonine protein kinase
  Pfam annotation: Domain name=Pkinase; Domain location=89-300; Score= -28.9; E_value=7.7e-07; Accession=PF00069.15; Description=Protein kinase domain
MEQWRRGGWRTGLWSTGAAVTHWPVKQWSGSALPYGRREEGGGSALPYGQIYHPLKFLHFNPYIDMLVEHRRCSHTCLKQVHIGNSPTYRLERKLGKGGFGQVYVGRRISAPRLSDRNPGSNALEVALKFEHQSSKGCNFGAPYEWQVYKYVHGDVKPENFLLGPPGTPEEKKLFLVDLGLATKWKDAGTGHHVEYDQRPDIFRGTVRYASVHAHLGRTGSRRDDLESLAYTLIFLLRGRLPWQGYQGENKGFLVCKKKMATSPESLCGICPQPFRNFVEYVVNLKFDEEPNYARCISLFDGIVGPNPDIRPINTDGAQKLVYQVGQKRGRLIVDENDDEQPKKKIRMGMPATQWISVYNARRPMKQRYHYNVADNRLVQHIQKGNEDGLFISSVASSSNLWALIMDAGTGFTSQVYELSSYFLHKEWIMEQWERNFYITALAGANNGSSLVIMSRASLKR

SEQ ID NO: 53898 - protein, 233 aa, Zea mays
  Coding DNA Sequence Number=SeqID_12119
MDEFDSGGRSGDRAGAAAAAAAGDDGATPPLPQTDLIVGTCILLMGAWSVALEWRCPSDVSRRVVRSRTPGMAYRFIRVAPQGRLTVCFGVVCGAASSSVMSLASPSCVRRHTPGMVYRLVLSGMWVTVETLVLRSPMTGVDRPHKAVGMRLRSYAAAYNHVGRDLSAPFGMPCLWSGRGRGLVVLTWVSSTGSALPPCRVARRSDGRRLRLAGLLEGGMIGRSASQGCSKEG

SEQ ID NO: 53899 - protein, 85 aa, Zea mays
  Coding DNA Sequence Number=SeqID_12120
  Homolog annotation: Hit_ID=Q6EPN2; Match level="QueryCoverage=54%, HitCoverage=9%, E-value=1e-13, Identity=70%"; Hit description=Fringe- related protein-like
MAASSAPANSGAGASPPGIAGDGDHSWEAAHAPSLSTHSPPRTNRLPHLQDGCLRRYPTLYGSDDRIQACMVELGVPLTKHPGFH

SEQ ID NO: 53900 - protein, 174 aa, Zea mays
  Coding DNA Sequence Number=SeqID_12121
MADLLGDPAWPQLHPRLCTDTPRSGLQCELAPDDARVLRATYLHLGPDVATSAYRPGARLDPASLRGLPHLRMLSIFGCFGVAQAPVELPPALFPGGDTPASELAGAELAAIFRVMADLLGDPAWSQLHPRLCTNTPRSALQSELAPNKARVLRATRLHLERIKLTQGLSSGGQ

SEQ ID NO: 53901 - protein, 211 aa, Zea mays
  Coding DNA Sequence Number=SeqID_12122
MADLLGDPAWLQLNLRLCTDTPRPGLQCELAPDDARVLRATRLHLGPDVATLPCRPGARLYLASLRGLPHLQTLSIFGCFGAAQAPIELPLALFPGGDAPALELAAIFQCELAPDAARVLRATRLHLGPDIATPPCRPGARLDPTSLCGLPHLRTLSIFGCFGAAQAPVEVPPSLFTSSSSLEHIVLKSNPSLTSHIPATLVIIVFRKMAY

SEQ ID NO: 53902 - protein, 170 aa, Zea mays
  Coding DNA Sequence Number=SeqID_12123
MRCRVECADLLRDTERGGGDVGDDSVEEGEGVVGLRGGGQEGDDDDYGEERWPHCLLGQEGRGDQGEGLPGGARRRQRGRSSAVAMTGAVVGGCWVTRTLAGPMGFRDLSGETTLGGSSDIGERAAAWASARRRRAERWLGFGGEVSDEFGWDLGWGAWTERGEDGRRRV

SEQ ID NO: 53903 - protein, 89 aa, Zea mays
  Coding DNA Sequence Number=SeqID_12124
MKNLYTVLKGEHAIGTTGEAIEKDHHVQHSSRIKAADKGVGAKIYGADPLELDTSAATYENAGAKEGGASMRCLDANDDGAEQRVYFLK

SEQ ID NO: 53904 - protein, 333 aa, Zea mays
  Coding DNA Sequence Number=SeqID_12125
  Homolog annotation: Hit_ID=Q10QD2; Match level="QueryCoverage=53%, HitCoverage=51%, E-value=6e-14, Identity=33%"; Hit description =Expressed protein
  Subcellular localization annotation: CTP_CleavageSite=60; ConfidenceScore=5.12e-01
MGGGVMRTAAKVGIARGAAAVAAAKGGRFRHAAPAFATAPAATGSDAAPLVSASGGEVPPAAAQWAASWELDDWEFADCGDVAPAAVVAEREATAAAAKPRLVFAPPSREEAEEATTELRDAIGRAYFNESPVEVVKEQDKEFNKLATDAIIPSMPGHVVQAFYIAEIKHRGSGLCKGLCKHTALLIWGDQSVVASLASDRNVWDAVLKNEKVMEFYKTHQTTPVQTFPEEAATAESPGKFEDATSENASNSELPTGSGASFADFVDNAKKKVMDVVHNITDFFRDLFNDSAEAQTGAGPSAEKGFSATEMAVGGSFMALTIAVILVVLFKRA

SEQ ID NO: 53905 - protein, 91 aa, Zea mays
  Coding DNA Sequence Number=SeqID_12126
MSINRLRSTRRREGSDDAKARDEGYNSAQYATSPSEDVCEGSPPGTGPYFGPPALGWVTYNEKPHSGMGPPDELKGYRPPWATRSDISGQD

SEQ ID NO: 53906 - protein, 73 aa, Zea mays
  Coding DNA Sequence Number=SeqID_12127
MAEGLAQSVLAARGVGSSERDGAVHGVGYRARGADGFSWRRAAIQISIIYIPKIHTKIKEIINILKDVFRKRS

SEQ ID NO: 53907 - protein, 83 aa, Zea mays
  Coding DNA Sequence Number=SeqID_12128
MTARLHRLPGYINSLRDEDITPFIAFAPTCCHKFLPSKKQRLSKPNRVGKKLPKLPKKVAETPLVFIYLLYGNNRGICKFHFI

SEQ ID NO: 53908 - protein, 555 aa, Zea mays
  Coding DNA Sequence Number=SeqID_12129
  Homolog annotation: Hit_ID=Q2WEL1; Match level="QueryCoverage=15%, HitCoverage=9%, E-value=1e-41, Identity=94%"; Hit description=CaM -binding transcription factor
  Pfam annotation: Domain name=CG-1; Domain location=273-379; Score =157.6; E_value=3.3e-44; Accession=PF03859.7; Description=CG-1 domain
MSHHEFLQQESGPDVVERRKGATEAKMTFDVGETVAEAAQNVEDQRPVGDCGAAFHGHFSKVRGDGAGDPGLDNAVHACPVGEVRRGSVVEDAAVQGVFASDEKELIAPAGVAVVGEVEDDVNETPDVLHSDGLGVEVDDRSSLVKEDGVVEALVSTTRWIREVGLIVVDRTAIGGSLSSEGARMCCVLESSANTFGGNIALLGRGGRLLLCLKGLGECSITPGSSLEASFMLGCDLGRSVVEERWLFQTSHGQGRALPGWRAEGRGSCAYMAGNTWLIYQLTPSARRSKAMPCTPSGTVVLYDRKVVRNFRKDGHNWKKKKDGKTVQEAHEKLKIGNEEKVHVYYARGEDDPNFFRRCYWLLDKELERIVLVHYRQTSESRRGDDGSNREGHDNDESNHEDDDPAKETADLAGKVATTRGRGFDAGDGRRAKREALLGRQRWQGGSEQTVNGVSRLDDDGSGGQRRWRRDVDGSGGCSGKGEGRDITISGARISQEDTEKTLLGEESRRRWVRRGGSQVWRIGGCLREGRTNLSGTTAQKALAVAEGDRGGGWW

SEQ ID NO: 53909 - protein, 152 aa, Zea mays
  Coding DNA Sequence Number=SeqID_12130
MEWSAVPACRRETRERFPAEGRSAECAAVGRLPVLEEHHERIAGSGGPAAPGEERWRLEQRRKPTVAGPSEAAGPGAAPGDLVAAVGSAPVGRATSRWPQSKDFGGRATGRRHSCAGRRDQRLGMEGYPGGLGHPSCCDGWGGRNVEPKAPC

SEQ ID NO: 53910 - protein, 101 aa, Zea mays
  Coding DNA Sequence Number=SeqID_12131
  Homolog annotation: Hit_ID=Q2WEL1; Match level="QueryCoverage=61%, HitCoverage=6%, E-value=1e-23, Identity=77%"; Hit description=CaM -binding transcription factor
MAGGAGGRDPLVASEIHGFLTCADLNFDKLMMEAGTRWFRPNEIYAVLANYARFKVHAQPIDKPISMCSTFAINPLPYCTLHMCLFLEYAGGTPYPYIKKG

SEQ ID NO: 53911 - protein, 601 aa, Zea mays
  Coding DNA Sequence Number=SeqID_12132
  Gene Ontology: Mol. function=calcium ion binding; Cellular component =nucleus; Biological process=regulation of transcription, DNA -dependent
  Homolog annotation: Hit_ID=Q2WEL1; Match level="QueryCoverage=98%, HitCoverage=68%, E-value=1e-112, Identity=60%"; Hit description=CaM -binding transcription factor
  Pfam annotation: Domain name=IQ; Domain location=408-428; Score=0.7; E_value=34; Accession=PF00612.17; Description=IQ calmodulin-binding motif
  Pfam annotation: Domain name=IQ; Domain location=461-481; Score=19.8; E_value=0.0096; Accession=PF00612.17; Description=IQ calmodulin -binding motif
  Pfam annotation: Domain name=IQ; Domain location=484-504; Score=26.0; E_value=0.00013; Accession=PF00612.17; Description=IQ calmodulin -binding motif
  Pfam annotation: Domain name=IQ; Domain location=565-585; Score=21.3; E_value=0.0036; Accession=PF00612.17; Description=IQ calmodulin -binding motif
  Pfam module annotation: Pfam domain module=IQ::IQ::IQ::IQ; Domain location=408-428::461-481::484-504::565-585
AYANPGLSQVSESYFGSLKDQANHAPSLLTSDLDSQSKQHTNSLMKTPVSDNMPNDVPARQNSLGLWKYLDDDISLDDNPSSGILPTEQVTGEIPFQITEISSEWAYSVQFSWEMLYFTFSSVKNYPNNCLLPGLVDVEVLVVGCFHENYRHLAGTNLFCVIGDQCVDANIVQTGVYRFIARPHAPGRVNLYLTLDGKTPISEVLSFHYRMVPDSQNLAEDEPQKSKLQMQMRLARLLFTTNKKKIAPKLLVEGSKDSPWISVILLVGQLCIGPHTVEVLGVSPAGRRSVPAPALVVEQAGRFSFAREKMVAALLSAGANPSLVTDPTHDVPGGQTAGDLAAGQGYHGLAAYLSEKGLTAHFEAMSLSKGKRSTSRTESLKRNTKEFENLSEQELCLRESLAAYRNAADAASNIQAALRERTLKLQTKAIQLANPENDASAIVAAMRIQHAYRNYNRKKMMRAAARIQSHFRTWQIRRNFMNMRRQAIKIQAAYRGHQVRRQYRKVLWSVGVVEKAILRWRKKRKGLRGIATGMPVAMATDAEAASTAEEDYYQVGRQQAEDRFNRSVVRVQALFRSHRAQQEYRRMKVAHEEAKVEFGRK

SEQ ID NO: 53912 - protein, 92 aa, Zea mays
  Coding DNA Sequence Number=SeqID_12133
  Gene Ontology: Mol. function=RNA-directed DNA polymerase activity; Biological process=RNA-dependent DNA replication
  Homolog annotation: Hit_ID=UPI00004C1731; Match level="QueryCoverage =100%, HitCoverage=8%, E-value=2e-38, Identity=69%"; Hit description =UPI00004C1731 related cluster
MDDVGEECHRLFGPDVVQGSDLDPLGEFVDGNQQSLSGQVGLPCVELTPLVGADNSSGVGHRGQPVETLSKGFSNKGSGRCVMTASPRVYFL

SEQ ID NO: 53913 - protein, 53 aa, Zea mays
  Coding DNA Sequence Number=SeqID_12134
MAWLSWRSSFGELRVMLPRGAPWALYIRPWGDTCGYDNNVRLKDSELFESISL

SEQ ID NO: 53914 - protein, 145 aa, Zea mays
  Coding DNA Sequence Number=SeqID_12135
MREGLRGGPHGARRRGGKGGCRLATASAATGPDRAVRTEQAVSCRATCLASGPGTTCSTGLCQPGPIPYVPGRARTGPKNGPQAGLTGPCLMYIYMWHRPPSDRTGDEEPRISHHVLGTGILYIHVIFLSAHCPSPRDEITSPCI

SEQ ID NO: 53915 - protein, 135 aa, Zea mays
  Coding DNA Sequence Number=SeqID_12136
MVLRDLGRPAVLRCEIPGAHAEVSAWRYFYCLLTTPEKGSVQTLMFRLTQRPDPMVARRPQFVVCARAPPVQQPSLSLTILMAVLVSYTGRGEQKRWRRGGHGRAQLLSPTEADTEPNALYHARRQGPDVDFGFC

SEQ ID NO: 53916 - protein, 434 aa, Zea mays
  Coding DNA Sequence Number=SeqID_12137
MEIKSLESLSNGAGTAERSRMSLRFPSELAMNLMDRNVNPEESKVPTAKDRDPSLKTAPSERKDGEEQQRSQRVWRLRQEPRIQFSTQLSLSSLSNSSDGEEIATSSCPDKGCPLAILHLCLKSFKQDATEEDAAKWKLDGTFVLSDTEWGDSSYASSLSEQSSTISAPSTPFTQPEDLDRTDIWISSLDLDAEDCALLPEPDKEQFPDILGFDFPSPSFSAIRSLQFGSSSFSAGMFLSKEANDSDEPIFWPFEGTSYNSPEFDRFLTLSPRRNTMDPGYAQVRHSNPFLRRLRNSTLSSVKKCIELHQRTRNSDAKGSVASSCQEKIQKTAAVASRLTKASAPSSYSHHQMPSICQKRRPPHLKLGGPRKITSPQLQADRSSNKKIEAAGVQKVADKKSRIEELIGLDEFDGNEGIGSGSSDYQFSLWISPR

SEQ ID NO: 53917 - protein, 186 aa, Zea mays
  Coding DNA Sequence Number=SeqID_12138
MTLNYPWKTLETGATVLQKHALSTNPNALRSESTPKFDPRDAYKALAPLHWDAEEWDFIVVSNDEASVTDGGDLQLLLGEDLEESKDDMFPWNHADESLEGMEDDVSFEEDPMAEEPLIVRFSNDDDDEEDDEDTNKGAGDTHGSTDSDDEGNNDDDVDKEVDDGSSSEGDGEADIAPPSKLRKVQ

SEQ ID NO: 53918 - protein, 294 aa, Zea mays
  Coding DNA Sequence Number=SeqID_12139
  Gene Ontology: Mol. function=RNA-directed DNA polymerase activity; Cellular component=chromatin; Biological process=chromatin assembly or disassembly
  Homolog annotation: Hit_ID=Q8SA91; Match level="QueryCoverage=97%, HitCoverage=17%, E-value=8e-65, Identity=67%"; Hit description =Putative gag-pol polyprotein
  Pfam annotation: Domain name=zf-H2C2; Domain location=60-101; Score =5.9; E_value=0.06; Accession=PF09337.1; Description=His(2)-Cys(2) zinc finger
MELEHGYNQDPATKELLSQLSLHDGPLGPFTSHQGVIRHKGRLWLAGNSALQQKVLTAMHDTAIGGHSGVPVTYRKLKQFFYWPGMKAVVHAYVQSCAICQQAKPDRSKYPGLLQPLDIPSQWAKWLSVAEYWYNTGEHSAIGRTPFQVVYGYTPRHFGITAESIVPVTELADWLRERQLMTKVIKLHLTRACDRMKKQADKHRSERSFEVGESVYLKLQPYVQSSVATRSNNKLTFRFFGPYLERVGAVAYRLQLPHHSTVHPVFHVSQLKRALGCDRDQLLVPQLPQGNVSL

SEQ ID NO: 53919 - protein, 83 aa, Zea mays
  Coding DNA Sequence Number=SeqID_12140
  Gene Ontology: Mol. function=nucleoside-triphosphatase activity; Cellular component=intracellular; Biological process=regulation of transcription, DNA-dependent
  Homolog annotation: Hit_ID=Q2QVG9; Match level="QueryCoverage=84%, HitCoverage=7%, E-value=3e-21, Identity=84%"; Hit description=ATP -dependent Clp protease ATP-binding subunit clpA CD4B,chloroplast, putative, expressed
MKPLKFSEDRGNAMRSTINIVTDEALIVAAKLSYQCISDRFLPDKAIDLINEAGSHVRLQQAHVPKEARELDNARSSNKSLNT

SEQ ID NO: 53920 - protein, 109 aa, Zea mays
  Coding DNA Sequence Number=SeqID_12141
MVSALPKGRRDLQQPTAPHATPRGASTGERPWAKAGTPQPRESTAVALPSPTHDAIRLQGDAYAGKKKQGRGSYERGYILTGWCGPGEIHAIGYRVSRQEASREISGEQ

SEQ ID NO: 53921 - protein, 277 aa, Zea mays
  Coding DNA Sequence Number=SeqID_12142
  Homolog annotation: Hit_ID=Q2QVF7; Match level="QueryCoverage=61%, HitCoverage=39%, E-value=1e-21, Identity=36%"; Hit description=RWP -RK domain containing protein
MAEDGADDGQGIYDPFLVPNDDFDDDVLYLLDMNDGGGMDPRPLQGAATQSAIVVAGPSGDDNNNLLEWPPTSTLDSVVVDNSAPTHNAVLASDPTTTATSGVQDDAGAAGLQATKLGIHGVAAGVFHHATLELYRIDSNGLAATMTTQLTHQSYVDFSGRDYVWVKHYLTDYARQRAAGGYMVLDDSISAFQDALCTSMVCAGHAREAVALEINGGRPAGDDGGGVVRAPAAMVEESSVPAVAGPSKAVDNKEQGRRRPEIRPAAKTVLAVQAYMR

SEQ ID NO: 53922 - protein, 112 aa, Zea mays
  Coding DNA Sequence Number=SeqID_12143
  Homolog annotation: Hit_ID=Q2QVF7; Match level="QueryCoverage=78%, HitCoverage=19%, E-value=8e-21, Identity=58%"; Hit description=RWP -RK domain containing protein
  Pfam annotation: Domain name=RWP-RK; Domain location=26-77; Score =67.7; E_value=3.6e-17; Accession=PF02042.6; Description=RWP-RK domain
MAVSPGPKGLKCREWGVMQRSRLRERASNLQLDDIARYFHLPMVEAAKELCICATVLKGTSRKFHIRRWPYRKIKSIDSQIAKLTRGNGGPAAMAEIERLTDYRRRIYAGLE

SEQ ID NO: 53923 - protein, 71 aa, Zea mays
  Coding DNA Sequence Number=SeqID_12144
MFPCRIPPCVVPYFTCATVDAPFGLGLGALGRKITYSGESSAVERTLCHGDPMLRGRRWCRSVDLLATGQD

SEQ ID NO: 53924 - protein, 220 aa, Zea mays
  Coding DNA Sequence Number=SeqID_12145
  Gene Ontology: Mol. function=nucleic acid binding
  Homolog annotation: Hit_ID=Q2R4A9; Match level="QueryCoverage=89%, HitCoverage=38%, E-value=7e-83, Identity=75%"; Hit description=Plant protein family protein, expressed
  Pfam annotation: Domain name=DUF246; Domain location=1-144; Score= -173.2; E_value=0.00015; Accession=PF03138.5; Description=Plant protein family
MATAEGHQMGLSLPNESVGYHQVVGLILRATGFDNSTWIYLAPGKLFGGKHFMKPFKAMFPRLKNHSMIRSGKLEENIRGLAGSAVDYMVCLLSDIFIYDGPSNFADNLMGHRLYYGFRTTITPNKKALARIFMDREEGHTSAFEERVRQVMLTHFGAPHKRIHPESFYTNPWPECFCQTKARNHADRCPHNSVNDVLESWFHNKEDVEVEATNQTDSTS

SEQ ID NO: 53925 - protein, 254 aa, Zea mays
  Coding DNA Sequence Number=SeqID_12146
  Gene Ontology: Mol. function=nucleic acid binding; Cellular component= nucleus; Biological process=regulation of transcription, DNA-dependent
  Homolog annotation: Hit_ID=Q2R4A9; Match level="QueryCoverage=86%, HitCoverage=41%, E-value=1e-105, Identity=82%"; Hit description =Plant protein family protein, expressed
  Pfam annotation: Domain name=DUF246; Domain location=62-254; Score =32.2; E_value=1.6e-16; Accession=PF03138.5; Description=Plant protein family
MAMQVLVLTKASRLRHKLLLLKDVVANELWRTVDSNGWRASSAPRICWPPPPAESESNGYLRVWCNGGLTQQRSAICNAVVVARIMNATLVLPELDTNSFWHDESGFVDIYDVPHFINTLKYDVRIVMSIPKITAQGKTKKLKAYKILPPRDAPVTWYRTTALERLRKYGAIYLTPFSHRLAEKIDDPEFQRLRCRVNYHALRFKPSIMKTSSDIANKLHSEGHFMSIHLRFELDVLAYAGRLRKVPIPQLIWD

SEQ ID NO: 53926 - protein, 181 aa, Zea mays
  Coding DNA Sequence Number=SeqID_12147
  Homolog annotation: Hit_ID=Q852N7; Match level="QueryCoverage=30%, HitCoverage=18%, E-value=2e-16, Identity=68%"; Hit description =Putative zinc finger protein
  Pfam annotation: Domain name=zf-C3HC4; Domain location=20-56; Score =10.8; E_value=0.012; Accession=PF00097.15; Description=Zinc finger, C3HC4 type (RING finger)
MESKLSSAVAFVEGDVQDACSICLDAFCDSNPSVMTNCKHDYHLQCILECRTRGSCMRTSTSQMLPPRSSCHVSRCSDREQRNKRMVNKDEVIMPEVSVIWQSICRLFEEGLRNMEWLTSDGANVVAEIEYGVLEHLIREMVDELLRGVSEPAQHPLPLRPVSKKLLGGKNVETRRAIGCY

SEQ ID NO: 53927 - protein, 111 aa, Zea mays
  Coding DNA Sequence Number=SeqID_12148
MGVGVEASSGGGYRIGRVEKGNDDGCAIEEERTAERTDGQMGGTILRMSPSKQPRRGPALDADDGLGVGQTTAKARLELGEGDGVQWVRGIERCNSWEVASYRACMKAEAS

SEQ ID NO: 53928 - protein, 90 aa, Zea mays
  Coding DNA Sequence Number=SeqID_12149
MESSIEVLARREQAVGEVQFISPPATTRSDSRLTLRFVLNGVLIVARGSKYRLVDELEPLFHSGRRVLLKTHLPGTVFILIFVEQSLTLL

SEQ ID NO: 53929 - protein, 190 aa, Zea mays
  Coding DNA Sequence Number=SeqID_12150
  Subcellular localization annotation: CTP_CleavageSite=69; ConfidenceScore=5.43e-01
MALAVIALLWSLPWPTLPASRPAVPAPLAARPCSSVSLISLPSAGRELAHGAHSAPVHRTCALESVVVPASFVGRAHALLGFFGARAVRRPPKLVIDLAGVVEPSNPFLSRVGNIADSSMMLVNKLRFIGSSSSVQLMMKEVSIGLSVCGTVFKGEAQKIQRLTQRRSCEAGKLRHVRRKGNRLKDEKAI

SEQ ID NO: 53930 - protein, 142 aa, Zea mays
  Coding DNA Sequence Number=SeqID_12151
MATTDIGRTLGSNLSRIQCLAARPIELDHTRSPGTPWIALENEEEITVEEEETTPSTENPPVGDCFYSDICGTELDSPTTQGKPRYRAGDLHEKSLGVVSPSESFKDRLDVRKQQTSAVFALRWCLKKNLNSEATGGCWLLI

SEQ ID NO: 53931 - protein, 89 aa, Zea mays
  Coding DNA Sequence Number=SeqID_12152
MGRGKFKGKPTGRRNFSTLEEIGNDAPAHPMVPFIGRIRFHIWSVPRFSFISPSLSEIFTEKAAGTSGRPRTFMKTGKAKRIDLFMGEV

SEQ ID NO: 53932 - protein, 385 aa, Zea mays
  Coding DNA Sequence Number=SeqID_12153
  Gene Ontology: Mol. function=cysteine-type peptidase activity; Cellular component=intracellular; Biological process=proteolysis
  Homolog annotation: Hit_ID=Q2R216; Match level="QueryCoverage=92%, HitCoverage=93%, E-value=3e-54, Identity=38%"; Hit description=F-box domain containing protein
  Pfam annotation: Domain name=F-box; Domain location=4-54; Score=34.4; E_value=3.9e-07; Accession=PF00646.23; Description=F-box domain
MASPPPDLLIDDATAEILLRLPPDDPACLVRASLVCKAWRELLSSPIFLRRYRRFHGAPPLLGFLYNIYDERPCARFVVAADAATTFPFSAPAFDQFDLWFIECRHGRALLQTFERHAPARLVVWDLITGDQQHIPMPVPGYPYFCRTAAVLCAADGCDHLDCHGGPYLVVVIGAYEEDTLRWASVYSSETGVWTTSSSIQIDAYVEQRPSLLAGDALYFSAQEGKIIVKYDLNGQSLHVINAPDMFEPTEGIAVTVEDGGLGLAGVKDGNLHLWSWQAGPGGIAEWVQGRIVKLRTLFPILKPLDSLDVIGFQEGTDTIFISIDMEVFAVTLRSEQVKKVGKTGSKYAMAPYVSFYTPDVCVVCDLQNLVKQRINLAKGRLLSP

SEQ ID NO: 53933 - protein, 127 aa, Zea mays
  Coding DNA Sequence Number=SeqID_12154
MVSLATAQAVLRQLHGDGQRLARNSWCLPDNPTPERPEEVSDHLRRTRREANAAVDGDGGSLVLCPLPFLSAGYRGGFKAMAADLLGLIGARHGVLDPQITTLTGEASAAILRDARGVRCAPGKEDD

SEQ ID NO: 53934 - protein, 128 aa, Zea mays
  Coding DNA Sequence Number=SeqID_12155
MAAREVWLERAWRTRKQRRQLQEEVPVPVVVLGGGGGDSPASRGVAMDMEEVRACRDLGLDLPCDWTVEIPSCALSVSGVDTASSGGNSPASGSWRISSPGDDPKDVKARLKVWAQAVALASASRLGS

SEQ ID NO: 53935 - protein, 158 aa, Zea mays
  Coding DNA Sequence Number=SeqID_12156
MAEVVRRREITCANQHSESGDFMDAPKIRGETHGRSAEDDSPLWAEISDGGPPWLSLPARMGGSRPESGRNNHAMTAKSVLINKVKRLSSWGVHMSAVLYPKPGKSEEGERKDPASRTPRQSRVSAQRSSRCSVEEEADNWVPQVIDAKRDEKTAVRE

SEQ ID NO: 53936 - protein, 154 aa, Zea mays
  Coding DNA Sequence Number=SeqID_12157
  Gene Ontology: Mol. function=nutrient reservoir activity; Cellular component=apoplast; Biological process=auxin mediated signaling pathway
  Homolog annotation: Hit_ID=O49000; Match level="QueryCoverage=79%, HitCoverage=62%, E-value=2e-41, Identity=83%"; Hit description =Germin-like protein 4
MACVPWSWLLKAATTAAGAVPPVLLEVDEAAGEDEDVPRGDGLAEEPVGGGEEADLERALEDEDDLGGARSMRAMETPSVFTPGNLSTLAAVTAEPAGLLVLPGLLSPSKKKSSAETFALAREPVQLDRCTAWRAGMGQQEQHSKWGNRDQFQG

SEQ ID NO: 53937 - protein, 77 aa, Zea mays
  Coding DNA Sequence Number=SeqID_12158
  Homolog annotation: Hit_ID=Q9M4R2; Match level="QueryCoverage=44%, HitCoverage=36%, E-value=1e-12, Identity=100%"; Hit description =Germin-like protein 1
MTLFGATPPVPTDILAKAFRVGSGEVEHIKANFAPNAYYMCACKLFEKLRHIPANWLAEHSKPDGREPLRPACVFYV

SEQ ID NO: 53938 - protein, 51 aa, Zea mays
  Coding DNA Sequence Number=SeqID_12159
MPSQLPLERVRAPRNGCIHDGKSALDQLTCRNNVIKTQSTGTTYRLKKLNT

SEQ ID NO: 53939 - protein, 268 aa, Zea mays
  Coding DNA Sequence Number=SeqID_12160
  Gene Ontology: Mol. function=protein binding
  Homolog annotation: Hit_ID=Q6L4C3; Match level="QueryCoverage=84%, HitCoverage=92%, E-value=7e-73, Identity=56%"; Hit description=RIKEN cDNA 1500006O09, related
  Pfam annotation: Domain name=DUF783; Domain location=51-268; Score =259.1; E_value=9e-75; Accession=PF05615.3; Description=Protein of unknown function (DUF783)
MAALPASPSGAPLRAPLIVSRIVESGMLAKGRRLAGRGGEMSAHYPFGPQDDDAIIKHRLLTRTTTTRGEPPLKKLQKKFMSFATEIEKDADNITDCERLYKAFLHEINTFELPLLKSKAVVDANIREKESFNELQVEIERQILQAKTDIEVLKKQLEQSKIERQHKEECEAIRKLICLQPPRSETEKLIADLEKEIADLEDENVACTRTLELRKKQFALLLHVVEELKISIEDEQKSIADELRAITGEQKMSTGEGSVGASDSMVVD

SEQ ID NO: 53940 - protein, 179 aa, Zea mays
  Coding DNA Sequence Number=SeqID_12161
MAQVHISLSHGCLAHELTCSVNLTANDYHDKGVIRTMESSTEVVSGSFLYVYVGGLLLPKVLKTLINRSILLSVHCKVNAEGCLWIERAGSAPEDDELCLARPQGLDSASAPKDDELRLARPQGSDSGSAQEDDELCLARPQGSDSGSAPEDDELRLARPQGSDSGSVPEDDELRLARP

SEQ ID NO: 53941 - protein, 125 aa, Zea mays
  Coding DNA Sequence Number=SeqID_12162
MGKSKKGRSSSHHSGDKRKREPSPPFEDFGDSEYSEEEFSSESEGWPAYASPPAVERSGLEGSDESEISSDEEDSSDSSKEGSGGDDDDEGDGGDKGGGGNDKGDGGSDKDDGGSGRASGKAPLA

SEQ ID NO: 53942 - protein, 73 aa, Zea mays
  Coding DNA Sequence Number=SeqID_12163
MESHDLRAKRESRLVGGNENDGFGIDSGDAMRLDMPWSLVVTSKHLSYARTKLMDVYSLVGALELDVGLQWLT

SEQ ID NO: 53943 - protein, 176 aa, Zea mays
  Coding DNA Sequence Number=SeqID_12164
  Subcellular localization annotation: CTP_CleavageSite=43; ConfidenceScore=5.52e-01
MPPPIRQPNPSALLSRTPFTLIDASTPVNARELSMPPPASVVRARPLWSNHPSPSPSDRASPLASPEANETPRAPNPNATSSKTPDHPRGNSPARRSTWSRHRRCSQPHALVARAPPVTSNADQHIDVTATDSPTSPDPSSELYRCREVVHRDYLFGYYIGEPRDRGLDARKIQRG

SEQ ID NO: 53944 - protein, 215 aa, Zea mays
  Coding DNA Sequence Number=SeqID_12165
  Subcellular localization annotation: CTP_CleavageSite=42; ConfidenceScore=5.08e-01
MTVGGACRGSSGSIPVTNSSVCTTCAFSSCARKDRKRWAFVSGSAAAHLGHKHGDGGVEHDEVVVEAKEDDFRCIANKGDSVTRLFDRLSEGVAGGGTASLFLFYLLRPRGDGSGRWVEKGFMIEANGGIDEDKLIRTRDGGNQWCGLISSKCNFFLKVVLYMSREELLEEDVALKRFKSYKNSVKQVSKIGNALTLAVVLACSYELAVLATSTK

SEQ ID NO: 53945 - protein, 284 aa, Zea mays
  Coding DNA Sequence Number=SeqID_12166
  Gene Ontology: Mol. function=protein serine/threonine kinase activity; Cellular component=cell cortex; Biological process=protein amino acid phosphorylation
  Homolog annotation: Hit_ID=O22040; Match level="QueryCoverage=60%, HitCoverage=24%, E-value=1e-59, Identity=70%"; Hit description =Mitogen-activated protein kinase kinase kinase ANP1
  Pfam annotation: Domain name=Pkinase; Domain location=106-280; Score =47.4; E_value=2.2e-11; Accession=PF00069.15; Description=Protein kinase domain
  Pfam annotation: Domain name=Pkinase_Tyr; Domain location=106-282; Score=-37.0; E_value=3.3e-10; Accession=PF07714.7; Description =Protein tyrosine kinase
  Pfam module annotation: Pfam domain module=Pkinase::Pkinase_Tyr; Domain location=106-280::106-282
MRRDDAGGVTGFHDLFDSVRRSISFRPAAAAPEAPAGPFVAGAGGIGVRISSCLRKSRGMGLLGLITKNPSPPRRMLPPMPDESGGGSGGGGGDDAGGEENPPIRWRKGELIGAGAFGQVYLGMNLDSGELLAVKQVLIGRSNATREKAQAHIKELEEEVKLLKNLSHPNIVVSGCKIFAFTRYLGTVREEDTLNILLEFVPGGSIQSLLGKLGSFPEPVIKKYTKQILQGLEYLHSNAIIHRDIKGANILVDNKGCIKLADFGASKQVAKLPSNVSLSIVIAS

SEQ ID NO: 53946 - protein, 533 aa, Zea mays
  Coding DNA Sequence Number=SeqID_12167
  Gene Ontology: Mol. function=ubiquitin-protein ligase activity; Cellular component=ubiquitin ligase complex; Biological process =protein ubiquitination
  Homolog annotation: Hit_ID=Q6H593; Match level="QueryCoverage=99%, HitCoverage=100%, E-value=2e-91, Identity=60%"; Hit description=Arm repeat-containing protein-like
  Pfam annotation: Domain name=Arm; Domain location=222-263; Score=5.2; E_value=2.7; Accession=PF00514.13; Description=Armadillobeta-catenin -like repeat
  Pfam annotation: Domain name=Arm; Domain location=264-306; Score =28.6; E_value=2.2e-05; Accession=PF00514.13; Description =Armadillobeta-catenin-like repeat
  Pfam annotation: Domain name=Arm; Domain location=307-349; Score =24.0; E_value=0.00052; Accession=PF00514.13; Description =Armadillobeta-catenin-like repeat
  Pfam annotation: Domain name=U-box; Domain location=47-119; Score =50.1; E_value=7.6e-12; Accession=PF04564.6; Description=U-box domain
  Pfam module annotation: Pfam domain module=Arm::Arm::Arm::U-box; Domain location=222-263::264-306::307-349::47-119
  Subcellular localization annotation: CTP_CleavageSite=26; ConfidenceScore=5.64e-01
MGAARPRRWKLPFHRTTSAPCSPSSRSSAPPPGPASPARSEAWVAQPVPEAFLCPISGALMADPVILPSGNTYERACLQACAELAFLPPGAEAGGLRTVIPNAALKAAIGTWCARSGRAGPPPPPLSAEAARQAVLRAMPPAAARTTARRVAAVMAASTSNSSTSSYGSASEITAAEDEAEAEAPADPLEDDVVGKVMRADDGSGGVVAAAMGALREATREGAERRLALCTPRLLGALRRVLLLPRHAAARVDAAAALVNLSLEPGNKVRIVRAGAVPALVEVLRSAASAPEAREHAAGALFGLAIHEDNRAAIGVLGAVPPLLDLLASRAHPPRARRDAGMALYHLTLAAVNQSKVARFPGAPKALLAVASGAADPGPVRRLALMVACNVAACAEGRNALMDAGAVASVSAILLSDGGAAAAAAGLEEWCVSAMYAMSRGSLRFRGLARAAGADRALRRVVADEGGGVRREMARKTLRAMRGDLDNDDGGTEYNNDLTGSSAECEDCGGSIVSDGLMSFRRRQRELGNTAEF

SEQ ID NO: 53947 - protein, 36 aa, Zea mays
  Coding DNA Sequence Number=SeqID_12168
MEPGIMSVGASGFCWDSSRPVEKEAVDIRIAWLGLI

SEQ ID NO: 53948 - protein, 742 aa, Zea mays
  Coding DNA Sequence Number=SeqID_12169
  Gene Ontology: Mol. function=DNA photolyase activity; Cellular component=nucleus; Biological process=DNA repair
  Homolog annotation: Hit_ID=Q8H6B3; Match level="QueryCoverage=92%, HitCoverage=97%, E-value=0.0, Identity=83%"; Hit description =Cryptochrome 2 apoprotein
  Pfam annotation: Domain name=DNA_photolyase; Domain location=1-174; Score=262.8; E_value=6.8e-76; Accession=PF00875.8; Description=DNA photolyase
  Pfam annotation: Domain name=FAD_binding_7; Domain location=205-483; Score=502.6; E_value=4.6e-148; Accession=PF03441.4; Description=FAD binding domain of DNA photolyase
  Pfam module annotation: Pfam domain module=DNA_photolyase::FAD _binding_7; Domain location=1-174::205-483
MRIVVWFRRDLRVEDNPALAAAARAGGEVVPAYVWSPEEEGPYYPGRVSRWWISQSLNHLDASLRRLGAGKLVTRRSADAAVALLQLVRDTGATHVYFNHLYDPISLVRDRRLKEMLAAEGIVVQSFNSDLLYEPWEVVDDEGQPFTMFDPFWNRCLSMPYDPPAPLLPPKRINSGDLSMCPSEDLIFEDESERGSNALLARAWTPGWQNADKALTAFLNGPLADYSVNRKKADSASTSLLSPHLHFGELSVRKVFHLVRMKQLVWSNEGNHAAEESCTLFLRSIGLREYSRYLSFNHPSSHERPLLAHLRFFPWVVDESYFKIWRQGRTGYPLVDAGMRELWATGWLHDRIRVVVASFFVKVLQLPWRWGMKYFWDTLLDADLESDALGWQYITGSLPDGRELDRIDNPQFEGYKFDPHGEYVRRWIPELARLPTEWIHHPWDAPVSVLQAAGIELGSNYPLPIVELDAAKGRLQAALSEMWQLEAASRATMNNGTEEGLGDSSEVLFPQELQMEVDRQPAPAEAAANVHVHVPMPARRRGDQMVPTMTTSSLNRAGTEVSADLVVANSEEEDTRAQVPFHAHLHLHPRAEAPPAARRTNNGARQHDVFQQRRNHRRDALLAPSASEASSSWTGREGAVVPVWSPPAASGHSDAFAADEADVSSRSYLGRHPQSHRLMNWSQLSQSSTAAEDSVRPNLIELKILLLEHHDTKYHIYDYLHINLIAAKPYYMERRKRQKRDD

SEQ ID NO: 53949 - protein, 381 aa, Zea mays
  Coding DNA Sequence Number=SeqID_12170
  Gene Ontology: Mol. function=ubiquitin thiolesterase activity; Cellular component=nucleus; Biological process=ubiquitin-dependent protein catabolic process
  Homolog annotation: Hit_ID=Q8H7M6; Match level="QueryCoverage=93%, HitCoverage=89%, E-value=1e-149, Identity=74%"; Hit description =Putative ubiquitin-specific protease 3
  Pfam annotation: Domain name=UCH; Domain location=8-374; Score=224.1; E_value=3.2e-64; Accession=PF00443.19; Description=Ubiquitin carboxyl- terminal hydrolase
MEQKVKYPTPTCLLLKGFAVVVDNLHALYFCIPFREQLLEYYANNKTPGDVEENLLTCLADLFMQCYYIVFCISRETSAICTILQIATIKNEEISQAKKKTGVIAPKRFVQRVKKQNELFRSYMHQDAHEFLNFLLNELVDILEKESSAAKDSPQSSSPEKAPNGPVQPLANGVKKEPPVTLVHKNFQGILTNETRCLRCETVTARDETFLDLSVDIEQNSSITSCLKNFCSTETLNAEDKFFCDKCCSLQEAQKRMKIKKAPHILVIHLKRFKYIEQLGRYKKLSYRVVFPMELKLSNTSDDVDTEYSLFAVVVHVGSGPNHGHYVSLVKSHNHWLFFDDENVEMVEEQTLQTFFGSSHEYSGNTDHGYILFYEGLGGKS

SEQ ID NO: 53950 - protein, 197 aa, Zea mays
  Coding DNA Sequence Number=SeqID_12171
  Homolog annotation: Hit_ID=Q9FRT7; Match level="QueryCoverage=23%, HitCoverage=9%, E-value=4e-12, Identity=77%"; Hit description =Monosaccharide transporter 1
  Subcellular localization annotation: CTP_CleavageSite=24; ConfidenceScore=5.32e-01
MGVIQVKAPSTQGTQSRLARAQPRAGTVDPGAIGSSASPDPRAWAQPRPRKMVSASPDPRARTQPRPRKTVSASPDPRARTQPRPRKTVSASPDPRARPPPRPRKTVSASPDPRARPQPRPRRSHCLARPWARADHATGGRGTNRMAGGVIVPSDGPAADHGGSLTLSVFMTCLVAASGGLIFGYDIGISGLPLLAL

SEQ ID NO: 53951 - protein, 251 aa, Zea mays
  Coding DNA Sequence Number=SeqID_12172
MGEIDDGAACSVRRPEAPRAGTARLKPDAVPAGGGESELTFGRREDTSRLQIRTLVLQLWPVTILYTEIFLVRGSLATISGRRCPSPTTAPTSTPPDSRATLGIIPGGRAPELSGKIAAEAHWGAPLLLDVSAISPSPWASRRGLAQGTESSAFISFNTMPLRLAKEIRRGLPWGSEFLTGIVCSTVHRQASWTGILGAQSPGLLRCDCAVRRGGAAAHWVGVEKSVWRRRIRLKTLSFPAFDAQSRDIGN

SEQ ID NO: 53952 - protein, 400 aa, Zea mays
  Coding DNA Sequence Number=SeqID_12173
  Gene Ontology: Mol. function=nucleic acid binding; Cellular component= heterogeneous nuclear ribonucleoprotein complex; Biological process =regulation of transcription, DNA-dependent
  Homolog annotation: Hit_ID=Q1L9A1; Match level="QueryCoverage=83%, HitCoverage=40%, E-value=1e-61, Identity=42%"; Hit description=Novel protein
  Pfam annotation: Domain name=SPRY; Domain location=1-131; Score=12.7; E_value=0.0021; Accession=PF00622.18; Description=SPRY domain
MDPTTSGERHLCRIGVSRGDDPVGALGESQHSFGFGGTGKFSHQRRFVNYGVKFGVGDTVVCAVDLDSKPMTSIGFARNGEWLGIARHFDAGEKGLGLVDAPLRLMRWGFALFPHVLLKNVIVEMQFSREDGLLPVDGYEPWASAFSQRNSEFGPSFEQNKCEVMMMVGLPTSGKSTWAEKWVKEHQEKRYILLGTNLVLEQMKVPGLLRKNNYGERFERLMDCATWIFNKLLTRAANTPRNFIIDQTNVYKNARIRKLRPFANYRNTVVVMFPTPSELKSRAAKLFNEMGKEIPAEAVNEMTANFVLPLSKDMPHSKEPFDEVIFTELSRDEAQRTLDDMQRVLPRNVTPSYGNSGNQKHYSSTYAGTAAPLDPEATCANQALSAPVNYPFVYTTKCSS

SEQ ID NO: 53953 - protein, 367 aa, Zea mays
  Coding DNA Sequence Number=SeqID_12174
  Homolog annotation: Hit_ID=Q9FRT7; Match level="QueryCoverage=27%, HitCoverage=19%, E-value=2e-29, Identity=66%"; Hit description =Monosaccharide transporter 1
MEPFMRRFFPRALERMASAKGNEYCIYDSQTLTAFTSSLYVAGLVGSLVASRVTKATGRRAIMLMGGALFLAGGAVTGAAVNIAMLIVGRILLGFGVGFTSQKCHGGMDKKSTNGQPFRMVGLKLSKVLKAQSDVELSQLRKEVSELRKDTAKNTKTLTTLSKDFLECKNMVKGLTEQKDVIQSVLEAKYKRISAEAIKKQEENNSEIFGLLHQLVEVDSLYDICSCCKQHMYDTLSLVRARPKQMIFKDADTSKALRWMDGEVKGFSPVLDSSGDYYALANARGIACILEKADCSHLKMMTLGLKHFGEQHPNPFKHKDVQQRGNEVARANVKANMKKVVLVTCFGLLCTIIKRQHNVKKIINLHS

SEQ ID NO: 53954 - protein, 139 aa, Zea mays
  Coding DNA Sequence Number=SeqID_12175
  Gene Ontology: Mol. function=ubiquitin thiolesterase activity; Cellular component=nucleus; Biological process=ubiquitin-dependent protein catabolic process
  Homolog annotation: Hit_ID=O24454; Match level="QueryCoverage=50%, HitCoverage=17%, E-value=3e-15, Identity=58%"; Hit description =Ubiquitin carboxyl-terminal hydrolase 3
MGASGSKLEKALGDQFPEGQRYFGLENFGNTCYCNSVLQKSGQTAISCIGSSTARPQHYRDEKLHCQAEKWHRRAAPRDFRFGFLQIFGYLFGLIASSRDSFREFNQELIEGQLTSINTPKLAPGDGSLAESKVEISPP

SEQ ID NO: 53955 - protein, 179 aa, Zea mays
  Coding DNA Sequence Number=SeqID_12176
  Subcellular localization annotation: CTP_CleavageSite=58; ConfidenceScore=5.79e-01
MGPAPLQLPLRAGSPLVVVRTPAGSKSERSCSNFGRSPSSTPRSSWCAGPWPPSLGAAAQVRPQPLPRRRLIQEPLGIIPGGQAPELSGKIAVEAHWGAPLLLDVSAISPSPWASRRGLAQGTESSAFISFNSMPLRLAKEIRRGLPWGSEFLTGIVCSTVHRQASWTGILGAQSPGSK

SEQ ID NO: 53956 - protein, 57 aa, Zea mays
  Coding DNA Sequence Number=SeqID_12177
MAHTSTAQIRSPNGTPVKSLNYGDGVLTLLTLVSGMAEDRHGCTMARVRMDFILMSG

SEQ ID NO: 53957 - protein, 72 aa, Zea mays
  Coding DNA Sequence Number=SeqID_12178
MGSKSWGGEGFESRINSLCHKQPYGAEVTQLGAIGYGAEEPGYFAFHILTDAQNFYAMGLPGIRIKMQLSVS

SEQ ID NO: 53958 - protein, 198 aa, Zea mays
  Coding DNA Sequence Number=SeqID_12179
MVVCHALEKRYRAQAREGLPLESSLSSEEVDGDDDDDDDEGMEARASIEPAPVPAEAEEAELVEEEVTPLPVEAVVVPVGVPLGSPQWPPVGPPLAWTSTEGDPYFILDDIEEREFREEFQALGQEALQRHWTTLFRSNEQLARRIAEVADLTSRCEGLKEEGATDYEEASLLKAKVLHLKAEPDHHEEVLQRAQKGF

SEQ ID NO: 53959 - protein, 216 aa, Zea mays
  Coding DNA Sequence Number=SeqID_12180
MAACTTVDSLVWQDTSANTAVSALGEMPTRIFVTKIHRETYLTNNEAIVGEFEVYSCQMISTEQTIKVPSETSTLLQVVTSVEDVILVKDVSYDEEATLVAQSTFVESIFLTTIEDCPSHSMVEENTKPVLVEDGSDDEEATLVAQTTFEGPIFLTTIKDGPSLSMVEDNTKPRLVEDPPIVTIFSSRGSSVVTIFSSIELERMRILHALFKPPHH

SEQ ID NO: 53960 - protein, 812 aa, Zea mays
  Coding DNA Sequence Number=SeqID_12181
  Gene Ontology: Mol. function=RNA-directed DNA polymerase activity; Cellular component=intracellular; Biological process=RNA-dependent DNA replication
  Homolog annotation: Hit_ID=Q8S463; Match level="QueryCoverage=99%, HitCoverage=42%, E-value=0.0, Identity=87%"; Hit description =Putative prpol
  Pfam annotation: Domain name=RnaseH; Domain location=334-461; Score =2.4; E_value=3.5e-05; Accession=PF00075.14; Description=RNase H
  Pfam annotation: Domain name=rve; Domain location=673-812; Score =81.9; E_value=1.9e-21; Accession=PF00665.16; Description=Integrase core domain
  Pfam module annotation: Pfam domain module=RnaseH::rve; Domain location=334-461::673-812
MKESDQLATSFITPFDMYCYVTMPFGLRNVGATYQQCMNHVFGEHIGRTVEAYVDDIVVKTRKASDLLSDLETTFRCLKAKGVKLNPEKCVFGVPRGMLLAFIVSERGIEANPEKIAVITNMGPIKDLKGVQRDTGCLAALSRFISRLGERGLPLYRLLRKVECFTWTPEAEEALGNLKALLMNAPILVPPAAGEALLIYVAATTQVVSAAIVVERREEGHALPVQRPVYFISEVLSETKIRYPQIHKLLYVVILTRRKLRQYFESHPVTVVSSFPLGEIIQCREASGRIAKWAVEIMGETISFAPRKAIKSQVLADFVAEWVDTQLPTVPIQPELWTMFFDGSLMKTGAGAGLLFISPLGKHLRYVLRLHFPTSNNVAEYEALVNGLRIAIELGVRRLDARGDSQLVIDQVMKNSHYRDPKMESYCDKVRRLEDKFYGLELNHIARRYNETANELAKIASGRTTVPPDVFSRDLHQPSVKTDDAPEPEAPSTQPEAPSAQPEAPSARPEAPSARRKASSAQPEAPSAPEGEALRVEEERSGVTPNRNWQTPYLQYLHRGELPLDRAEARRLARRAKSFVLLGDGKELYHCSPSGILQRCISIAEGQELLQEIHSGACGHHVAPRALVGNTFRQGFYWPTAVADATRIVRTCEGCQFYAKQTHLPAQALQTIPITWPFAVWGLDLVGPLQKAPGGYTHLLVAIDKFSKWIEVRPLNSIRSEQAVAFFTNIIHCFGVPNSIITDNGTQFTGRKFLDFCEDHHIRVDWAAVAHPMTNGQVERANGMILQGLKPRIYNDLNKFGRRWMKELPSVV

SEQ ID NO: 53961 - protein, 257 aa, Zea mays
  Coding DNA Sequence Number=SeqID_12182
  Gene Ontology: Mol. function=protein-L-isoaspartate (D-aspartate) O -methyltransferase activity; Cellular component=endoplasmic reticulum; Biological process=protein modification process
  Homolog annotation: Hit_ID=Q42539; Match level="QueryCoverage=53%, HitCoverage=59%, E-value=9e-56, Identity=75%"; Hit description =Protein-L-isoaspartate O-methyltransferase
  Pfam annotation: Domain name=PCMT; Domain location=29-252; Score =200.8; E_value=3.2e-57; Accession=PF01135.9; Description=Protein-L -isoaspartate(D-aspartate) O-methyltransferase (PCMT)
MAMAYDGIGEGDGGIWAIDEWQCRWGTGMRHAIRCPRSGYCYGGRRAVANVACMVATDRVSSWTTATKDSSMRGSGGAVDEDVAGLGTEVVEIGSVAKEDQDPSAWAPSSQTLGLLAGHGTGYLTACFALMVGPEGRAVGVEHIPELVATSTENIKKSAAAPHLNDGSLSIHVSDGREGWPELAPYEAIHVGAAAPQIPEALIEQLKPGGRMVIPVGTVFQELKVVDKKLDGTVSIRDETSVRYVPLTSKDAQLHAS

SEQ ID NO: 53962 - protein, 131 aa, Zea mays
  Coding DNA Sequence Number=SeqID_12183
  Gene Ontology: Mol. function=kinase activity
  Homolog annotation: Hit_ID=Q6QP54; Match level="QueryCoverage=70%, HitCoverage=39%, E-value=4e-23, Identity=71%"; Hit description =Putative kinase
MGRRETEREGGKKGQPEREREVEIPRPSCSCPAPRSASQMGRRSCFPEPESAWGRVMMVPPVDVDGPRPRLGDVEAPPRSRSSLYSMAEVESEPLGRARWRPSAEARAESEPWGRAKRSSSSSGAEPESEP

SEQ ID NO: 53963 - protein, 104 aa, Zea mays
  Coding DNA Sequence Number=SeqID_12184
MARCLVRRSRAVCALFVRDGLVVACWFVPVAFGAIYAQQLLDLSPHKASPLQPDRTLAEYVDVYSPLLYTPTPAPPGCPHSNHCSGEDEAVEGDFQEFQDYDEF

SEQ ID NO: 53964 - protein, 139 aa, Zea mays
  Coding DNA Sequence Number=SeqID_12185
MGRARELERARREMSLRTAARVGASWRAAAMGTELEGASAMGPSSAGKSSRAQEHAMGAEERARRNQARRGRAKMGETRPAAMASLGDCDALGNGREEERPSWGREKRWRVCGAREQGATLEEDKEGMEKSSSGRRLED

SEQ ID NO: 53965 - protein, 77 aa, Zea mays
  Coding DNA Sequence Number=SeqID_12186
MGVEGWREYRTLRGKRLDGGVSVLLVGVNPVCIPLRVFSLVGLRVTLIVIGVKRRHGNTEKSNVLVTTHLHSGKKVH

SEQ ID NO: 53966 - protein, 71 aa, Zea mays
  Coding DNA Sequence Number=SeqID_12187
  Subcellular localization annotation: CTP_CleavageSite=14; ConfidenceScore=5.06e-01
MPQWGLNAPTSPTQGSRVVGHNTPPPTIPTPGEASIGEGATTEETPNQTDDFVNNFLASGGSGHNSNDPYM

SEQ ID NO: 53967 - protein, 328 aa, Zea mays
  Coding DNA Sequence Number=SeqID_12188
  Gene Ontology: Mol. function=protein serine/threonine kinase activity; Cellular component=membrane; Biological process=protein amino acid phosphorylation
  Homolog annotation: Hit_ID=Q337X4; Match level="QueryCoverage=99%, HitCoverage=100%, E-value=2e-77, Identity=75%"; Hit description =Protein kinase APK1B, chloroplast, putative, expressed
  Pfam annotation: Domain name=Pkinase; Domain location=78-312; Score= -19.2; E_value=2e-07; Accession=PF00069.15; Description=Protein kinase domain
  Pfam annotation: Domain name=Pkinase_Tyr; Domain location=78-312; Score=-73.8; E_value=6.1e-08; Accession=PF07714.7; Description =Protein tyrosine kinase
  Pfam module annotation: Pfam domain module=Pkinase::Pkinase_Tyr; Domain location=78-312::78-312
  Subcellular localization annotation: CTP_CleavageSite=55; ConfidenceScore=5.01e-01
MGNCLGGSSYVNKVSSTAKPESPPKVQSPSEVDRSDDRKLPSNPGEVEALRRGASAATRRNPLVAFSFSELRTVANDFRKDALIGGGGFGRVYKGSFAPPAGAGRPERRHPPGAGGPSRCTTATTASRATGSGWRRSRWARRAGWRSSTTRKPRPVIYRDFKTSNILLDAHFNAKLSDFGLAKDGPVGEQSHVSTRVMGTYGYAAPEYMMTGHLTASSDVYSYGVVLLELLTGRRSLDRSRPPREQALTDWALPALPHKKRVQGIVDPRLAGAGWDDPPPARAVQKTAMLAYHCLNRNPKARPLMRDVVASLEPLQQPPEDPNAHAAL

SEQ ID NO: 53968 - protein, 151 aa, Zea mays
  Coding DNA Sequence Number=SeqID_12189
  Gene Ontology: Mol. function=nucleic acid binding; Biological process= DNA integration
  Homolog annotation: Hit_ID=O24587; Match level="QueryCoverage=39%, HitCoverage=5%, E-value=6e-24, Identity=86%"; Hit description=Pol
MSIMRELNYFLGFEVKQLKEGTFVSQTKYTQDLLKRFGMKDAKPAKTPMRTDGHLDLDKGVALKKHLSRRLITGNSSFSRVDTLWCLWAQRYDLQIAPLAVDYTVYESNNLESISISSSRQLENGRERIPGSDKKLGQDGWGRSGGDLMIG

SEQ ID NO: 53969 - protein, 140 aa, Zea mays
  Coding DNA Sequence Number=SeqID_12190
  Gene Ontology: Mol. function=acyl-[acyl-carrier-protein] desaturase activity; Cellular component=chloroplast; Biological process=fatty acid metabolic process
  Homolog annotation: Hit_ID=P28645; Match level="QueryCoverage=43%, HitCoverage=15%, E-value=7e-19, Identity=72%"; Hit description=Acyl -[acyl-carrier-protein] desaturase, chloroplast precursor
MQLSDMHTTLGYMDESIASYGKGLKIQMDALDEHDPRIVETCTFLDAKEIPNDCFVWLVGDMIIEEALPTYQTMLDNFNDAKDETSASPTAWVVRTRAWTDEENMHDDLLNKKPLKEKPKKFGEVRLGLVWEHRTGVRAT

SEQ ID NO: 53970 - protein, 118 aa, Zea mays
  Coding DNA Sequence Number=SeqID_12191
MGRCVPGPEGAAVVSSMAASMAAVVVAVETSIGATACGSAWSVQVLVGVAWHRDWRGFLATWRVGCAGEGALGDGRCRGCVGQRAVGLGAGRGPLLSLARRQAVVSALQNQPIVNGFI

SEQ ID NO: 53971 - protein, 111 aa, Zea mays
  Coding DNA Sequence Number=SeqID_12192
MALVPLGMSPIPVSEPPASISDALPVLDSAADRLCRLDQGLGARLEVEGHMLYRTVVDYVLTCFRSHDPTISLASVIDGPVATAEDAARESVQEVAEMVVTCFQRGPADAE

SEQ ID NO: 53972 - protein, 132 aa, Zea mays
  Coding DNA Sequence Number=SeqID_12193
MSSFVDFGVRSGVYEHDDGAHGPCTTHGGHGYWRRRRRSASQEPRRRSGSEEGLQRSTVSGADFGARRPVIAARGPGTPLGPHGSGGSRLQRISFLLLGPAAAIHLGNTNSCIAAYDFRPGSHEYYQLCIPS

SEQ ID NO: 53973 - protein, 168 aa, Zea mays
  Coding DNA Sequence Number=SeqID_12194
  Gene Ontology: Mol. function=nucleotide binding; Cellular component =endoplasmic reticulum; Biological process=protein folding
  Homolog annotation: Hit_ID=Q69TV0; Match level="QueryCoverage=84%, HitCoverage=31%, E-value=1e-24, Identity=60%"; Hit description =Putative dnaK-type molecular chaperone BiP
MAELIKEPHQWDIRQDAEALRRLRVSCEHAKKALSDQEETMVQIHVTGVESSAPLAGQAGGAQPGPVRQGHATCGWGVGGCPGPTTRAARTWSMRSSSSVAARGCPSSISSSRTTSMAGSQTAAREWNQRTPSFEAPPFFPVLRRRATWRSALTFFTARTDFLWDVMS

SEQ ID NO: 53974 - protein, 385 aa, Zea mays
  Coding DNA Sequence Number=SeqID_12195
  Gene Ontology: Mol. function=transferase activity, transferring hexosyl groups; Biological process=metabolic process
  Homolog annotation: Hit_ID=Q5VMS0; Match level="QueryCoverage=89%, HitCoverage=89%, E-value=2e-69, Identity=40%"; Hit description =Putative UDP-glycosyltransferase
  Pfam annotation: Domain name=UDPGT; Domain location=10-385; Score= -151.4; E_value=0.0054; Accession=PF00201.9; Description=UDP -glucoronosyl and UDP-glucosyl transferase
MGHDSCLRPIFQAARENITAATRCPLLDFAGLLAARGLRLTVVTSPANLPLLSPFLAAHPGHARRLTTAPIVAVVADFFCGWAQPLARDLGAAGIVFSPSGVLGAAVPHSLFRRLVRRPAAAEESSVVTFPAIPGEPVYQWREVSMLYRWFVEGGEEDEQAREPVRRNFLWNVEESWGFVFNTLRALEGRYLEQPLEDLGFRRMWAAVLTPGVAAALAEALERSAVPFVWVVGAGSSGVVPKGFEVRAASAGRGVVVRGWAPQLATLRHPAVGWFMTHCGWNSVLESAAAGVAMLTWPMTADQFVNARLLVDEARVAVPACAGGFGVAPDPGELATVLADVVGEKGRDVRARAKELAAEAARAVMEGGSSYADLDGLVQEIRNLR

SEQ ID NO: 53975 - protein, 68 aa, Zea mays
  Coding DNA Sequence Number=SeqID_12196
  Gene Ontology: Cellular component=membrane
  Homolog annotation: Hit_ID=Q8H829; Match level="QueryCoverage=82%, HitCoverage=17%, E-value=5e-15, Identity=70%"; Hit description =Nodulin-like protein
MAAWKAPAAMLLVQLSNTGMVLLSKVAIDGGMFVLALLTYRSLFGAAIILPVALLQERYINIISDDVR

SEQ ID NO: 53976 - protein, 42 aa, Zea mays
  Coding DNA Sequence Number=SeqID_12197
MEGSALCTQRTNGGGSTPVVVYGRVSIRRQFGLKHTYRSEST

SEQ ID NO: 53977 - protein, 142 aa, Zea mays
  Coding DNA Sequence Number=SeqID_12198
MAVSDDETVEIDGNEERWLCGLAGDDDEDDLWEDAAALFSHSSEHPIHVGDEQQVCGEEGQGEGDEHSAKRCRPSTSTVWLDFEKLFKIVNGKKVSSKRRISRFRPQQSKWIQQKNLPSYWAHMHLPLSERPQTAMHVHQIT

SEQ ID NO: 53978 - protein, 243 aa, Zea mays
  Coding DNA Sequence Number=SeqID_12199
MDTAPGPRCGWQARPRTPKRDARSAKRAALVDGAVHGAGGVEGAARGVGRGVSGGVETARGTGRGASGGVGAARGTGNDARWGVRDGGGTGSDSRRVDIGGWGGASKGKHIFVENNMTRDEYEVGDEVKTVGPCPVTGRERRLEEKASGLCSEGSGENTEGLKAGNEGAPVPGEFAGVGEEELTARAQRGQQSSAQGGQQAEEGEEARCHDDARSDGEAAVGVGAGLGRWWHDVEQGAGAGPR

SEQ ID NO: 53979 - protein, 179 aa, Zea mays
  Coding DNA Sequence Number=SeqID_12200
MALSLNKLLGKSIRHEEFVLLGEGCDLFLLLCGSHNDLSSREGCVQGGVGSRDITVGRSGRQRRERRRGPGRGAWDATRSCFFLTLLTSGIRDSLILSSMASSSLVFTSFVDPNLVAAIAAEFDKRIFALDKKWEHRFGALEKTITGCNAGFSAFVEQVFGDFTNQLAKSEFATYSSIN

SEQ ID NO: 53980 - protein, 256 aa, Zea mays
  Coding DNA Sequence Number=SeqID_12201
  Homolog annotation: Hit_ID=Q2QWE6; Match level="QueryCoverage=71%, HitCoverage=46%, E-value=4e-45, Identity=52%"; Hit description =Expressed protein
MRKDWETYTFRRGAHLQSLCVRAASVERRVSKGERRVKKGAANPGRRTAVLVSGVQAACDETSEEAEQAFLQLLLSSTNGDNIEVLKQSAVAYLNGSDYASQVFLPREQLEKQCSYDAARPLPFSSNFRDATVRSTIPDPDVLQSFGSSSELSSIIPNRDDMVATLLQQTSLKGLPPQWIRPSPPRLEIFEGELQWLNIDNNHELLWDSTMCADTSRGAVIRDLVEQACKAPLALAQHEVFSATLFSNGYADNLVY

SEQ ID NO: 53981 - protein, 253 aa, Zea mays
  Coding DNA Sequence Number=SeqID_12202
  Gene Ontology: Mol. function=carboxypeptidase activity; Cellular component=membrane; Biological process=electron transport
  Homolog annotation: Hit_ID=Q6Z275; Match level="QueryCoverage=97%, HitCoverage=69%, E-value=2e-94, Identity=66%"; Hit description =Putative nodulin MtN21
  Pfam annotation: Domain name=DUF6; Domain location=115-244; Score =30.7; E_value=5.1e-06; Accession=PF00892.11; Description=Integral membrane protein DUF6
MRYAVPMSMYYYGLQDTTASYAIIFLNLIPLTTFILSFAFRMEALRIMSTSGSLKIAGVLVSVGGTMIISLYRGKVLHLWSNHILHHHNEEHDVAVDAASHHRLRGTILLAGSSFMLACWYLIQAKVLNVYPYKYWSSMATCLVGGFQTALAGVILRRDKNAWKIGWDINLVTIVYSGAFATALKYSLNSWAVSRKGPSYPAMFSPLSVVFTVVLGSIFIGDNITIGSLVGTVMVIVGTYTFLWAKANELHQE

SEQ ID NO: 53982 - protein, 164 aa, Zea mays
  Coding DNA Sequence Number=SeqID_12203
  Gene Ontology: Mol. function=molecular_function; Cellular component =cellular_component; Biological process=cell proliferation
  Homolog annotation: Hit_ID=UPI0000D9D565; Match level="QueryCoverage =90%, HitCoverage=32%, E-value=3e-59, Identity=75%"; Hit description =PREDICTED: hypothetical protein LOC55571 isoform 2
MEENNVESYHEITKYLRKDWKLVYHCGMTPQKLPDLVEHNPHIAVEVLSKLINSPDMDAYFDAIVHMDMSLHSMEVVNRLTTAVVLPPGFVHDYISNCIRSCEDIKDKYMQNRLVRLVCVFLQSLIRNRIIDVQDLFVEVQAFCIAFSRIREAVGLFRLLKSLE

SEQ ID NO: 53983 - protein, 139 aa, Zea mays
  Coding DNA Sequence Number=SeqID_12204
  Homolog annotation: Hit_ID=Q10LU2; Match level="QueryCoverage=21%, HitCoverage=6%, E-value=3e-10, Identity=93%"; Hit description=Lung seven transmembrane receptor family protein, expressed
  Subcellular localization annotation: CTP_CleavageSite=20; ConfidenceScore=5.30e-01
MDGHATALTSPAAGCFSHKRAHARNTPTTEFQANLGQPSSTGWQQDEPPLLPVPSIRCRRLPDGYGGAARTLATMRRATLSVALGLSLIALLAARGADASIHEYAGGGFAPRANSFFFHGGSEGLYASDLSSNSSSFIR

SEQ ID NO: 53984 - protein, 359 aa, Zea mays
  Coding DNA Sequence Number=SeqID_12205
  Gene Ontology: Biological process=regulation of shoot development
  Homolog annotation: Hit_ID=Q8SA84; Match level="QueryCoverage=61%, HitCoverage=87%, E-value=1e-105, Identity=86%"; Hit description =Putative teosinte branched2
  Pfam annotation: Domain name=TCP; Domain location=91-330; Score =117.1; E_value=4.9e-32; Accession=PF03634.4; Description=TCP family transcription factor
  Subcellular localization annotation: CTP_CleavageSite=76; ConfidenceScore=5.15e-01
MDSPLYQQLQLSPPSPKPDQSSSFYCYPCSPPFAAADASFHLSYHIGSSATDTHPQTVVNSPEIPVFPLMEQTPAPATEQGAGACGAQGAGVSLDRAYAAPRKDWHSKICTAGAMRDRRMRLSLDVARKFFELQDMLGFDKASKTVQWLINTSKAAIQEIMADDASSECVEDGSSSLSVDGKYNPAELGGGNEKSNGNACSEWKKPAMVRKAATTTKPPRKSGNNAHPVPDKETRAKARERARERTKEKHRMRWVKLASAIDVEVAAASVASDRPSSNNLSHHSLSSMNIPRAAAAELEERERSLLAPNNRGRMQEITGASDVVGFGNGGGYGCDDGNYYCQEQWELGGVVFQQNSGFY

SEQ ID NO: 53985 - protein, 679 aa, Zea mays
  Coding DNA Sequence Number=SeqID_12206
  Gene Ontology: Mol. function=DNA binding; Cellular component =chromatin; Biological process=DNA integration
  Homolog annotation: Hit_ID=Q1SF34; Match level="QueryCoverage=99%, HitCoverage=80%, E-value=1e-136, Identity=41%"; Hit description =Integrase, catalytic region
  Pfam annotation: Domain name=RVT_2; Domain location=320-437; Score =32.7; E_value=2.5e-18; Accession=PF07727.4; Description=Reverse transcriptase (RNA-dependent
MSCPHTSQQNGKAERIIRSTNNIMRSLMFQASLPPSYWAEALHTATYLFNLHPTKTLQFRTPYHALYGYPSEHKGYRCLDLSSNRIIISRHVTFDETSFPFASNQCRIEPTSLDFLTDMDSVQLPVFSPAGNSHNVHTSPTQAAAGQQPSSPRAPVVLRLQPANGPPSDSPPSSPPAQPTCWPRRELVGPSLAAAQPTCAPRAYSPGEVQATSGQTLPTHELPPSTTHERPPVCVEHTRHQITTPAAPGGLAPMVPVVSTRTGHRTAVSVSPTANTHQMVTRGKSGFRLDTDRLNLHVAAISPVPTSLRRALADPNWHAAMTEEFDALQSNETWDLVPRPSGINIVTGKWVYRHKLRPDGSLERYKARWVLQGFTQRPALQTEFAMKDLGNLHHFLGISVTRQPSSLFLSQKHYILDILDRAGMTDCKPCNTPIDTSSKLSSDGPRISDPTQYRSLAGALQYLVFTRPDIAYAVQQACLFMHDPREPHLALVKRILRYLRGTLDYGFLIHKSSLDNLIVYTDADWAGCPDTRKSTSGYAVFLGDNLLSWSSKRQPTVSRSSAEAECRAVANGVAEATWLRQLLLELHNPLRHAAVVYCDNISAVYLSSNPVQHQRTKHVEIDLHFVRERVALGHVRVLHVPTTSQFADIFTKGLPSSVFTEFRTSLNVRPPPAPTKGGC

SEQ ID NO: 53986 - protein, 118 aa, Zea mays
  Coding DNA Sequence Number=SeqID_12207
MATRPNCRIRSSVVCQRSDGRFCSGGGNAVGLQDEELLLPQLPAPPHALQQVLLVPPPRRERQQQKLFGLGRGRGGKVQPAALVVVLRSRRDVGPCRGCGDRGRQRRRRRRHPSHGRA

SEQ ID NO: 53987 - protein, 318 aa, Zea mays
  Coding DNA Sequence Number=SeqID_12208
MATRGRDIQSYCTWRSRSECEDPSQKGHKEPLQPRWGCMFCRLSGHVPAQESFARAPSTVPARWGGVSKPFWGPLARRRGRTLALGLCTRATSGRRPADDRADRPRPHRATLAHGIPLLESCLAGAPAPWMRRRRGTALGVIRAAAGGLHVRMAARVAELPGGACPPELPGLEPRPGAAPPPGPGLKAVPGRAARRRAEAGRCARARAGTVQSARARRVRLLARRLGPPRPCAAGTRAAGARGCQQPGPPSPRAGARPSRPRPSEEPGSGPAVRRRRRLAREHRGASPHPPVAEGLARAAGTVARPFAVEAGPEATRV

SEQ ID NO: 53988 - protein, 144 aa, Zea mays
  Coding DNA Sequence Number=SeqID_12209
MGLRSMTTQNHSDLCVLAEYTTMTAIAGHGSAQQMNLGGSEPSICRLPHSGSSVAAGSTTEFSSTSYKIRLAIGLQGGEVSRGRCPPLLIALFLICDDLWGGERRRISNWMVKLSGEKDGRDESDHRSNAERALEEGPARPHLQ

SEQ ID NO: 53989 - protein, 159 aa, Zea mays
  Coding DNA Sequence Number=SeqID_12210
  Gene Ontology: Mol. function=metal ion binding
  Homolog annotation: Hit_ID=UPI00001632AD; Match level="QueryCoverage =75%, HitCoverage=25%, E-value=7e-40, Identity=61%"; Hit description =protein binding / ubiquitin-protein ligase/ zinc ion binding
MDIDVYAFLGMVLLFVRMCRALMPGDEESMSDEAIWETLPGTPPSARNIPIFALFSPLFILQGAGAFFSLARLVEKVVLLLRNGPVSPNYLTVSSKVRDCFAFLHHGSRLLGWWSIDEGSKEEQARLFYTESTGYNTFCGYPPEVVRKMPKKDLAEEVT

SEQ ID NO: 53990 - protein, 158 aa, Zea mays
  Coding DNA Sequence Number=SeqID_12211
  Gene Ontology: Mol. function=metal ion binding
  Homolog annotation: Hit_ID=UPI00001632AD; Match level="QueryCoverage =62%, HitCoverage=21%, E-value=2e-35, Identity=65%"; Hit description =protein binding / ubiquitin-protein ligase/ zinc ion binding
MQRRRGHTWAGVGKTAQAAAAHAALFCFTLLLALRVDGRTAYSWWIIFSPLWLFHGIVARGRFSMPAPSLPHGRHWAPCHSIVAAPLLIAFELLLCIYLESIRVRNHPSVDLKIVFLPLLAFEAIILIDNFRLCHCKLFFPNYDKALHIMTQPGVAIV

SEQ ID NO: 53991 - protein, 175 aa, Zea mays
  Coding DNA Sequence Number=SeqID_12212
  Homolog annotation: Hit_ID=UPI000069F6EA; Match level="QueryCoverage =77%, HitCoverage=68%, E-value=3e-19, Identity=41%"; Hit description =UPI000069F6EA related cluster
MASDLCVLEGNTNPAPAHLWPYQGKFHHNFSNLCMLGAGTSLPGLVAAKVGADVTLTDIAQNAEVSGLTWGDWDESVFDLRPDIILGADVLYDSANFNDLFATVTFLLENSSGAVFITTYHNRSGQHLIEFLMVKWGLKCLKLLDGFSFLPPCKAALLQGNIQLVEIALDKEKYK

SEQ ID NO: 53992 - protein, 104 aa, Zea mays
  Coding DNA Sequence Number=SeqID_12213
  Gene Ontology: Mol. function=protein disulfide oxidoreductase activity; Cellular component=chloroplast; Biological process=cell redox homeostasis
  Homolog annotation: Hit_ID=Q7G8Y5; Match level="QueryCoverage=99%, HitCoverage=100%, E-value=3e-45, Identity=90%"; Hit description =Putative glutaredoxin
  Pfam annotation: Domain name=Glutaredoxin; Domain location=13-77; Score=65.7; E_value=1.5e-16; Accession=PF00462.14; Description =Glutaredoxin
MDRVTKLASQRAVVIFSASSCCMCHTVTRLFRELGVNPTVVELDEDPSWGKEMEKALARLLGRSPAVPAVFIGGRLVGSTDKVMSLHLSGNLDTMLRNAGALWV

SEQ ID NO: 53993 - protein, 251 aa, Zea mays
  Coding DNA Sequence Number=SeqID_12214
  Homolog annotation: Hit_ID=Q8SA97; Match level="QueryCoverage=37%, HitCoverage=21%, E-value=7e-11, Identity=42%"; Hit description =Ornithine carbamoyltransferase
  Subcellular localization annotation: CTP_CleavageSite=49; ConfidenceScore=5.12e-01
MAPPVDVAGLRPRLGDVEAPPRPRSSLSSVVEVKSEPLGRARRSSSSSRAEPKSEPWVRRSGVHRLPGLSPSPSPGSGGAEFAVFRDLARVRALGRAERSGAVLLPDRSVERRSDGGHFGSTGWGAHVRIKGGIRSIKAPGLCEISLFPYLFLPLRPQHPSNPRLGNCLAISAVGPSCCPGVPRFNSPSVLPGSPGRVDDRQGANSSPEEDPRHNTIAHVTRNLRASTFGVELRVRGDASPWPLGGAAALC

SEQ ID NO: 53994 - protein, 581 aa, Zea mays
  Coding DNA Sequence Number=SeqID_12215
  Gene Ontology: Mol. function=transferase activity; Cellular component= chloroplast; Biological process=metabolic process
  Homolog annotation: Hit_ID=Q53NI2; Match level="QueryCoverage=99%, HitCoverage=68%, E-value=0.0, Identity=65%"; Hit description =Probable NAD kinase 2, chloroplast precursor
  Pfam annotation: Domain name=NAD_kinase; Domain location=308-555; Score=83.2; E_value=8e-22; Accession=PF01513.11; Description=ATP-NAD kinase
MLVEIGTAPSAEQVKQFAALVSDGAKKPIYLHSKEGVSRTSAMVSRWKQYVTRSERLAVQNHYINGNGKVLTSDKTKQHTGSPSSSMNRTEIGMVTESDRTMNNGESCEIDIETARHNLEVTNALSDDQSTQQGEMLGTGTEPLSNFKLESNPLKAQFPTCDIFSRKEMSKFFRSKKVYPKSVLNSRRQSSSLLVSRRKQNFSTERNGTIDYEAAEFTILESSNGTSFDNDYILSVSSGITDGKPSNNGAFSLIEKKEREVSVTTFDTRASASSSNGKVQVGSQKTAEKNGTPYLERNNSNNVDGSMCASATGVVRLQSRRKAEMFLVASFLHHQEKMNVLVEPDVHDTFARIPGYGFVQTFYTQDTSDLHERVDFVTCLGGDGLILHASNLFRTSVPPVVSFNLGSLGFLTSHNFKDFRQDSRDLIHGNNTLGVYITLRMRLRCEIFRSGKAMPDKVFDVLNEVVVDRGSNPYLSKIECYEHNHLITKVQGDGVIVATPTGSTAYSTAAGGSMIPDEARSNAWVSFDGKRRQQLSRGDSVRISMSQHPLPTVNKSDQTGDWFRSLIRCLNWNERLDQKAL

SEQ ID NO: 53995 - protein, 162 aa, Zea mays
  Coding DNA Sequence Number=SeqID_12216
  Homolog annotation: Hit_ID=Q10NQ5; Match level="QueryCoverage=70%, HitCoverage=49%, E-value=2e-07, Identity=33%"; Hit description =Harpin-induced protein 1 containing protein, expressed
  Pfam annotation: Domain name=Hin1; Domain location=11-135; Score =32.4; E_value=1.6e-06; Accession=PF07320.4; Description=Harpin -induced protein 1 (Hin1)
MEHDSVGFDEIEVLSAFNFRPPAALDIGLTLTVHATNPNVVPVRYGPSTVSILYGGAHLGTARLNAGEQPATSCRLLHLPARLDGVELAQRARALLFDVARRHMELDAAVEIAGEAAVLLWSRPFSVRIDSHITVDPVFLEVVDQENRLEMQLYLASIFFTN

SEQ ID NO: 53996 - protein, 80 aa, Zea mays
  Coding DNA Sequence Number=SeqID_12217
MEAARQQQEECSCGGAEAADQFERLHDAVLLDVLNRIDDVKALGRCALVKTQLVTRIGSRLSLLSQIGIDLPVRKGKGVS

SEQ ID NO: 53997 - protein, 156 aa, Zea mays
  Coding DNA Sequence Number=SeqID_12218
MLARRCFVPVLPSATRAHSRYLLGQGLLLPICSSDTVETAVAVVPGPARRRGWLRKLIPTNYLPRSSWCWRLTVLSATGASRRKGGEITSAPDVVCPSPQGVCLNASKLKPYQRHLHNKYKAKYIYAEMWYAHGTSIQTSVKYMCSTTGTNSDYCY

SEQ ID NO: 53998 - protein, 175 aa, Zea mays
  Coding DNA Sequence Number=SeqID_12219
DGQPPAPAAPGQVVRGYELPQPPAPACRAWDHRHCRLDGVARANGKEKPLAEQVTAVRTGCGREDGDKAAPSEHGEWKGGDGRDSPDLTWNRASATAVGTKEIRRLGDGDIREFNPTAPEHAVSFRDIQPLAHDDDDTDARPAAPRSSRPVGASPSPAHAGPAPPAPASPSPPSK

SEQ ID NO: 53999 - protein, 72 aa, Zea mays
  Coding DNA Sequence Number=SeqID_12220
MSYASLATREGAANALSREGYRQFEVFERSDQDFDQEALRDEEVEDFGGLEFSLATLDVGVEVLMTEPKQDG

SEQ ID NO: 54000 - protein, 165 aa, Zea mays
  Coding DNA Sequence Number=SeqID_12221
MDKDHQESSKNKRKLRYGWWTLIVIRRPLCTSTTRGFEVWSCKGCGYGCRCDYALPPGAQVAAVVVVPSPDRANQDVALSSIEADASGGSGPECFCRGLPARGCQQIRHSHLAGDQWLLLSLAKYRLEHSWRPRLCSYVLRRNCWIIRLSAFGQTTPNLSETSPL

SEQ ID NO: 54001 - protein, 56 aa, Zea mays
  Coding DNA Sequence Number=SeqID_12222
MERVVEEFAFVQATVAVIATVDGHGGRRLADQRDGTNMYKNGKYKIRTLNVNAKWM

SEQ ID NO: 54002 - protein, 269 aa, Zea mays
  Coding DNA Sequence Number=SeqID_12223
  Gene Ontology: Mol. function=protein translocase activity; Cellular component=outer membrane; Biological process=intracellular protein transport
  Homolog annotation: Hit_ID=Q6H7M7; Match level="QueryCoverage=75%, HitCoverage=39%, E-value=4e-36, Identity=39%"; Hit description =Putative outer envelope membrane protein OEP75
  Pfam annotation: Domain name=Bac_surface_Ag; Domain location=28-267; Score=-5.8; E_value=0.00023; Accession=PF01103.13; Description =Surface antigen
MGAQQSVNAGKAKVDMKVDLTHMLCEALLLPPLRSSGVTLSQIVGRFLICCLFPQNIRPVNNQGHSIARDHDGFPLTCSGNLHDNMIILKQESGYADVNDNSFLKVNFQMEQGLPLVPKSLTFNRVKCAVSKGIKLGPTFLVTSLTGGSIVGDMAPYQAFAIGGLGSVRGYGEGAVGSGRLCLIANCEYTIPLVKHLEGSIFMDCGSDLGSARHVPGNPALRQGKPGFGIGFGYGLHFNTDLGQIRVDYAMNAFNRKTIYFGINSSGGS

SEQ ID NO: 54003 - protein, 96 aa, Zea mays
  Coding DNA Sequence Number=SeqID_12224
MTSKLVLHIKRHIDKSIAIAFRQYANNAAVARQSWPGCSAEWPAVGRAETSSFEANAAMGNPLFGVGVSSSCASIVMADRGAESAGMATGEDRDGA

SEQ ID NO: 54004 - protein, 185 aa, Zea mays
  Coding DNA Sequence Number=SeqID_12225
  Homolog annotation: Hit_ID=Q8LML8; Match level="QueryCoverage=28%, HitCoverage=3%, E-value=1e-10, Identity=64%"; Hit description =Putative DNA helicase homolog
MQMDFAIERAWWSGGSNKTPLMHKLWWGHVGKGSSYPVFSYAPVMMRYCPSSLKCSSQDLRTISGACPASDTAHTAGSVPWAPAAYLGVPERIDHPCARREGKPSRGGGSEASAEALQQGAGRDWAPSCRNAPNAKGACLPVTAAHAHMACAALRLRGPWPGRETNPPAGTPPVVSAAQKERVLS

SEQ ID NO: 54005 - protein, 150 aa, Zea mays
  Coding DNA Sequence Number=SeqID_12226
  Gene Ontology: Mol. function=transferase activity, transferring glycosyl groups
  Homolog annotation: Hit_ID=Q6YUV6; Match level="QueryCoverage=56%, HitCoverage=73%, E-value=2e-30, Identity=76%"; Hit description =Dolichol-phosphate mannosyltransferase-like
  Pfam annotation: Domain name=DPM3; Domain location=1-86; Score=152.1; E_value=1.4e-42; Accession=PF08285.2; Description=Dolichol-phosphate mannosyltransferase sub
MKHIFKIAAILVAISAIWIALLETSTVPRSYTWLLPIYLVVALGCYGLFMVGFGLMFFPTCPREAVLLQQDIVEAKEFLGKRGVDDSNPRAYGVAKLAKYSGCKAAGLAVPYRDSNTGHNSLILITTKLPVEIRKQRAKLRFYGLGTYRG

SEQ ID NO: 54006 - protein, 67 aa, Zea mays
  Coding DNA Sequence Number=SeqID_12227
MARVACTLRGKRLDGGLETSRTEPGSARLGKAWWNSEPSQARLGHFASSIMRLGSAREPRHSSTQQQ

SEQ ID NO: 54007 - protein, 42 aa, Zea mays
  Coding DNA Sequence Number=SeqID_12228
MASTSCGVIDGERAVAMGLIGEETKAEGPMRDCHSNREFWDI

SEQ ID NO: 54008 - protein, 52 aa, Zea mays
  Coding DNA Sequence Number=SeqID_12229
MPMENTWSLHESKSDTIVRVVQQGLVESANSFMGQFHVGSILILQPNDHCAN

SEQ ID NO: 54009 - protein, 613 aa, Zea mays
  Coding DNA Sequence Number=SeqID_12230
  Gene Ontology: Mol. function=4 iron, 4 sulfur cluster binding; Cellular component=endoplasmic reticulum; Biological process =electron transport
  Homolog annotation: Hit_ID=Q8H8N3; Match level="QueryCoverage=93%, HitCoverage=92%, E-value=0.0, Identity=77%"; Hit description =Putative oxidoreductase
  Pfam annotation: Domain name=Flavodoxin_1; Domain location=47-189; Score=104.5; E_value=3.1e-28; Accession=PF00258.15; Description =Flavodoxin
  Pfam annotation: Domain name=Radical_SAM; Domain location=323-505; Score=14.9; E_value=0.0077; Accession=PF04055.11; Description =Radical SAM superfamily
  Pfam annotation: Domain name=Wyosine_form; Domain location=478-542; Score=123.2; E_value=7.2e-34; Accession=PF08608.2; Description =Wyosine base formation
  Pfam module annotation: Pfam domain module=Flavodoxin_1::Radical _SAM::Wyosine_form; Domain location=47-189::323-505::478-542
  Subcellular localization annotation: CTP_CleavageSite=59; ConfidenceScore=5.85e-01
MPPFPAATTTSHLALLVLFSSSSLFFLYKSLRLRRKPSPARTATPTLLFASVTGTSKTLAARLSARLTADAGFPVRATDAATFDPDDLPSVHLLLLVIPTHDGGATPPSAAFLSRWLEESAADFRAGALLLSGLRFAVFGVGSRAYGETFNAAARNFSRWLRALGAVEVVPLGEGDIDSGDLEAVFEEWNRRVLRVVKGEEVGYGANEKNNGLDELELEGEDWDDDDEEMVDAEVDMEDIAGKAPARRKNGNLEGVLANGVHNGVKDMVTPIIRTSLEKQGYKIIGSHSGVKICRWTKSQLRGRGGCYKHSFYGIESHRCMEATPSLACANKCVFCWRHHTNPVGKSWKWKMDDPLDIVNAAIDQHTKMVKQMKGVPGVKPEKLDEGLSPRHCALSLVGEPIMYPEINALVDELHRRHISTFLVTNAQFPEKIKALKPITQDSLKSLHEKDQRTVYRLTLVKGWNAEEIDAYAKLLDLGQPDFIEIKGVTYCGSSATSKLTMENVPWHSDVKEFSEVLASKSGGVYEVACEHAHSCCVLLAKVDKFKINGKWHTWIDYDRFHELVTSGKPFNSRDYMAMTPSWAVYGAEEGGFDPDQSRFKKERRHGTAALRS

SEQ ID NO: 54010 - protein, 729 aa, Zea mays
  Coding DNA Sequence Number=SeqID_12231
  Gene Ontology: Mol. function=methyltransferase activity; Cellular component=cellulose and pectin-containing cell wall
  Homolog annotation: Hit_ID=Q9FMJ2; Match level="QueryCoverage=68%, HitCoverage=66%, E-value=1e-156, Identity=49%"; Hit description =Ankyrin-like protein
  Pfam annotation: Domain name=DUF248; Domain location=240-724; Score =799.5; E_value=1.9e-237; Accession=PF03141.7; Description=Putative methyltransferase
  Pfam annotation: Domain name=Methyltransf_11; Domain location=352 -447; Score=31.2; E_value=3.7e-06; Accession=PF08241.2; Description =Methyltransferase domain
  Pfam module annotation: Pfam domain module=DUF248::Methyltransf_11; Domain location=240-724::352-447
  Subcellular localization annotation: CTP_CleavageSite=78; ConfidenceScore=5.05e-01
MTVARGPPGRPSSGLLGCWRRRPALGFGAKVGIAIALGLSFAIIWTSVSPTSSSQQISTERSSFAAEVAAPPTASHNRAAAGGDSGSGGHAHRKPRPVPHSHKKRHPAPSGSHSHPHPSNVTSSPDTTAAKDDHSEPALVTDPEPKEEQEPDMEMEPEQEAELPMPEQGGDNSGKAPAEEDEEKPPQLELEDEPNEVDGEEDDPEAAKRKAPSKKRKLPPLFSPGARYHWKLCGANSGYHYIPCVDFDGDGRQRHHERSCQRSPVTCLVSLPKEYKQPAPWPERKDKVWYGNVGHPRLSNYVKGHNWLNHSGEYLMFPPDEWEFKGSARHYVESIDEMAPDIDWGKNIRIILDVGCKSAGFGIALLEKDVITLSLGLTNDQTDLAQVALERGIPATVGSLGSRRLPFPSGAFDAIHCGECNIPWHSNGGKLLLEINRILRPGGYFIISSRSADLESEEGISASMTALCWNAIAYNSDDVSEAGVKIFQRPVSNEVYDLRAKKDPPFCKEEQNKASAWYTNIKHCLHKAPVGIEERGSDWPEEWPKRLESFPEWLGETETRVASDHNHWKAVVEKSYLDGLGIDWSNIRNIMDMRAVYGGFAAALASKKVWVMNVVPVHAADTLPIIYERGLIGVYHDWCEPFSTYPRSYDLLHADHLFSRLKIRCKQPVSIVVEMDRILRPGGWAIIRDKLEILDPLETILKSLHWEIVMTFRKDKEGIMSVKKTTWRP

SEQ ID NO: 54011 - protein, 154 aa, Zea mays
  Coding DNA Sequence Number=SeqID_12232
  Gene Ontology: Mol. function=DNA binding; Biological process=DNA integration
  Homolog annotation: Hit_ID=UPI00004C1731; Match level="QueryCoverage =63%, HitCoverage=6%, E-value=3e-39, Identity=78%"; Hit description =UPI00004C1731 related cluster
MILKGLKPRIFNELNKFSRRWLSELPSVIWSLRTTLSRATGFTPFFLVYGAKDILPTNLEHGSPRLRAYNDLNNQVNREDSLDQLEEARDVALLHSVRCIKFTYTYKENDPWGNSRSMAQNRHASAYGAPDSVWCPGWRTQRTSRSRENTTLLD

SEQ ID NO: 54012 - protein, 133 aa, Zea mays
  Coding DNA Sequence Number=SeqID_12233
MEAGSDKAAWNKDKARRNTASGSSTNHIGAGEVPRSVCSSGSPLGDEEACKWEVSCDGEAGGGCVTEEAATIAAIEMSRRIWARQVVVVSRWIRVRHEENEDGHQSKLEKKEIFKSEILYKPDLKINDRVINN

SEQ ID NO: 54013 - protein, 674 aa, Zea mays
  Coding DNA Sequence Number=SeqID_12234
  Gene Ontology: Mol. function=hydrolase activity, acting on acid anhydrides, catalyzing transmembrane movement of substances; Cellular component=integral to membrane; Biological process=proton transport
  Homolog annotation: Hit_ID=Q2R471; Match level="QueryCoverage=93%, HitCoverage=88%, E-value=1e-114, Identity=43%"; Hit description=E1 -E2 ATPase family protein, expressed
  Pfam annotation: Domain name=Cation_ATPase_N; Domain location=5-72; Score=16.4; E_value=8.1e-05; Accession=PF00690.16; Description =Cation transporterATPase, N-terminus
  Pfam annotation: Domain name=E1-E2_ATPase; Domain location=119-336; Score=-37.8; E_value=3.3e-07; Accession=PF00122.10; Description=E1 -E2 ATPase
  Pfam module annotation: Pfam domain module=Cation_ATPase_N::E1-E2 _ATPase; Domain location=5-72::119-336
MAALDDKAMTDLETLEEEEVLRRLGTAEEAGLTDNEAARRLRLHGPNVVVLSHHEGSMLHGFLMALFSLWGWDHVFPKYNNMVRVILNSMSWVTVLTIVVSLAITSAGQRSCELAIIIFVVATCLIACFTAMLVLEYAKAPLEAKAHAPRAKVLRDGNWRDVHAANLVPGDIIFLKVGDIVPANARILRFQKIDTMTCWAKRSVDCAHGFLLYYAWTVSCGQGTAVVIATGRGIPRSTLRLYPQRYARPGQLKEGAMLTGCFCASLVLVGTFAEIVLRFLFQKQNYRGMPLDAHFMPLIGGIPMAMPTFFYLALALGSVRLCFLGIASRGTVALEDLASVDVILFNMTAARASRSQHELYIEPIDAAILSLLDDPEQVAHHCGSSKEVKEKISMIMDELALDGYQAIAVGHQVDSCWDFIALLPYTDDLRSDSADVVDSLIDLGLDIRVLTESPLSTTKQVYLYLLCTSCKVLFLQVLVTILLSSYLSTEDKSDIIFTISSTVHLDPAGLTPILIVMKFGVRVILHLWNFDLSNILAFMITACNYCTSFAMLFERVELNKSPDKWRVQKIITSGAAFGSYIVLTTAIFYRVATTANPFAISTVNQAIALFVHSDGCCIIRWPGPFVTFAFVVSQTVATQKVVHGDLNFALTKGNMFVLSFYRSQMETRKDDESS

SEQ ID NO: 54014 - protein, 165 aa, Zea mays
  Coding DNA Sequence Number=SeqID_12235
  Subcellular localization annotation: CTP_CleavageSite=78; ConfidenceScore=5.49e-01
MDPSNNCASDGSGSDGNEDRLVNTSSRGGRLMPSSPTGPQLMSLFNPAVDAGSSGSSLSPSSSGAFDQEALPTPNRVRCLRLVPTNNTIIMEGELLDDDDNEPGNPSGTRRSTFIDNNGPINRVSIVSDLDLVLVGGSRRRRRVSNVQGKEVIGHLFTITLNSIY

SEQ ID NO: 54015 - protein, 321 aa, Zea mays
  Coding DNA Sequence Number=SeqID_12236
  Homolog annotation: Hit_ID=Q75M70; Match level="QueryCoverage=27%, HitCoverage=47%, E-value=3e-22, Identity=62%"; Hit description =Expressed protein
MAHLTVRCATGAPTVRHQCANALSGFCDWEGSAVDQPGPTWQRMDRELIARPPSHVALDTFARDSQGARVPPPQTSAQLLGLPAGLDTYRRRVTIEPWATRAHYELKLLGDSHVSPCVPVPCKPGNSLISESPARQSRVSTPETSESMAEAEVDARATADDEGRGGSSSNVAEDGQPAAAKGRATISVTVVLLALLVASVAAFLTSSLPRAGDGDGEGVQGAAGRAGEVGKRAEPVEHAVGIPGFNSRLDAFRTWAALTWMKLRRPRCSDEPRYDDDGAVGSLGDAAKKSFEMGKETVEQAAAATARATRDAAETAKEKSA

SEQ ID NO: 54016 - protein, 206 aa, Zea mays
  Coding DNA Sequence Number=SeqID_12237
  Subcellular localization annotation: CTP_CleavageSite=56; ConfidenceScore=5.12e-01
MQAACNRTKGVHPFDFDASSMEAQAHTSCNRRVGYYVTGGTFGMRSRRHFTSAIMTASKKAGPSEGFNSRLRALGLRAHYWLAPEGFDSRLRARRARDDPGYVRYITKAQATLPSLGRHRKIRLARPQGSGSTSTLDDRLRLARPQGSDSTSTLDDELCLARPRARTQPQPRKTVSASPDPGLGLSLDPRARTQPRPRRSLRLTPT

SEQ ID NO: 54017 - protein, 727 aa, Zea mays
  Coding DNA Sequence Number=SeqID_12238
  Gene Ontology: Mol. function=glycerophosphodiester phosphodiesterase activity; Cellular component=membrane; Biological process=glycerol metabolic process
  Homolog annotation: Hit_ID=Q6ZFH9; Match level="QueryCoverage=88%, HitCoverage=83%, E-value=0.0, Identity=57%"; Hit description =Putative glycerophosphoryl diester phosphodiesterase 2
  Pfam annotation: Domain name=GDPD; Domain location=391-683; Score =154.9; E_value=2.2e-43; Accession=PF03009.8; Description =Glycerophosphoryl diester phosphodiesterase family
MGRSSRACSLSRFRPAAPPAAALARLRGRPEGLHMEDPERFCRSAQGYSSTFVHPHDPNSNNHLIVPGKAPVIVAKGGFSGLFPDSSDFAYRILGTISSPDTVMWCDVRLTKDGDGICLPSINMDNCTMIDNVFPEGKKTYNVNGVSTVGWFSVDYTSTDLLPNVTLKQSVLSRTPVYDGSMLINSVENVFTSFNASAVWLNVQQDSFYSQFKLSMRNYILSLSKQFITDYISSPEVNFLTSISGRVSKKTKLVFRFLDEGSIEPSTNQTYGSMLKNLTFVKTFASGILVPKSYIWPVTPDNYLLPYTSVVDDAHKAGLEIYAADFANDFTISYNYSFDPLAEYLSFIGNSAFSVDGVLTDFPITPSEAVGCFSNLNNSKIDHAKPLVISHNGASGDYPDCTDQAYEKAVADGADVIDCPVQVTKDGILICMSSVDLMDVTTVGKSSFTSQVTTINDLKAGPGVFTFNLTWDDISKNLQPMISNPMSTYKLYRNPRNKNAGNFMRLSDFLTFAKGKDLSGIMITVEHAAFMAEKLGFGVVDAVVKALDDSGYSKQTAQNVMIQSTNSSVLKKFKQETKYSLVYMIEEGVRDAAPSSLADIKKFANAVSVSTTSVLPQTHYYLTNQTNKLVTSLQSAGLQVYVYVLMNEFASQPNDFFADATSQINAYVQGAKVDGIITDFPGTAHRYKLNSCTSMGNSAPLFMQPPQPGSPAQHHMRRGALELRISH

SEQ ID NO: 54018 - protein, 677 aa, Zea mays
  Coding DNA Sequence Number=SeqID_12239
  Gene Ontology: Mol. function=actin binding; Cellular component =cytoskeleton; Biological process=establishment and/or maintenance of cell polarity (sensu Fungi)
  Homolog annotation: Hit_ID=Q6YXZ9; Match level="QueryCoverage=94%, HitCoverage=95%, E-value=0.0, Identity=84%"; Hit description =Putative fimbrin 1
  Pfam annotation: Domain name=CH; Domain location=127-243; Score=98.2; E_value=2.5e-26; Accession=PF00307.21; Description=Calponin homology (CH) domain
  Pfam annotation: Domain name=CH; Domain location=274-376; Score=88.3; E_value=2.3e-23; Accession=PF00307.21; Description=Calponin homology (CH) domain
  Pfam annotation: Domain name=CH; Domain location=398-503; Score =113.5; E_value=6e-31; Accession=PF00307.21; Description=Calponin homology (CH) domain
  Pfam annotation: Domain name=CH; Domain location=519-626; Score=88.5; E_value=2e-23; Accession=PF00307.21; Description=Calponin homology (CH) domain
  Pfam module annotation: Pfam domain module=CH::CH::CH::CH; Domain location=127-243::274-376::398-503::519-626
  Subcellular localization annotation: CTP_CleavageSite=37; ConfidenceScore=5.01e-01
MSTFIGVLVSDPGLQSQFTQVQLRTLQTKFASAKRPNAEHVTIKDLPPMMEKLRGIHEVLSEEEISGFLSETYPDMNQPIEFEPFLKEYLNIQAKGSSKSGGKKKLKGSVSFLKASTTTLLHVINESEKTSYVNHINNFLKEDPFLKNFLPLDPASNELFNLVRDGVLLCKLINVAVPGTIDERAINTKKHLNPWERNENHTLCLNSAKAIGCTVVNIGTQDLIEARPHLVLGLLCQIIKIQLLADLNLKKTPQLAELVADDNGKEVEELVTLAPDKMLLKWMNFHLKKAGYKKTVTNFSTDVKDGEAYAYLLSTLAPELSSKTMIETSDPKERAQKVLETAEKLDCTRYVTSKDIVEGSANLNLAFVAQIFQNRNGLSTNTVAPVIEDTPDDVEASREERAFRLWINSLGIPTYVNNLFEDVRTGWVLLEVLDKISPGSVNWKHASKPPIIMPFRKVENCNQVIKIGKELNFSLVNVAGNDIVQGNKKLILAFLWQLMRTSILQLLRNLRSHSKEKEMTDADILIWANSKVKESGKNSHIESFKDKTIADGVFFLELLSAVQSRVVDWNMVKKGEDEEEKKLNATYIISVARKLGCTVFLLPEDIMEVNPKMILTLTASIMYWSLQNQGPYKSSGPQDALLEEEEGEEEEEEEEEEEEEEEDFEGGVEDGVSETTT

SEQ ID NO: 54019 - protein, 104 aa, Zea mays
  Coding DNA Sequence Number=SeqID_12240
  Subcellular localization annotation: CTP_CleavageSite=39; ConfidenceScore=5.51e-01
MARSLVVFNSQPTALARPKSFRHQILPLARRPINSSDVAATSEQRWRRLPPHTSPSPPPSLEKTRRCREDTAVQRRHGGAEKTRRTTTDTTPLPKQWRVISILS

SEQ ID NO: 54020 - protein, 172 aa, Zea mays
  Coding DNA Sequence Number=SeqID_12241
MPPSASMPATHTAVYVAAVPLRAPKGPAQLLMSAGYSLGMWDLQHFMVLLRPDPALAQALVFDFQPRDPEDVLAALAVLSRREIPEERCGGSRTGGAGSWGTAATPSVPPQGSASGGRPAWWSGSTTAGTTPTMDDLNCTDYGHISDSINWRPNTQCRNFMETRRRFEREKK

SEQ ID NO: 54021 - protein, 97 aa, Zea mays
  Coding DNA Sequence Number=SeqID_12242
  Gene Ontology: Mol. function=nucleic acid binding; Cellular component= nucleus; Biological process=mRNA processing
  Homolog annotation: Hit_ID=Q10KN7; Match level="QueryCoverage=66%, HitCoverage=57%, E-value=2e-27, Identity=80%"; Hit description =Polypyrimidine tract-binding protein, putative, expressed
MDGTLQPAVGADGRQVEAQGNVLLASIENMQYAVTVDVLHTVFSSFGSVQKIAIFEKNGGTQALIQYPAFVVDEGRRLWEAAGAKGLSSLAAPLPDT

SEQ ID NO: 54022 - protein, 192 aa, Zea mays
  Coding DNA Sequence Number=SeqID_12243
  Subcellular localization annotation: CTP_CleavageSite=79; ConfidenceScore=5.19e-01
MVFGEAVDSTQHAPPTAITNLAQVAAYPSSLKVSSIPNKAKRVWGQQRLQQHQPCRDRSSPSTVGNSHRDIPRALKGLNSGAKTQLVWHKFHCVLGSSQRLPSSPAFGYHQGKKGRYLPFKSDAQQSSGGLGQPCTFHLLSYIVQKTEYNESKGLKGTVLVPDHVLDGLWPYEGLKPLKLLKLQEEGKREGC

SEQ ID NO: 54023 - protein, 270 aa, Zea mays
  Coding DNA Sequence Number=SeqID_12244
MDMGSNSHTPIPTGYSTTEHTKKQGHALDLDSGDWRPYLQAGCLRRHAGDGGGAEGDDAAVSPVTGSAPPSPAQCSARVPPSAAGYLVRRHLHSVPERCSVGSWLCSFCSRGGNGGKGSWAGPLGKRNQRREKKKNTLFLTKNSKIDLHINSKRFNQCMRSLNAVCKCKMVVCIRSHGRRFGGTAAASAHCRGSYSSFFISTGGLAPAAGTSAPQRQGALTALPGGQIRRHGHHARAGAWHSRRGSAFSDGAPGTRSRQTGRPLPSGASS

SEQ ID NO: 54024 - protein, 92 aa, Zea mays
  Coding DNA Sequence Number=SeqID_12245
MSSPAQPYLTSSLQTSIESRRRSARQQEIPRIGLGMIFYVLVDLMLGMDVDCYLDCLARLTINNRVMRKKNQVDPKRGLICKLKLMNQTEDG

SEQ ID NO: 54025 - protein, 551 aa, Zea mays
  Coding DNA Sequence Number=SeqID_12246
  Gene Ontology: Mol. function=transcription regulator activity; Cellular component=nucleus; Biological process=regulation of transcription
  Homolog annotation: Hit_ID=Q5N802; Match level="QueryCoverage=87%, HitCoverage=97%, E-value=1e-164, Identity=65%"; Hit description =Putative bHLH transcription factor
  Pfam annotation: Domain name=HLH; Domain location=362-412; Score =35.9; E_value=1.4e-07; Accession=PF00010.16; Description=Helix-loop -helix DNA-binding domain
  Subcellular localization annotation: CTP_CleavageSite=40; ConfidenceScore=5.05e-01
GFGGSCAAAACPLAFLCSIGGVTARGCRACSWAEFGVLACAVLVPVPLARLRLRTLAADLRATPGAPEMDCGPPDQLPPSSAPACFLNLNWDQSMAAATAGDHLDLVSSPASNSTAADGLALHGISPQPQYGGTPLSSPRKLNLSMMGQFHHYPPMGHLDQFLADPGFAARAARLSGFDGRPGGSGYGGAVPGQFGLPDAGPIGGALRELELGNGRDESSVSDPASASAEMALKAPSDGNAKKRKASGKGKGKDGPGSTAATKVRAQLRCSGSPIPPPHAATRFRSGAKRFHSGRVPQEESSGKRCKSAEESNGAEENSGKGKAAAQSNSDNGGKKQGKDGASKPPEPPKDYIHVRARRGEATDSHSLAERVRREKISQRMKLLQDLVPGCNKVVGKAVMLDEIINYVQSLQRQVEFLSMKLATVNPQLDFNNLPNLLPKDMHQSCGPLQNSHFPLETSGAPLPYLNQGNPLIGCGLPNGMDNSQSSMHPLDPAFCRPMSSQQHPFLNGVSDAASKVGTFWQDDLQSVVHMDMGQQSQQEMAPTSSNSYND

SEQ ID NO: 54026 - protein, 341 aa, Zea mays
  Coding DNA Sequence Number=SeqID_12247
  Pfam annotation: Domain name=DUF506; Domain location=36-220; Score= -11.2; E_value=4.4e-08; Accession=PF04720.3; Description=Protein of unknown function (DUF506)
  Pfam annotation: Domain name=PriCT_2; Domain location=80-151; Score= -0.6; E_value=0.018; Accession=PF08707.1; Description=Primase C terminal 2 (PriCT-2)
  Pfam module annotation: Pfam domain module=DUF506::PriCT_2; Domain location=36-220::80-151
MAVYIRLDDAVRARLHGDAAAGCTSSGSDHDASACLSGLVQAFLETGASAAEAGGPGPAPKECDSNKKDGPGRAAAAVASVRALLDPPAEEDVFRIRLAAAVAAAAEAEAALRAHGAAFRRAVAWRLRGAGYDAGVCRSRWEASGGITAGAYEYVDVVAPAPVGPGARQRARYIVDADFPRGAGGGPRHARAPVGNNRHGRSHAVRSLESTTDPWLSDERCRDNNRVEHCCVAWSVAGSLGGVGFAQWIGVEKGGAKLLLPVWSSVRWIKRIMRWRGDETRRIATVDACRGVEGPCGAQSPLHSKAGVRQLGEASARRLRGCGCVCVSVGTMKWSRQPRLL

SEQ ID NO: 54027 - protein, 104 aa, Zea mays
  Coding DNA Sequence Number=SeqID_12248
MELVLYTRVLCQTQSRTKEKVPIGGTSSSTGARLVATPRGRPHGNAKGQAGSCGLPLPVFPIGGTWLALTWPNRARLAQARVTEDKGRDAAAYPQTPPRNADTQ

SEQ ID NO: 54028 - protein, 112 aa, Zea mays
  Coding DNA Sequence Number=SeqID_12249
  Subcellular localization annotation: CTP_CleavageSite=9; ConfidenceScore=5.32e-01
MPAYAVQPAAALRWSAVKGPVRGLREDTAPAPRSRTVRPKAADRPRLTRGHRRRFLLSDWRPKKVPTYFLATLLGTEVADLQNQAYMADPKDLNSASPNSDTRLTNLSGRRA

SEQ ID NO: 54029 - protein, 72 aa, Zea mays
  Coding DNA Sequence Number=SeqID_12250
MDLDRTLFLLRSYLLLEKAFWRAVTTGMTKSLASSSRVDDVESPVLERVGMCPRRQRHRPANSSLQIQTALG

SEQ ID NO: 54030 - protein, 296 aa, Zea mays
  Coding DNA Sequence Number=SeqID_12251
  Gene Ontology: Mol. function=D-alanyl-D-alanine endopeptidase activity; Cellular component=integral to membrane; Biological process=cytochrome complex assembly
  Homolog annotation: Hit_ID=Q5N808; Match level="QueryCoverage=99%, HitCoverage=59%, E-value=1e-114, Identity=68%"; Hit description =Putative growth-on protein GRO11
  Pfam annotation: Domain name=DUF1119; Domain location=3-278; Score= -117.1; E_value=0.03; Accession=PF06550.2; Description=Protein of unknown function (DUF1119)
  Pfam annotation: Domain name=Peptidase_A22B; Domain location=34-296; Score=259.0; E_value=9.6e-75; Accession=PF04258.4; Description =Signal peptide peptidase
  Pfam module annotation: Pfam domain module=DUF1119::Peptidase_A22B; Domain location=3-278::34-296
MAVGTVACASVWTVVVVGEEPTKQGDVSLGGEENPDAEVVELQANTALVFIVTSSLVLLFLFFFNSNWSAWLLVCLFCLGSLQGMEFVVSSLVVRLCQRCREAKVKLPALGNVKVVTLVVLPLAFIFAVTWAAHQDSPVAWVGQNLMVASALLVSAFFYDIFWVFISPLIFKKSVMITVARGSDDGPSLPMVLKMPKEFDSWNGYDMIGFGDILFPGLLVAFSFRYDRTHGKDLTDGYFLCLMIGYAFGLSCTYVGLYLMNSGQPALLYLVPSTLGVIVLLGARRGELGQLWNAKV

SEQ ID NO: 54031 - protein, 113 aa, Zea mays
  Coding DNA Sequence Number=SeqID_12252
  Homolog annotation: Hit_ID=Q9FGA1; Match level="QueryCoverage=59%, HitCoverage=47%, E-value=8e-26, Identity=79%"; Hit description =Arabidopsis thaliana genomic DNA, chromosome 5, P1 clone:MPF21
MGYLISRISGLLIKCQVHSDIKVAPTSDVKDDSKSETRRIKMLYDGDCPLCMREVNMLRERNKSYGAIKFVDISSKDYSPDDNQGLDYETVMGKIHAILSDGTVITDVEEMTN

SEQ ID NO: 54032 - protein, 36 aa, Zea mays
  Coding DNA Sequence Number=SeqID_12253
MGAWKEQHDECAAKVMKGHRVLDYLVLVNTYEEWDH

SEQ ID NO: 54033 - protein, 227 aa, Zea mays
  Coding DNA Sequence Number=SeqID_12254
  Gene Ontology: Mol. function=ATP-dependent helicase activity; Cellular component=intracellular
  Homolog annotation: Hit_ID=Q10CV6; Match level="QueryCoverage=84%, HitCoverage=16%, E-value=1e-78, Identity=76%"; Hit description =Helicase associated domain family protein, expressed
  Pfam annotation: Domain name=dsrm; Domain location=112-174; Score =26.9; E_value=7e-05; Accession=PF00035.15; Description=Double -stranded RNA binding motif
MADGALWLLAVMFQAGHLKMLDGYIDFFMDPSLSECYLQLKEELDKLIQQKLEDPNFDIHKEGKYILFAVQELAAGDLCEGRFVFGRETSRARLRSPEDDGKSNLIKDGMNPKSLLHTLLMRAGHTPPRYKTKHLKTNEFRAVVEFKGMQFVGKPHPHHQLAERDAAIEALGWLTQTSGVNAIEALERDATDQGILVCEEGVDFVERSAFLGHARIAERGRRGTNSS

SEQ ID NO: 54034 - protein, 54 aa, Zea mays
  Coding DNA Sequence Number=SeqID_12255
MPVGAVDALGCMAELGVRSIIARVSGGGEIDRAVLAAGDRERIPGAVQISAAIM

SEQ ID NO: 54035 - protein, 199 aa, Zea mays
  Coding DNA Sequence Number=SeqID_12256
  Gene Ontology: Mol. function=structural constituent of ribosome; Cellular component=intracellular; Biological process=translation
  Homolog annotation: Hit_ID=Q8W1C9; Match level="QueryCoverage=53%, HitCoverage=95%, E-value=4e-56, Identity=99%"; Hit description =Ribosomal protein L35A
  Pfam annotation: Domain name=Ribosomal_L35Ae; Domain location=12-106; Score=171.7; E_value=1.9e-48; Accession=PF01247.8; Description =Ribosomal protein L35Ae
MVKGRTGQRVRLYVRGTILGYKRSKSNQYETTSLIQIEGVNTKEDVAWYAGKRMAYIYKAKTKSSETRYRCIWGKVTRPHGNSGVVRAKFKSNLPPESMGRKVRVFMIRRHIESVAANSPYSAENHGSLAIVVCCAHVDTGLNSVFVGVKVDSKWPCLVLLSELKMPCVGNLDCSCTEPVEVLPKFVVERLNSCPNVML

SEQ ID NO: 54036 - protein, 54 aa, Zea mays
  Coding DNA Sequence Number=SeqID_12257
MTDPEKLFVLYSYAHINRKVDVVEKAWMAMSASISSDMGVPVDRNEFQAAAQIE

SEQ ID NO: 54037 - protein, 111 aa, Zea mays
  Coding DNA Sequence Number=SeqID_12258
MEELSREKDHLWALDAEHSGLSVAIDLVCDHLRIPRSGESSAKTSRMTLVASCIRDWTLSCSGSSEDESRIAPPDVLPRGSITGVSGYVVLSHLPVKGALGGKERRGITFR

SEQ ID NO: 54038 - protein, 114 aa, Zea mays
  Coding DNA Sequence Number=SeqID_12259
  Homolog annotation: Hit_ID=Q6K559; Match level="QueryCoverage=96%, HitCoverage=40%, E-value=1e-30, Identity=66%"; Hit description =Putative holocarboxylase synthetase
MAGKKRKAEAARLEETDRALYGAFRGAANSLSQLYTLGMGAQKASFHAGERHAMPFPFWVEAAVGVSLCALQLARLRLALVRFRGMEKLYEWILRQHENGLRLTVADVASHIQT

SEQ ID NO: 54039 - protein, 266 aa, Zea mays
  Coding DNA Sequence Number=SeqID_12260
GVSAGRLPSPAPLAGGGGGSIFMETILPEGASSVPTQGKFWITLLGPNEKSSFFLDQREALELFAGDLLAAKNEATEAHARAASIQDAHNALVETTRRDAEMTTLTYLKSAKASSHLRILERGREVTEARVAALEELVGRTKKEEKLLAYLQAIKGKFDVVEGSSVEAQSRLEELEKEMHLLSEMVSAIHERFRAPSSFGPKSPVSRLESLANFVTVVPSHWAHMNQSLPLMASDGYAHVSGLVPRLAHLTNRSLSGKRNASTKIH

SEQ ID NO: 54040 - protein, 140 aa, Zea mays
  Coding DNA Sequence Number=SeqID_12261
  Subcellular localization annotation: CTP_CleavageSite=45; ConfidenceScore=5.56e-01
MASLTTTTSSPAALPAATTAPAASSISPHAGSKRPLLAGDDAPWRATAATSAGQGIRPVPRINHASVLRVSTQEDSAAYALAIMKHPDPIGEGLAMEAFAEAAGPECIVPGQQAPLRLMGLKFLVILYMVLRPFRDGLAR

SEQ ID NO: 54041 - protein, 96 aa, Zea mays
  Coding DNA Sequence Number=SeqID_12262
  Subcellular localization annotation: CTP_CleavageSite=70; ConfidenceScore=5.39e-01
MATRAGRPPTPAPALLLLLTFLFLLRGVLPSRAGDTVAAGRPLSDAQSLVSKRGKFKLGFFRPAIPNFFSSSATGCTGQSGGTPNSPVRPDIADCL

SEQ ID NO: 54042 - protein, 53 aa, Zea mays
  Coding DNA Sequence Number=SeqID_12263
MDVQAYLLAGLPSDYDPLVTSITTKDYISLDNVYAHLITFEACQLRHHADLQL

SEQ ID NO: 54043 - protein, 221 aa, Zea mays
  Coding DNA Sequence Number=SeqID_12264
  Gene Ontology: Mol. function=nucleic acid binding; Cellular component= nucleus; Biological process=type I hypersensitivity
  Homolog annotation: Hit_ID=Q1SXU5; Match level="QueryCoverage=74%, HitCoverage=53%, E-value=2e-45, Identity=56%"; Hit description=RNA -binding region RNP-1
  Pfam annotation: Domain name=RRM_1; Domain location=41-129; Score =23.6; E_value=0.00069; Accession=PF00076.12; Description=RNA recognition motif. (a.k.a. RRM, RBD, or
  Subcellular localization annotation: CTP_CleavageSite=43; ConfidenceScore=5.65e-01
MATQQQHAGPASGSASASSSSSGLHLPASPSAFGDTTHTKVFVGGLAWETNSGRLRRFYERFGDILEAVVITDRHSGRSKGYGFVGASRFHFFFAVFFLASRVTFREAESARKACEDPTPVIDGRRANCNLASLGRAQHPVHPGRPSSAGSYFGVPVPRAFYLGGYGHHRPFPLGYYQGFPVPQYSYPSYGTEYISPQVEVLKAISFYILVLHKTVTQTFA

SEQ ID NO: 54044 - protein, 180 aa, Zea mays
  Coding DNA Sequence Number=SeqID_12265
  Gene Ontology: Mol. function=protein dimerization activity
  Homolog annotation: Hit_ID=Q2QRD1; Match level="QueryCoverage=60%, HitCoverage=10%, E-value=6e-26, Identity=52%"; Hit description=HAT family dimerisation domain containing protein
MAVSDDETVEIDCNEERRLCGLAGDDDEDDLREDATTLFGHSSEHPVHVGDEQQVGGQDNESGGTGHLTRHRDRCPRRREKTRMSQSQISFNPDDSMRNWEYCPMVARNELVRLLARLEIPISLGENAAFEHYIRTAHNPKFVPVSRQTTTRDMVKYFTDKKAKLVETLSSSDVRAPRGG

SEQ ID NO: 54045 - protein, 192 aa, Zea mays
  Coding DNA Sequence Number=SeqID_12266
MAWLFAGRHVCVPALWACKVAAAFQLAFEERWLLLAAARPAVIPVLKAKKERQRLDLDGSAEARAQRPRVDATTDARAEGREQSSDLDRHARLLGLRPSAASTRVSACRLIGALPPRDRHSRLYLRCSSARPLLSDGAALEQLAELWQARGSVRSRLKKERSSPEHEKERLVKWIDTGSDRRKPGRPDELGQ

SEQ ID NO: 54046 - protein, 50 aa, Zea mays
  Coding DNA Sequence Number=SeqID_12267
MNGGVVGVFIAPTTKSGRWKAVCSMAPGSRCARSDLYSSLSQYARSRQPA

SEQ ID NO: 54047 - protein, 74 aa, Zea mays
  Coding DNA Sequence Number=SeqID_12268
MPPQSSWFWDERNKAQPVSYETVDGGYVVVDEKLPRFAVPDNDSFQAEAVRVAVHQGPRSVDDILGLSNFSTDY

SEQ ID NO: 54048 - protein, 641 aa, Zea mays
  Coding DNA Sequence Number=SeqID_12269
  Homolog annotation: Hit_ID=Q69T67; Match level="QueryCoverage=99%, HitCoverage=96%, E-value=1e-140, Identity=41%"; Hit description =Lustrin A-like
  Pfam annotation: Domain name=DUF231; Domain location=492-641; Score =152.1; E_value=1.5e-42; Accession=PF03005.6; Description=Arabidopsis proteins of unknown function
MKGAWRQSGVAAVAEHLGHLGGAGLVGRALPVRLCLYGLTLTFAGFAVFLCFAPSLIVPPASSPGVAWFDDGLIASASPYRAQVSGFLSSLFPANSSSTVPPGGVAVSCSRGNGSSAVRRGEQLGSGGGAPVSSKEAPVPGDATAAVLSGAAPDDRVQGGAEAKHSAGSAAVESKGGPGPGLASGGSAQNVTSAKGGVPVRINGSDDTNARSVDAGDGNGVRASARNTAGSTHQLGSGTAALVNGATASFLNQTASEVAAAMDGNGSAAAVNNQTVPIQAPADSKSHSSAASDGSNSTAANKQNESTASPQGSTSPVKDRSARGATPTASNSGDVPVEADANAGWRMKADWIENMARCDMFYGNWVRDDSYPLYPAGSCPHVDESFNCHLNGRPDKAYERLRWQPSGCIIPRLNSTDMLERLRGKRLVFVGDSLNRNMWESLICILRNSVKDKSKVFEVSGRSQFRAEGSYSFLFQEWEMPISNGKGTRETLRLDVIDPAFPRKDYYQEGNRVYSELDVHDAFRRALNTWAKWVDSSVNPKKTTVFFRGYSASHFSGGQWNSGGSCDKETEPITDGQYLTPYPEKMSILEEVLRGMKTPVVYLNITRMTDYRKEAHPSAYRKQKLTEEERQSPELYQDCSH

SEQ ID NO: 54049 - protein, 49 aa, Zea mays
  Coding DNA Sequence Number=SeqID_12270
DFSPDSKCMFEAGDHSEMSRAMEVGQHAPEVEAAEASDEDVEAYISKAT

SEQ ID NO: 54050 - protein, 74 aa, Zea mays
  Coding DNA Sequence Number=SeqID_12271
MAVSIAHQSKFSATRPNRVITRLPCCIIIGSRIAGMHVSGGSTVVRRGGGAFVWGRMEEIGARALILDWMAPIG

SEQ ID NO: 54051 - protein, 149 aa, Zea mays
  Coding DNA Sequence Number=SeqID_12272
MAPVVKKRNHETFKKLKIRTSSHQGEHKKTEKEPWSVPMKTTNGNMIKINFHTSRSRNVRLKDRKSSFIPRNSGEFSPEKGPTDKAYPLPTYPIPQVNARFRLYNLSASLKPDRERGGGEGGGKQKGETNIAQNKAKGGKGAKEPAKQG

SEQ ID NO: 54052 - protein, 46 aa, Zea mays
  Coding DNA Sequence Number=SeqID_12273
MVGKGRGNSGILSGVWLWSACALILLWHQEQLKYMLNVTRKCHQFS

SEQ ID NO: 54053 - protein, 353 aa, Zea mays
  Coding DNA Sequence Number=SeqID_12274
  Gene Ontology: Mol. function=metal ion transporter activity; Cellular component=integral to membrane; Biological process=metal ion transport
  Homolog annotation: Hit_ID=Q7Y247; Match level="QueryCoverage=86%, HitCoverage=84%, E-value=4e-65, Identity=50%"; Hit description =Putative zinc transporter OsZIP2
  Pfam annotation: Domain name=Ferric_reduct; Domain location=49-210; Score=-27.1; E_value=0.088; Accession=PF01794.9; Description=Ferric reductase like transmembrane component
  Pfam annotation: Domain name=Zip; Domain location=37-350; Score =244.9; E_value=1.7e-70; Accession=PF02535.12; Description=ZIP Zinc transporter
  Pfam module annotation: Pfam domain module=Ferric_reduct::Zip; Domain location=49-210::37-350
MAALYALVAVSLLPVLVTAECDCSDDDATGRDKAGALRLKIIAIFFILAGGAAGAAVPALGRRLPALRPGAGPFLAVRAFAGGVILATGLVHILPAAFDALGSPCLAAAGGPWARFPFAGTVAMLAAVATLVVDTVATGYLRRKAAAVGDEPPQLGGDDPEEASGGGRHGHAHGVDDDDDDLVRHRVVSQVLELGVVVHSLIIGMSLGASDFPSTVRPLVPALTFHQLFEGIGLGGCIVQRDDKGFLSVPPQAKFRLRSMVAMAVFFSLTTPIGVAIGIGISSAYDETSQTALVVQGLFEAAAAGILVYMALVDILREDFMSARVQGSAPLQAALSASLLLGAGLMSMLAIWA

SEQ ID NO: 54054 - protein, 69 aa, Zea mays; identical to SEQ ID NO: 43166
  Coding DNA Sequence Number=SeqID_12275

SEQ ID NO: 54055 - protein, 348 aa, Zea mays
  Coding DNA Sequence Number=SeqID_12276
  Gene Ontology: Mol. function=oxidoreductase activity, acting on single donors with incorporation of molecular oxygen, incorporation of two atoms of oxygen; Cellular component=proton-transporting two -sector ATPase ...
  Gene Ontology: Cellular component=complex; Biological process =flavonoid biosynthetic process
  Homolog annotation: Hit_ID=Q6V5C9; Match level="QueryCoverage=86%, HitCoverage=84%, E-value=1e-75, Identity=45%"; Hit description=Fe2+ dioxygenase-like
  Pfam annotation: Domain name=2OG-FeII_Oxy; Domain location=177-277; Score=90.0; E_value=7.1e-24; Accession=PF03171.10; Description=2OG -Fe(II) oxygenase superfamily
MSDLSRTVPQEQLVSQDLLHLSPTPVINLGHLSLDDSVTRSGVINQIARACHDLGYFQVTNHGISQSVMDCAVEAASDFFQLPSEAKEQFASQDLRKPVRYDTSSKDSISMSRAFLKHYAHPPRDWIQYWPDKPPIYREYMGKYAVEVRRVALHLMQAILEGLGLGKEYMNEKFQQGSQLLSVNCYPKASQDAMTIGLAPHSDYGFLTILLTSCQGLEVVDRSSNNWKTVQQLPHALHVHVGDHMEVLSNGQIKTVVHRAVLNPEEARISIASIHGFELHEKVACAKELVDEQNPPKYKESSFTDFLDHLTANMDNKNRNFLESLRMLTGALISEKADRAKVYCHMLN

SEQ ID NO: 54056 - protein, 171 aa, Zea mays
  Coding DNA Sequence Number=SeqID_12277
  Gene Ontology: Mol. function=binding; Cellular component=thylakoid; Biological process=photosynthesis
  Homolog annotation: Hit_ID=Q337L2; Match level="QueryCoverage=77%, HitCoverage=22%, E-value=4e-49, Identity=65%"; Hit description=TPR Domain containing protein, expressed
MECLCSGEQLKASDETMRSSDSTITKDFSASGYSSWNGEIEQYLDNGNIEEAELSLREGICLNYETSALVPKMKISIARKTGRGKTHSQWDSPPMPLHAVSLLMEAIYLKARALHDLGKDKGIKEERPFLVEIYADDINPTTTIKGKHYIGSASTLVKRFHHMHVHVYDKS

SEQ ID NO: 54057 - protein, 286 aa, Zea mays
  Coding DNA Sequence Number=SeqID_12278
  Gene Ontology: Mol. function=oxidoreductase activity; Cellular component=proton-transporting two-sector ATPase complex; Biological process=ethylene biosynthetic process
  Homolog annotation: Hit_ID=Q9LY36; Match level="QueryCoverage=91%, HitCoverage=82%, E-value=1e-54, Identity=44%"; Hit description=SRG1 -like protein
  Pfam annotation: Domain name=2OG-FeII_Oxy; Domain location=134-234; Score=87.0; E_value=5.6e-23; Accession=PF03171.10; Description=2OG -Fe(II) oxygenase superfamily
  Subcellular localization annotation: CTP_CleavageSite=35; ConfidenceScore=5.18e-01
MAGQVQRTAPSSSSPSPRQLPVINLGRLGKDPATRALAIQDITRACREQGCFQVVNHGVSNSVMAGAFEAASEFFQLSPEHKELFASTDIGRPVRKKMGEYAVEIQRVSMQLMDAILQGLGLKPLYMQEKLDKGVQFLALNSYPQFSHRGDKVGLAPHSDYGFLTILMQSSPGLEVMPHDRDTWTPVPAIPGALHVHVGDHLEVLSNGRLKSLVHRAILNPDEARISIASIHGLSKDEKVCCAEELVDEVNPAMYRESSFQDFLDFLPSNINNYKRFVESLKIDRA

SEQ ID NO: 54058 - protein, 125 aa, Zea mays
  Coding DNA Sequence Number=SeqID_12279
MAGHIYRGTGLPERRRRKGQDDAYKKGGAEARSGSLTHIQSIPPGAERRRKQSSGRGGHDADAAGRPSLHRTPHPRTGHFWALPKGPSLSNQQRFTSTFALSANTADSKDKLTSTTARAQAQAHT

SEQ ID NO: 54059 - protein, 84 aa, Zea mays
  Coding DNA Sequence Number=SeqID_12280
MTPLELGSRAVSAARVAAAAISAVRSRSILKTVMALVIVVVKQRRRVVEHEEVVKDHHDAGVEGERQPPGPHGRAASHNEGFTS

SEQ ID NO: 54060 - protein, 132 aa, Zea mays
  Coding DNA Sequence Number=SeqID_12281
  Homolog annotation: Hit_ID=Q6ZIF8; Match level="QueryCoverage=47%, HitCoverage=16%, E-value=8e-21, Identity=75%"; Hit description =Putative pectin-glucuronyltransferase
MTLLRIYEFSGWMKCSKPEAIHVILSDYYDLPFNDALDWRKFAVILRERDVYQLKNILKSISQEEFISLHKSLVQKLVMSKPPAVENAADGRAERMEKVRDEAPDIAKKEDKKSDRHEKKERKLKDKHKEKK

SEQ ID NO: 54061 - protein, 310 aa, Zea mays
  Coding DNA Sequence Number=SeqID_12282
MEVMSPAPPQEFLLDSAASAAYTPKPAIMNPFACTDDVAVGNPFLATAVTAPSSPNPFEQLPPGASDAGPFDLFEHFTSAPTSPARAAAIYAQFDSVSGGAIGKDDDDDDDVGFQPRVSYSMSKPAVVTTVPFDWEEKPGKPKAEFASVSATVVVEAGETDGADFDFGVLLDKAAQAEELTTADELFNDGKIRPLKPPPRLLEGGSVGSSPRSASVSKDPVFKYAPVQQRAVPEKGRRSQGPWLPKGDASSGKHKKQSKKAAPAEGGMAMPMPMPQRQNLMMGCVRLHPGVHRLAKGFHGHAAPPGRRHE

SEQ ID NO: 54062 - protein, 178 aa, Zea mays
  Coding DNA Sequence Number=SeqID_12283
MANRRWKLEVEPLLTVLDWSRAADEGRAAWACDEPMECGRAQAGGEEGASSPVVELIATGTGDQPSSSTTTRQQHKTGQSIIRRHGLLGRDGRKTMSPEIEGRGFRGRGVGGAWVRAGMAGCVAGTELPGGGEEGDGAAGDRGALMAESGGSRRILGWSAEGGGWSALERELGLHLFS

SEQ ID NO: 54063 - protein, 195 aa, Zea mays
  Coding DNA Sequence Number=SeqID_12284
MARLGTPESSLRNGRRCRILHQIPIIGRLFWLQICSQQLDSAFCPNFPPVPSMISSRKAFIIGWGTPVFSWKMGLVMCVVSIIASVDSQLCVSLYCFLPYGTGFQSRVSGESLPSSSEDDMAAVVSTVLLITEVTTLLHMFVGTRLPLVVVLDFYWFFVSSRSLVLFSQLLSLVATQERVAALAPARWSCVTPGF

SEQ ID NO: 54064 - protein, 123 aa, Zea mays
  Coding DNA Sequence Number=SeqID_12285
  Subcellular localization annotation: CTP_CleavageSite=7; ConfidenceScore=5.08e-01
MARGIARASSFGGRATTPWCSCRHVTVDVCLGKLVAALLVLRSLTAPAPRFLRAHLSQPTAGVVELWRVEKLKGIKVASTWNQSNLDLSSEEIKEEIVAGPPLSRQCNAELHTDYDGAAVRWD

SEQ ID NO: 54065 - protein, 145 aa, Zea mays
  Coding DNA Sequence Number=SeqID_12286
  Homolog annotation: Hit_ID=Q84V69; Match level="QueryCoverage=45%, HitCoverage=28%, E-value=3e-16, Identity=69%"; Hit description =Putative MADS-domain transcription factor
MVGASSGLGPVQPKAEVGVHILYDLTGYLSKFHGVEVIIVDLTGGYHRGFNWRLSPWIELFYRAIHALNISVLQLPKSWSTQLAEENRQLRNQVSHIPPVGKQSVADAENVIAEDGQSSESVMTALHSGSSQDNDDGSDVSLKLG

SEQ ID NO: 54066 - protein, 298 aa, Zea mays
  Coding DNA Sequence Number=SeqID_12287
  Homolog annotation: Hit_ID=Q9LSX7; Match level="QueryCoverage=65%, HitCoverage=66%, E-value=1e-61, Identity=63%"; Hit description =Arabidopsis thaliana genomic DNA, chromosome 3, P1 clone: MSD21
MASASVSAPVAGAGAGGGKDEELADLVRRLMDALARYADRLPFDLDRQKLRSLTTLAAISITLLFAWKMLRAPQEQPRRPRRRAAPSSSNTSTRSRPGALTVADACSSADSRAHEAVNQLFQPLTLEQLVRHKLSEGRRFTCRLLGVILEETAPEELQNHVTVKPSVVEVLLEIAKFCDVYLMERILDDESEASAEYQHISSSFVGKVLSALSEAGLFGGGGLIKDKVLFCSTENGRTSFVRQLEPDWHIDTSPEVVHQLARFIKYQLHISPQRPERIATNVFTAPSLEQYFGGLDQR

SEQ ID NO: 54067 - protein, 647 aa, Zea mays
  Coding DNA Sequence Number=SeqID_12288
  Gene Ontology: Mol. function=DNA binding; Cellular component=nucleus; Biological process=regulation of transcription, DNA-dependent
  Homolog annotation: Hit_ID=Q10G93; Match level="QueryCoverage=61%, HitCoverage=32%, E-value=1e-145, Identity=65%"; Hit description=DIRP family protein, expressed
  Pfam annotation: Domain name=DIRP; Domain location=212-313; Score =206.1; E_value=8e-59; Accession=PF06584.3; Description=DIRP
MPPHDNFVAHKHPRLLQSLCWFKAIVKHQKFPRAAVVPVKLHLLQKVPDVQFSRAWATVLDDLALVPTFATTAGARSLILDPSNHLSVQNRVLDPSPTKILKDEKKMPKDVEKTEVSPEEEKTSSNKTMDIAETTTQVATTLHADLMAKGKSRRKLGIQKSLTQECKPAEGAGDSGSDKLSYSLSNIIDLKDKLSHCLSSRLLRRWCMFEWFYSAIDYPWFAKSEFVEYLNHVKLGHVPRLTHVEWGVIRSSLGKPRRLSKQFLHEEREKLAQYRDSVRQHYTELLSGVREGLPTDLARPLAVGQRVIACHPRTRELHDGNVLTVDHNQCRVQFDRPELGVELVKDIDCMPLHPLENFPESLRHQSAINGYYSHLSEAKYEDQMKELASGGAARSTSNLNGTDATFYTPSGHPMSTLMKQAKANTAVNEVAVATQQSMYNQPCTLSQIQEREADIRALAKLSKNAADYFIILPLILLLLLNLEIHHAYLALQLREPKAPKWLGEDIHELSDGLDELEDKSFIDTLTKKVILDVDVLAPIVEDSVLCKGNGGLIVHHRSRSTSFFLSLPSSRHNLTHWHTSMGVVMYSVSHVDSATICFCDYHVTGDDLRKTSTPKVLFCPSMLPTMSTLLRPFIHNSAPLVLGKTKP

SEQ ID NO: 54068 - protein, 131 aa, Zea mays
  Coding DNA Sequence Number=SeqID_12289
MAAIIVGSRTEETARYTSPYRNRIGAACSLSVRREIDTTHVPVNKWKEATEAAGIRVREVLRGRNDDPGEAHAADDRPEQRRGVWVLVGAFARPGLGLVSTRIREVLQQKGHVCNMYVLILQGLASFFLGN

SEQ ID NO: 54069 - protein, 181 aa, Zea mays
  Coding DNA Sequence Number=SeqID_12290
MTTILSLVSSRTYKIVDYVEADTAHLSAPGLGVEFGSTHDHVIGDLPPEFENIMIFSGAETESDIAPPVLEENKDDVVSATKTAKSLDGSALKTGQEEEGPEEADATEKAMEAVDNVVKSLDPEVESKEMQKQQPQDYNSISLRKLKATHKKYIITAKEEEVTEGKRLPLEEVDENACIGH

SEQ ID NO: 54070 - protein, 170 aa, Zea mays
  Coding DNA Sequence Number=SeqID_12291
MPQDDIATTDDPQAAVSGGGGSFSSSFDSFGDADASSFITSQLMCGGDDDESLQDTACSSAAGQKVSKRSSSYFISNSTADSTMATMESFGLKQMAAMDGAKESNMPHHLQLMAKYVEAVGSKQQVTGVGDQQAINSSSNSEKALLCESNELRKRGLCLVPISMLIDYLG

SEQ ID NO: 54071 - protein, 110 aa, Zea mays
  Coding DNA Sequence Number=SeqID_12292
MAVMLPNFTGGGASSRFPACLVAHVAWLTELGEQKGNGLGPLYTRHCRSKVDRCSSISPAKSALIVGQRRCLHGVRGRGRAPTLQAHSQRGAHAAGPMAESLTKRPHQSA

SEQ ID NO: 54072 - protein, 772 aa, Zea mays
  Coding DNA Sequence Number=SeqID_12293
MSPNTADDSPLIDVSPKLLSMYLVTLQEQSCLRIASFLADGVVPNRGAILPESSINSLTFSLKEFDLSVPLDTDEIARCSGTKNTNPQSSFSGARLHVEDLYFCQSPSTKCPLLNLDRDPACFLLWEYQPVDASQMKWATWSSHLSLSLETSSTSNGQRAVSDSNLWKCIELDDIRFEVAMVTADGGPLLDVPPPEGVVRIGVAFQQFKSNTSVEQLFFVLGFYTYFGQVAERISKVSNANKSESVKSSADKSENKLPSDTAVSLTMNNLQLNFLESLSASDVHMPLVQFGGGDLFLKVSHRTLGGAFAVTTNLMWTTVSVNCLEGESAIVCEHGTAVTGEHSILVHGNGHPKMRAVFWVDHRSKHQVKEPQFLDINITHVMPYDIQDMECHSLNVSAKVSGVRLGGGISYTESLLHRFGILGPDGGPGEGLLRGLKDLSSGPLAKLFKSSHLTEKEGKALHIRAWVSDIGGAITVQLLAEFLQIWDLVEEVVLKEGSDERSKIDDHNSKFDLGVPDDLDVMVSVEKKNAGIQPSGIYISLARAAGIEGLQAIKPRLRDQCTKKGPSNNHEMGRDFNSSSSVGDHGVDVEATMVIGEDEIEGAKWTMDNVKFSVKEPIEAVATKEELEHLVMLCRSEADAMGRITAGILRLLKLDKSLGQGTIEQLRNLGSGGMDNIFSPRRLSRQNSFGSIGTPRTPTMQAIADVMGSKTTLEATISSLQGEISESKAKCMALISQASSTEDQNRAEDIRQLSEKLESMQSLVTRLRTLII

SEQ ID NO: 54073 - protein, 934 aa, Zea mays
  Coding DNA Sequence Number=SeqID_12294
  Homolog annotation: Hit_ID=Q8H912; Match level="QueryCoverage=38%, HitCoverage=45%, E-value=9e-28, Identity=25%"; Hit description =Putative zinc knuckle domain containing protein
  Pfam annotation: Domain name=zf-CCHC; Domain location=143-160; Score =21.8; E_value=0.00025; Accession=PF00098.13; Description=Zinc knuckle
  Pfam annotation: Domain name=zf-CCHC; Domain location=162-179; Score =19.2; E_value=0.00067; Accession=PF00098.13; Description=Zinc knuckle
  Pfam module annotation: Pfam domain module=zf-CCHC::zf-CCHC; Domain location=143-160::162-179
MAALATGGGTGDHSAISKRDFLPGEQSSIKRVRFADLVRGRGSSPASIHSPPPAKSCLRFGRQDVPAVNGADHTAAAPGDSIPSTLPDQSGSRWTTVHYKRRLRPAGEALPTSNSKVLSRRPTTSASLKIPRATSGLLASMQDKCFRCLARGHRATECRDPVKCFKCGRSGHKSWHCPQNYKASKTTTPQPPSVQPQAPPPSDHSNFPPLGNWTMAFRSSTAIRPEESFAVAHSCGDMDIELDHLASHAVWAWLGRDRPAIGIDVIKKAFCSRFAVLPVDITVARHYPEDFFITFVHRHHRDAAVACRDFQHGNLDIRVRQWQLPIHGDHDDLKYHVRLCLEGIPLHAWNESIAKRVVASSCDLHYIDADSLQRRDARTLNMWAWTTDPQRIPKVTWLTLTCRSASSRDGMAPAPRRGLTFRVLVHLDLVEEQPSCDGRMRAPRRFDWKYGIVDGESSPRDRNDPPPSSRLDNHRRDDEDGDDYDSERRGRRSRKGDTWSARFFRSLSRAPSERCRSSSRHGRRRDVEHPGRRRAWEGRCDAATSTLAASSYRVRGRSRVRRLWRRVERRSKSPTRASRLTRTAPGSSEGTGDTHHPSPQPPRMRADPNLCTEMVNTTQLQEASAQHVDNNLGMHLPANDLSDVRPDPSRKENCYNDSAGRCLIPIQDVFKSIWTSFPTDSRSMERGAEGVQQQHPDARPPSPLLDAATDHGERLSVDLAADKILQRLSLPTDPRSLKRGAEGVQQQHPDARPPLPLLDVATDHGEHRSVDLAADKILQRLFRTPARAILPSTTTAGIQETRKTVTTEVEASKATPALRRRLHPASTTTVRRSVRLAKSRPMHVIQRAQRNLCRKLGLLNDESNNFETALQKFLTMFQGTLPQETLAALTSAFNLEGSTEKSFEDAMIAMMGDGVADLQDGIRSLRVEELQSAA

SEQ ID NO: 54074 - protein, 352 aa, Zea mays
  Coding DNA Sequence Number=SeqID_12295
  Gene Ontology: Mol. function=oxidoreductase activity; Cellular component=vacuole; Biological process=response to oxidative stress
  Homolog annotation: Hit_ID=Q7XN76; Match level="QueryCoverage=86%, HitCoverage=91%, E-value=1e-143, Identity=82%"; Hit description =Peroxidase
  Pfam annotation: Domain name=peroxidase; Domain location=63-311; Score=427.2; E_value=2.3e-125; Accession=PF00141.13; Description =Peroxidase
MVSRLLFGLVVLPLSLQYSSSALSNPPEEFGGGGLQQPSPPPTSSGLRVGFYQYTCPNAEAIVRDEMAKIISRVPSLAGPLLRMHFHDCFVNGCDGSVLLNSTVPGLPSEKEAIPNLTLRGFGTVDRVKAKLEQACPGVVSCADILALVARDVVVLTKGPHWDVPTGRRDGRRSVKQDALDNLPAPFFDAGRNLYQFFIPKGLDAKDQVVLLGAHTLGTSHCSSFADRLYNFSGTTAADPSLDRRYLPRLKSKCGSPGDTTTLVEMDPGSFRTFDASYYRRVARGRSLFASDQTLMNDPAARAYVQRQAGAGAGAYPAEFFADFAKSMVKMGAVQVLTGAQGEVRRHCAAVN

SEQ ID NO: 54075 - protein, 816 aa, Zea mays
  Coding DNA Sequence Number=SeqID_12296
  Gene Ontology: Mol. function=protein dimerization activity; Cellular component=nucleus; Biological process=regulation of transcription
  Homolog annotation: Hit_ID=Q3LAG0; Match level="QueryCoverage=96%, HitCoverage=95%, E-value=0.0, Identity=70%"; Hit description =Transposase-related protein w-gary2
  Pfam annotation: Domain name=hATC; Domain location=733-815; Score =89.9; E_value=7.6e-24; Accession=PF05699.5; Description=hAT family dimerisation domain
  Pfam annotation: Domain name=zf-BED; Domain location=143-189; Score =41.3; E_value=3.2e-09; Accession=PF02892.5; Description=BED zinc finger
  Pfam annotation: Domain name=zf-BED; Domain location=44-90; Score =50.2; E_value=6.7e-12; Accession=PF02892.5; Description=BED zinc finger
  Pfam module annotation: Pfam domain module=hATC::zf-BED::zf-BED; Domain location=733-815::143-189::44-90
MEHHIIQQVGEHEGEEEEDGMGTEAAFEGVHNHDTFRYKHKKRSKVWEEYKPIFLNGKVQFAECLYCHSRMSCKDSNGTSHLWRHQKICPGKRDVVFRRLKDSYFPCVLVNQSEPVTPGDSVNQIISETLDDISSVIPNRFKSKVWREFSPIYVEGKLQAADCVHCRKRLSANKFGGRSHLSRHLQTCQARRGYNNQKGTLYPSSVPDLKSIGQDELSPALANGKVHIAGYSSKHLWSSSSADTSPIVRPIQVSAHQPLPSQDFPSLGKQRTSFTTTTSDIRKVDQGTAYQELARMIVSHGYPLSIVEHEEMRRFVKSLNPMIHADAVSHNDIEGHCCALFEKEKAKLKDQLTLSSRRVSLSASIWTPEGAEPTVNYLCLTAHFIDKNWKVHRMIIKFGMFRSSPTDVERMVHHKEACVPESECGAYNVIWDAIRDWNLDQKILSLTSVGEVRNALSSSKLKEILVEKKCLPIRGKLYDVACVDDVLNTIASKVQQNIIHLVGDMVTEFFVAHTSSSLNQQQLMEVISQMSLKCPQEDAKWWYKFYFRLEVFLHFNKPFPFEEAASPEHVIVAESICKILRTFYRVIEVISASSSPTANMYFNEIWKVRTVLQEEASSEHAEITAMVAEMQETFNEYWQHSYLWLCIPVILDPRFKFGFIEFRLKRAFGLKSASYLSGIRETLQELFNEYCSPVDQPNVRVPKSESFSLDDNDSFEDWDQHLNEQASSQKSTELDNYLADGLVPRKDDFDNLNWWMCHATKYPTLAAIVQDILAMPASAVPSEAAFTSSGPVIPKHHSMLSIKTIEALVCTRDWMR

SEQ ID NO: 54076 - protein, 336 aa, Zea mays
  Coding DNA Sequence Number=SeqID_12297
  Homolog annotation: Hit_ID=Q9LT50; Match level="QueryCoverage=91%, HitCoverage=87%, E-value=1e-114, Identity=67%"; Hit description =Arabidopsis thaliana genomic DNA, chromosome 3, P1 clone: MOE17
MESIIARALEYTLKYWLKSFSRDQFKLQGRTAQLSNLDINGDALHASLGLPPALAVDTARVGKLQITLPSLSNVQVEPIEVNIDKLDLVLVEKDDSENLSSPSSTASSPSATKSSGYGYADKIADGMTVQVGIVNLLLETHGGAHRQGDATWSPPLAAITFRDLVLYTTNEKWQVVNLKEARDFSNNKGFIYVFKKLEWQSLSVDLLPHPDMFADARFNSSSSQDDKRDDDGAKRMFFGGERFLEGISGEANITVQRTEQNNPLGLEVQLHITEAVCPALSEPGLRAFLRFMTGVSVCLNRGDIDPKAQQVYFCVLLILCCLHLQKQQDLHWCPLS

SEQ ID NO: 54077 - protein, 52 aa, Zea mays
  Coding DNA Sequence Number=SeqID_12298
MALAWLGRGAGHAGARVSVLWRGQEAPNTWRWGWGFGVTYHSFGQKVGEARA

SEQ ID NO: 54078 - protein, 665 aa, Zea mays
  Coding DNA Sequence Number=SeqID_12299
  Gene Ontology: Mol. function=protein binding; Cellular component =membrane; Biological process=defense response
  Homolog annotation: Hit_ID=Q7XI19; Match level="QueryCoverage=98%, HitCoverage=72%, E-value=1e-166, Identity=46%"; Hit description =Putative disease resistance protein RPR1
  Pfam annotation: Domain name=LRR_1; Domain location=607-628; Score =14.8; E_value=0.31; Accession=PF00560.23; Description=Leucine Rich Repeat
  Pfam annotation: Domain name=LRR_1; Domain location=630-651; Score =12.3; E_value=1.4; Accession=PF00560.23; Description=Leucine Rich Repeat
  Pfam annotation: Domain name=NB-ARC; Domain location=157-468; Score =311.6; E_value=1.4e-90; Accession=PF00931.13; Description=NB-ARC domain
  Pfam module annotation: Pfam domain module=LRR_1::LRR_1::NB-ARC; Domain location=607-628::630-651::157-468
MADALLVVLRKVALSLAEGALEKIGKEVVEAAPLMTDFEHSMKQIEGELSVLQAFINQVSAQRVSDKAFDAWLDQVRDVAHEVEDIIDEYAYLTAQAVDTSSFFKRKFHQFKGIAAWKKFPGQISQVEARIQRLSEMRNRYGFSVSQLDRTNNFQLSIQFSLSNSAYLIDNSEIVGNADEIGKLTQWLLEEKQDRSLIAILGMGGLGKTAIASTVYKNQKIITSFDCHAWVIVSQTYQVEELLREIINQLIIKERASMASGFMTMSRMRLVEVIQSYLRDKKYFVVLDDVWDKDAWLFLNYAFVRNERGSKVLITTRRKDVSSLAADNYVIELKTLKDAESWELFCKKAFHASEDNICPENIRCWATKIVAKCQGLPLAIVTIGSILSYRDLKEHEWAFFFKQLSWQLANNPELSWISSVLKLSLNDLPSYLRSCFLYCSIFPEDYKIRRKLISKLWIAEGLVEERGDGTTMEEVAECYLMELTQRSLLQVTERKACGRARTFLMHDLVREITSTIAKKEKFSVALAHGGASTSQVAHEARRLCIQRGAQTLNSLSSSRLRSFILFDTEVPCSWIHDTVSCFRLLRVLCLRFVNVEQVPGVITELYNLRYLDMSYTKVKMIPASFGKLVNLQVLDLRDTYVEELPLGITMLTKLRQLQVYALTNL

SEQ ID NO: 54079 - protein, 557 aa, Zea mays
  Coding DNA Sequence Number=SeqID_12300
  Gene Ontology: Mol. function=protein binding; Cellular component =membrane; Biological process=defense response
  Homolog annotation: Hit_ID=Q7XI19; Match level="QueryCoverage=99%, HitCoverage=61%, E-value=1e-146, Identity=46%"; Hit description =Putative disease resistance protein RPR1
  Pfam annotation: Domain name=NB-ARC; Domain location=156-466; Score =310.7; E_value=2.7e-90; Accession=PF00931.13; Description=NB-ARC domain
MADALFVVLSKLADSLGEQTLERISTKLIEVAPVLTDFEHSMKQIEAELLILQAFIAQVGTKVGDKAFDAWLDQVRDVAHEVEDIIDEYAYLEVQAVDTGSFFKRKFLQIKKFAAWQKFHSQISHVEARIQRLGEIRNRYGILSGEIDRSKKLRSPNRLFMSDSSYLTDNSEIVGHVDEIGRLTQWLLEYKQERTLIAVFGMGGSGKTTIASSAYKSQKITRTFNCHAWVTVSQTYQVEELLREIINQLIDQRASMSSGFMTMSGLRLVEVIQSYLQDKKYFIVLDDVWDKDAWLFLNYAFVRNNCGSKVLITTRRKDVSSLAVDQYTIELKTLQYAESWELFCKKAFRASKDNQCPENLRFCAEKIVARCQGLPLAIVTIGSVLSYHEFEEQGWESFYSQLSWQLANNPELNWISNVLNMSLNDLPSYLRNCFLYCSLYPEDYKIKRKVISKLWIAEGLVEDREDGTTMEEVANYYLVELTQRCLLRVTESNACGRPRAFVMHDLVRELTSNIAKKEKFGIAYGDASTTQVPPEVRRLCIQRGAQTLNSIGSSRCK

SEQ ID NO: 54080 - protein, 64 aa, Zea mays
  Coding DNA Sequence Number=SeqID_12301
MAHSCDGMTRAEGSDGIARGRRKGQGRKAPRLAGEERAVIGRLGHRRERGAGARERGGQAFVEL

SEQ ID NO: 54081 - protein, 192 aa, Zea mays
  Coding DNA Sequence Number=SeqID_12302
METDLAKEISLRSLLAQPLPVSAEFGLLESHLRSDNSVTNKGGLGGAHQQQHLVPWPPSANIVTGKWIFKPEFHSDGYQLPHWAAVAGALAAWRRLEHWGAMAATGELWGKGNGWLAAHCGAMAAGALGGGAWSNGGLAAAHCPVGGGKREDRRREEGDRRRTWRAVEDGRRRLACGELAARCLQAAAWLDG

SEQ ID NO: 54082 - protein, 93 aa, Zea mays
  Coding DNA Sequence Number=SeqID_12303
MQMIALCVDNVEIAVEEVADAEDDAVNPPWTSRFQQIGERERRSGFAVKIARGRRGFGRGSRRAYDTGEDRLREREVESTGWRRGAWKEAAEY

SEQ ID NO: 54083 - protein, 400 aa, Zea mays
  Coding DNA Sequence Number=SeqID_12304
  Gene Ontology: Mol. function=protein binding; Cellular component =membrane; Biological process=apoptosis
  Homolog annotation: Hit_ID=Q6H4T9; Match level="QueryCoverage=88%, HitCoverage=37%, E-value=6e-57, Identity=39%"; Hit description =Putative disease related protein 2
  Pfam annotation: Domain name=LRR_1; Domain location=183-203; Score =0.4; E_value=2.4e+02; Accession=PF00560.23; Description=Leucine Rich Repeat
  Pfam annotation: Domain name=LRR_1; Domain location=232-254; Score =6.4; E_value=18; Accession=PF00560.23; Description=Leucine Rich Repeat
  Pfam annotation: Domain name=LRR_1; Domain location=55-76; Score =13.8; E_value=0.65; Accession=PF00560.23; Description=Leucine Rich Repeat
  Pfam annotation: Domain name=LRR_1; Domain location=78-99; Score =11.3; E_value=2.2; Accession=PF00560.23; Description=Leucine Rich Repeat
  Pfam module annotation: Pfam domain module=LRR_1::LRR_1::LRR_1::LRR _1; Domain location=183-203::232-254::55-76::78-99
MTYSITRLRSFILFDTEVPCSWIDDVLSRFRLLRVLCLRFANIAEVPGVVTELYNLRYIDFSYTKVKTIPASFRKLVNLQVLDLRFTYVEELPLEITTLTNLRHLHVFAVHDFQQRSLNCLGATKIPVNICHLKNLQAIQIVLANKDLVSQLGNLKLMRSLAIAEVRQSYIAELWKSLTKMPNLNRLAISTCNMEEILDFKMLKPLSNLVFFKLAGKLESGVLPLMLYYFEKLTWLQLDWSGLKKDPMSSLSHMSNLVHLFMCGSYCGEQLTFCSGWFPKLNYLQLSKMENLNWIEIEDGTMMCLNNLYLVDLGNLKAVPYGIKYIRTLHQMHLTDMSKEFLGSLQGSASPVVQHICNIHIFESSDSEAVNKFFFEPYLATKFGPGATKHAPTYLGSSGI

SEQ ID NO: 54084 - protein, 79 aa, Zea mays
  Coding DNA Sequence Number=SeqID_12305
  Subcellular localization annotation: CTP_CleavageSite=36; ConfidenceScore=5.45e-01
MIPYPHPCLATTPPLQNRNPAENRRGASLAVEPRLKASRSSSAPPPAVRSAQACAFRFQVPPPEHAQHAPRPFASLFEC

SEQ ID NO: 54085 - protein, 1016 aa, Zea mays
  Coding DNA Sequence Number=SeqID_12306
  Gene Ontology: Mol. function=protein serine/threonine kinase activity; Cellular component=integral to membrane; Biological process=protein amino acid phosphorylation
  Homolog annotation: Hit_ID=Q6H5Y7; Match level="QueryCoverage=94%, HitCoverage=95%, E-value=0.0, Identity=61%"; Hit description =Putative LRR receptor-like kinase
  Pfam annotation: Domain name=LRRNT_2; Domain location=25-69; Score =43.5; E_value=7e-10; Accession=PF08263.3; Description=Leucine rich repeat N-terminal domain
  Pfam annotation: Domain name=LRR_1; Domain location=122-144; Score =12.8; E_value=1.1; Accession=PF00560.23; Description=Leucine Rich Repeat
  Pfam annotation: Domain name=LRR_1; Domain location=148-170; Score =11.9; E_value=1.7; Accession=PF00560.23; Description=Leucine Rich Repeat
  Pfam annotation: Domain name=LRR_1; Domain location=172-195; Score =5.5; E_value=27; Accession=PF00560.23; Description=Leucine Rich Repeat
  Pfam annotation: Domain name=LRR_1; Domain location=197-220; Score =13.0; E_value=1.1; Accession=PF00560.23; Description=Leucine Rich Repeat
  Pfam annotation: Domain name=LRR_1; Domain location=222-244; Score =10.8; E_value=2.7; Accession=PF00560.23; Description=Leucine Rich Repeat
  Pfam annotation: Domain name=LRR_1; Domain location=246-268; Score =13.3; E_value=0.87; Accession=PF00560.23; Description=Leucine Rich Repeat
  Pfam annotation: Domain name=LRR_1; Domain location=270-292; Score =12.6; E_value=1.3; Accession=PF00560.23; Description=Leucine Rich Repeat
  Pfam annotation: Domain name=LRR_1; Domain location=293-315; Score =17.3; E_value=0.055; Accession=PF00560.23; Description=Leucine Rich Repeat
  Pfam annotation: Domain name=LRR_1; Domain location=317-339; Score =13.7; E_value=0.66; Accession=PF00560.23; Description=Leucine Rich Repeat
  Pfam annotation: Domain name=LRR_1; Domain location=341-363; Score =8.8; E_value=6.4; Accession=PF00560.23; Description=Leucine Rich Repeat
  Pfam annotation: Domain name=LRR_1; Domain location=365-387; Score =8.0; E_value=9.3; Accession=PF00560.23; Description=Leucine Rich Repeat
  Pfam annotation: Domain name=LRR_1; Domain location=389-411; Score =3.4; E_value=67; Accession=PF00560.23; Description=Leucine Rich Repeat
  Pfam annotation: Domain name=LRR_1; Domain location=413-436; Score =1.4; E_value=1.5e+02; Accession=PF00560.23; Description=Leucine Rich Repeat
  Pfam annotation: Domain name=LRR_1; Domain location=438-458; Score =0.9; E_value=1.9e+02; Accession=PF00560.23; Description=Leucine Rich Repeat
  Pfam annotation: Domain name=LRR_1; Domain location=460-482; Score =9.3; E_value=5.1; Accession=PF00560.23; Description=Leucine Rich Repeat
  Pfam annotation: Domain name=LRR_1; Domain location=505-527; Score =13.4; E_value=0.85; Accession=PF00560.23; Description=Leucine Rich Repeat
  Pfam annotation: Domain name=LRR_1; Domain location=529-552; Score =17.2; E_value=0.06; Accession=PF00560.23; Description=Leucine Rich Repeat
  Pfam annotation: Domain name=LRR_1; Domain location=554-576; Score =12.5; E_value=1.3; Accession=PF00560.23; Description=Leucine Rich Repeat
  Pfam annotation: Domain name=LRR_1; Domain location=577-599; Score =11.0; E_value=2.5; Accession=PF00560.23; Description=Leucine Rich Repeat
  Pfam annotation: Domain name=LRR_1; Domain location=97-120; Score =18.2; E_value=0.029; Accession=PF00560.23; Description=Leucine Rich Repeat
  Pfam annotation: Domain name=Pkinase; Domain location=691-986; Score =142.9; E_value=8.8e-40; Accession=PF00069.15; Description=Protein kinase domain
  Pfam annotation: Domain name=Pkinase_Tyr; Domain location=691-986; Score=109.5; E_value=1e-29; Accession=PF07714.7; Description=Protein tyrosine kinase
  Pfam module annotation: Pfam domain module=LRRNT_2::LRR_1::LRR_1::LRR_ 1::LRR_1::LRR_1::LRR_1::LRR_1::LRR_1::LRR_1::LRR_1::LRR_1::LRR_1: LRR_
  Pfam module annotation: Pfam domain module=Domain location=25-69::122- 144::148-170::172-195::197-220::222-244::246-268::270-292::293 -315::317-339::341-363::365-387::389-411::413-436::438-458::460
  Pfam module annotation: =554-576::577-599::97-120::691-986::691-986
MPTLLVVVVVVLLLPNCISDSAQANDAELRALLAIKKDWGSPAALRSWKNSSASASSTTHCTWAGVACSSSGQVTAFSFQNFNIGRPIPASICSLKNLAYLDLSYNNLSGEFPAAALHGCSALRFLDLSNNIFSGVLPTDMDRLSPGTMEHLNLSSNSFSGSVPLAIAGFPKLKSLVVDTNGFNGSYPGAAIANLTRLETLTLANNPFAPGPIPDGFGKLTKLKLLWLSGMNLTHGIPDTLSSLSQLTVLALSDNSLQGEIPAWVWKLQKLELLYLYGNRFTGAIGPDVTAMNIQEIDISSNSLTGPIPESIGDLRNLTLLFLNFNNISGPIPSSVGLLPNLVDIRLFSNSLSGPLPPELGKHSPLANLEVSNNFLTGELPDTLCFNKKLYDVVVFNNSFSGAFPAGFGECNTVNNIMAYNNRFTGEFPGAVWSEFPALTTVMIQNNSFAGVLPAEVSSKITRIEIGNNRFSGAIPASATGLETFMAENNWFSHGLPEDMSKLASLIQLSLAGNQVSGSIPASIRALERLNYLNLSGNQITGAIPAAAIGLLPVLSVLDLSNNKLDGEIPADFNDLHLSHLNLSFNQLVGEVPTTLESPVFDAAFLGNPGLCARQGSGMLLQTCPHGGGHGSASARMIVVVLIATVSGVSAIGFVAVVGWFVLRRNRKSDSWKMIPFGTLSFSEQDIISNMSEENVIGRGGSGKVYRIHLGGHEARGHGGGAGHSTTTVAVKKIGNDVDGANHDKEFEAEARSLGGLLHGNIVRLLCCISSDDTRLLVYEYMENGSLDRWLHVHRRRGGGKRAAASGPLDWPTRLSIAIDVATGLSYMHHGLTSPVVHRDIKSSNILLDRGFRAKIADFGLARILARGGESEHVSAVCGTFGYIAPEYFSRVKVSEKVDVYSFGVVLLELTTGRGPQDGGTESGSCLASWASKRYKNGGPCADLVDAEIQDLANLDDMVAVFELGVICTGEDPSSRPPMSEVLHRLRLLQCCRNQMSIDDDSAKDVCGVLSLESMV

SEQ ID NO: 54086 - protein, 683 aa, Zea mays
  Coding DNA Sequence Number=SeqID_12307
  Homolog annotation: Hit_ID=Q1SVS0; Match level="QueryCoverage=46%, HitCoverage=31%, E-value=9e-80, Identity=51%"; Hit description =Bromodomain
  Pfam annotation: Domain name=Bromodomain; Domain location=319-408; Score=108.9; E_value=1.5e-29; Accession=PF00439.15; Description =Bromodomain
MASDPPGDGTSGEETAPGPAPAVEAPPAPAVPARSRWAAEIKVYTRKHPRKNPKPPPESAADPVSVPSPAPNPLSETLSSIRRSIHRTEAVDAAALSDPAAPASVPTRAPSGERGAASGDPSSGLNRVGGGIPNGHGDDRAAAAAVKAEKARKRRLRSELRRCLAGELDQVRVLSRRLKEAAEALAQQEASEPVPLPLMVLPTQQQVVDAGYVQHQFLAGDMAVPMPTQIAAAVTPARSLLHRRPLTVSVVHNEAFEKEKRTPKANQLYQNSEFLLAKDRIPPSDSHVRKKPKHHKKKHRSLESRGADFDAERRLYSHAFKKSSSLLSRLMKHKFGWVFNKPVDPVTLGLHDYFTIIKHPMDLGTIRGRLSRGQYRNPKEFAEDVRLTFHNAMTYNPKGQDVHFMAEQLLGIFEAQWPEIEAEVNYLASCPPLPKKFPPPPIDLRFLERSDSMRHHVALDTNSRPISHTPTYTRTPSMKKPRAKDPNKRDMTIDEKRKLSENLQNLPPVKLDAVVQVIKNKNLSVKQHDDEIEVEIDSMDAETLWELDRFVSNYKKNLSKQKRKAERAMLARQDAELRAQHPIQQPQPTPVPQEPFGEKSPKQVVKGYPYFLLYLKSTCTLQIRWKASNCQHLHQNKMVRIDRMRVVQAIQAAPAVAQDHLLVAQTVIAPLQMDLMLAIHLEI

SEQ ID NO: 54087 - protein, 118 aa, Zea mays
  Coding DNA Sequence Number=SeqID_12308
MDKEKKQRGGGAAAEEAERGDARSRRRRPGGFAQSRRCAWEPAEGRRGGFAQSRRCTCEPAEGRRGGRQSRVGAGGAARFSGESWEGEAEGGSEAGRVGGGALHRRIWHKSRGGDGDG

SEQ ID NO: 54088 - protein, 112 aa, Zea mays
  Coding DNA Sequence Number=SeqID_12309
  Subcellular localization annotation: CTP_CleavageSite=14; ConfidenceScore=5.04e-01
METHDSWCCCAGVSSSTRRRARDSSVARRRARNNGVARWRALETGQQSLDRGQGNDSHSIEGAGSGMTGHWMVAARWRAQYYGDTPKVVTARVNESVRVVLVWPCVELGTRG

SEQ ID NO: 54089 - protein, 67 aa, Zea mays
  Coding DNA Sequence Number=SeqID_12310
  Homolog annotation: Hit_ID=Q5VRF5; Match level="QueryCoverage=82%, HitCoverage=6%, E-value=1e-14, Identity=71%"; Hit description =Putative ribonucleotide reductase
MAVDRGCYIDQSQSLNVHMEQANFGKLTSLHFHAWSKVTRDTAHHEHHLHTQPADDWSSVTRTKSVM

SEQ ID NO: 54090 - protein, 308 aa, Zea mays
  Coding DNA Sequence Number=SeqID_12311
MGCTQVTVRQLDEQTRCQDVRPSRKQRQAAAVRPCGSAPRRDQAASRTAERRTGRLKRGSDGACRVRGSEWLERRQERLAAERAADSLRAAGDLQALGGVAGWRGRPASGAREDLVHQHPRGAAPCAGTPACRRRAGQRCCREGTGRGRTVGWRGAAAQTARATRWERRLRERRWTGIRRSLAFFLNPPLDCVACPPGALLQENKQVGGPRAFGGRRAPEEDDEQGQGTTGRSTDGALRSAPKQPPPARQEATAKQGLGAAPAALAALGSGGGESRRLGGRDAVGWGPAAGRGGWEKPNLIPYWNVNP

SEQ ID NO: 54091 - protein, 67 aa, Zea mays
  Coding DNA Sequence Number=SeqID_12312
  Homolog annotation: Hit_ID=O64471; Match level="QueryCoverage=63%, HitCoverage=13%, E-value=5e-10, Identity=60%"; Hit description =Expressed protein
MASAAAVEWEAAARKVLVARKPCFGLPTACPTCLPVLLYLRMAQVPFDIHVDTSFPDADIPEGKCCL

SEQ ID NO: 54092 - protein, 144 aa, Zea mays
  Coding DNA Sequence Number=SeqID_12313
  Gene Ontology: Mol. function=binding
MGQSLLIKQQHNFRCLLGNSLCPGHEIRSTVADRVRQRQRGSNLLMYTKILGYGALARLVKTGYSISRDEAAKALYAISSLIRNNVNGQEAFHSEIGSAMLQEWLTCDNFPYFTEHVGQQHIDVRLYKKAVFFSNTFGILSAKF

SEQ ID NO: 54093 - protein, 191 aa, Zea mays
  Coding DNA Sequence Number=SeqID_12314
  Homolog annotation: Hit_ID=Q6QP54; Match level="QueryCoverage=40%, HitCoverage=40%, E-value=1e-09, Identity=51%"; Hit description =Putative kinase
MCSPILGPSEGIKGSTAKGQRRLRHSDCSATRQSESDRQSGLARGAIGNSAPPDPRARTWARPRKMTNSASPDPRARTPPWPLPNDLRLARPRGSGLGLGNRRQTRPQLRRSPHVARPRTRARHVNRERHNHPTPEPTRVTENKTGGRQQGLDRPDSCPSARLRCSSDSHDITPAGCQDLSGCHIGMYLGR

SEQ ID NO: 54094 - protein, 54 aa, Zea mays
  Coding DNA Sequence Number=SeqID_12315
MDPDGLVASAKAAVLPSEQTIIENGCHVIGTKVLLSSSSRTKVCHNVRCIVAAK

SEQ ID NO: 54095 - protein, 173 aa, Zea mays
  Coding DNA Sequence Number=SeqID_12316
MTAIAAKSSRGPPYTDHSPTALAPFGYQDDLQMTRVLTAKRSNTDKHGNRWMLKRRRDQGPQPIVSKSCPYAAAPPCPRRALAGGVTNPRAHAPISQSESIYALPSEKRTQERDSYRGSRHREIRPRWSGGLAGFCRSDEEFRCRGASTRHPKPRACSWRVSKDSKPHTVDRR

SEQ ID NO: 54096 - protein, 113 aa, Zea mays
  Coding DNA Sequence Number=SeqID_12317
MTRPRWPRLTGLRAHGAAALAWLATPADGEKGERGARDSSTEPSPWQAVAMLSAMRGEEEGMERGRGGAHYGRTETNDMGSTWPSADGGFRRERDESDGVGQELARGAGMGKR

SEQ ID NO: 54097 - protein, 158 aa, Zea mays
  Coding DNA Sequence Number=SeqID_12318
MAEPTETHRGQGKGTRAQGLARRHWPDRDRAWGRSSAATMTRPRWPRTTGLRAHGAAVMAWLGHTLGRAPAMASVRHTERNEGRGRGDGERKGRGSPWAKSRLNGINDFIEARELQRAWESRLFNVAAQGLFEGVMGLLLCGMPIARATSRSYRGECL

SEQ ID NO: 54098 - protein, 651 aa, Zea mays
  Coding DNA Sequence Number=SeqID_12319
  Homolog annotation: Hit_ID=Q10NX4; Match level="QueryCoverage=97%, HitCoverage=90%, E-value=1e-177, Identity=53%"; Hit description=FAR1 family protein, expressed
  Pfam annotation: Domain name=FAR1; Domain location=204-383; Score =88.6; E_value=2e-23; Accession=PF03101.5; Description=FAR1 family
  Pfam annotation: Domain name=FAR1; Domain location=67-200; Score =44.1; E_value=4.8e-10; Accession=PF03101.5; Description=FAR1 family
  Pfam module annotation: Pfam domain module=FAR1::FAR1; Domain location=204-383::67-200
MEGTVIRIASESKRGNEQTDSLTEVPRAIGTLVTHNREVENLIVLEDDTELTPYEGMEFESEDAARDFYSTYARSAGFRIRISRYTRSRRDNSVISRRIVCSKEGFHETRACDGLHPEQKQQERAGTRVGCKAMILIKKFSPGKWVVTKFIKNHNHGPVPPRKLDSRLVDQDCDPMEKPHSIEVDPVEEPFEGMEFESEEAAKLFYVNYARLNGFRARISRYCRSRRDNSIISRQIVCSKEGFREVRTKKVLTDEGKTKRPRMITRVGCKAMIVVKKMNSGKWMVSKFEKEHNHSLSYSKMVPSTSNITSGEIVDLAAKGAHPSEVKNEGYSAGTQCNPADSLTILYNNLCQEAIKFAKEGSVTEEIYHVAVSALKEAAEKVAEVKRSRPTLSHCGFVRESKHDVLQEKSMSALQCSNQVELTRTSPGSRPLQDSASNLLLIPTDILTDSRLYSGVDTAPLTGGFPTNESESTHASESSFMHFKNTKKTSSEKSQHFLVFHFGPEDAYLLLEPQNTCFNQLIHGKEQGIHGSSKDTMVAIPAIPLALCMPVTQSLPGSSTGPFGGVLSELKNQGTVPKSIVHATALACGARAVPLEDAASLISAIESKIRSGGAIIAKLPSNNLAPLVPPAIAMSSSSEDDEEHDHSEPSQ

SEQ ID NO: 54099 - protein, 336 aa, Zea mays
  Coding DNA Sequence Number=SeqID_12320
  Gene Ontology: Mol. function=phosphatidylserine decarboxylase activity; Biological process=phospholipid biosynthetic process
  Homolog annotation: Hit_ID=Q5JN42; Match level="QueryCoverage=55%, HitCoverage=31%, E-value=3e-78, Identity=79%"; Hit description =Phosphatidylserine decarboxylase-like
  Pfam annotation: Domain name=efhand; Domain location=104-132; Score =8.0; E_value=1.9; Accession=PF00036.22; Description=EF hand
  Pfam annotation: Domain name=efhand; Domain location=140-168; Score =29.3; E_value=1.3e-05; Accession=PF00036.22; Description=EF hand
  Pfam module annotation: Pfam domain module=efhand::efhand; Domain location=104-132::140-168
MTGAGEALRTGRKRGWAADVRGRGERWDGELWRAACGGARVAQVSSWWGRVVAVAATSGGGTDDARGSMWGADDEKGAQMWILIGCADGRGSMRGAEDGGDRCNITFLTLQQDYDEDGTLSLSEFSDLMKAFGNKLAVAKIEEFFRQADTNSDGIVDIDELAALLAAQQEEEPLISNCPVCGEDLGKYDNINDMIHMTLCLDEGTGNQIMTGGFLTDKQASYGWMFKLSEWAHFSTYDVGLHSGSTASHILVFDRRTKRIVEEVIDRKIVLSMRALYQSKVGLALINTDTVQGLKMRRERSGEEDLGGLRGQEQGRRRTQPLDSNSLHRLSGTISP

SEQ ID NO: 54100 - protein, 82 aa, Zea mays
  Coding DNA Sequence Number=SeqID_12321
MTPEHHAEAGEAEGGGCGADDWGRGGADYGQKAGMAGVHRVTDCVGALNAFVSMLGDNGLPFYKLLILMDMFRWDCDRMRRS

SEQ ID NO: 54101 - protein, 432 aa, Zea mays
  Coding DNA Sequence Number=SeqID_12322
MRRRWGQAELTLAVVDAGRRRGDLRGYDEWTGEEWRGERDVAESEASESASKLVERREGERLLGSAGVGSEHRSLVEGEEENGTLIQGPPVRVAGWAERRGGRTEKGRFDAQKCLQPSFFVHKSMNHIRHTSVFKVSSITTHNTEAHDQVADATEAAKFVVRQLRYVASGALVHSVTSRLRAEKAELKNKIERLRTENTNDVREKSAADVRSQCLADKANNLEKENDELSRQLGETCREKLDAGTRASVKRAHSLFVEAYRDLGAETTPFDRSDGLMSYASLVFYEGAANALSHEGCHHFEVFERSNHDFDWEVFQIEDMSLKQSAGTLFDRMWGTHDCSVVRERTAQAMEQVSLTTVDYVGVETGMEEQPSWVGAAIGEPSARETSHHSADDVRGDVQVYRRGNQILVDVLLGCCIDTNLVPAQVLMIGPV

SEQ ID NO: 54102 - protein, 170 aa, Zea mays
  Coding DNA Sequence Number=SeqID_12323
  Gene Ontology: Mol. function=DNA-directed RNA polymerase activity; Cellular component=RNA polymerase complex; Biological process =transcription, DNA-dependent
  Homolog annotation: Hit_ID=Q6F2V1; Match level="QueryCoverage=98%, HitCoverage=99%, E-value=2e-37, Identity=52%"; Hit description =Putative DNA-directed RNA polymerase II subunit
  Pfam annotation: Domain name=RNA_pol_Rpb6; Domain location=89-142; Score=87.0; E_value=5.7e-23; Accession=PF01192.13; Description=RNA polymerase Rpb6
MADDDYNEIDMGFDSPSSFPPLWVPLFYICVTSNCDSNASYEDEPPEPEIEEGAEEELENNEDAPDDVIGGEGEDKEQEKTKRERKTTKYMTKYERARILGTRALQISMNAPVMVELEGETDPLEIAMKELRARKIPFTIRRYLPDGSYEDWGVDELIVEDSWKRQVGGD

SEQ ID NO: 54103 - protein, 1042 aa, Zea mays
  Coding DNA Sequence Number=SeqID_12324
  Gene Ontology: Mol. function=protein tyrosine phosphatase activity
  Homolog annotation: Hit_ID=Q6F2V0; Match level="QueryCoverage=78%, HitCoverage=96%, E-value=0.0, Identity=54%"; Hit description =Expressed protein
MDLNTGIHLMVTLYSCAYGSLHGVFVQGLQLLDLAAIGHFRLLRRDPMGALGYSSSKPPLTKIVESANGRPQDMDVVAAMRNGEVLGRLTVLKSDHCPGSHSLNLPERVEGAPNFREIPGFPVYGVANPTVDGIRAVIQCISTSKGGRPVLWHNMREEPVIYINGKPYVLREVERPCKNMLEYTGIDRDRVERMEARLKEDILREAERYGGAIMVIHETDDGEIFDTWENVDNEAVLTPLEVYKNLVSEGLPIKYARVPITDGKAPKSSDFDTIAFNVTAASKGTAFVFNCQMGRGRTTTGTVIACLLKLRIDHGRPIRIPVCQYDHEDDAIYSTGGDATDHNGHLNSESWKPRTLTKLNSGFGINDILLLRKITRLFDNGIECRQTLDTVIDRCSALQNIRQAVLNYTRVINQQHVEPRVRRVALNRGAEYLERYLKLIAFSAYLGSEAFDGFCGQGQTKISFKGWLQQRPEIQTMKWSIRLRPGRFFTVPHEQKATYPPPQGDVTMETIVKARSGSVLGKGSILKMYFFPGQKRSSSVNFRGAPHVIKVDGYPVYSMATPTIDGASDVLSYLGSKDTTGRNIAQKVVVTDLREEVVVYIKGSPFVLRELDQPVDTLKHVGISGPMVENIETRLKEDILSEVKQLGGRLLLHQEEFNAATNQCSVVGYWEHIDLEDVMTPAEVYSTLRDKGYCIEYKRIPLTREREALAADVDAIQSSIDESARYYLFISHTGYGGVAYAMAITCLGLSADAKFVMEETAETHFVSTSLAKNVSIKTKTDIALKQGDYRDILNLTRVLVHGPKSKEEVDTVIDRCSGAGHLREDIMHYRKALQDCSHDDDDDCDEEHSYLTDMGTKALRWRDVWMPASAFGPGSIDAKGGSGQAGPVRGGWAYLGSQVELVQAPHRSVIPNLPPTIPRRGRAHVRAFFGHVLAPAPLLSPAPCSPTSPRSFAPSAEPPSLSLPLCARDQRTPPPAHSRVAVYSAITVAPAPHPLPRRSSAAVDPRFHRTFAVLHTLWSSHSSALWCSRASMMPMAESARPP

SEQ ID NO: 54104 - protein, 373 aa, Zea mays
  Coding DNA Sequence Number=SeqID_12325
  Gene Ontology: Mol. function=protein tyrosine phosphatase activity
  Homolog annotation: Hit_ID=Q6F2V0; Match level="QueryCoverage=91%, HitCoverage=93%, E-value=1e-176, Identity=54%"; Hit description =Expressed protein
MEGIANVLNHIGAHKKGKQTRILWHSLREEPVIYINGRPFVLRDVEKPFSNLEYTKSTKLINHKGINRERVEQMEFRLKEDILQEASRYGNKILVTDELPSGQMVDQWESVVYDTVKTPLEVYEELQHQGYLVDYERVPITDEKAPKEGDFDNLVRRISQVDIETEIVFNCQMGRGRTTTGMVIATLVYLNRIGASGIPRTGSIGKVFYAGNDVDDYMPSSEEAILRGEYAVIRSLVRVLEGGVEGKRQVDKVIDKCDSMQNLREAIATYRNNILRQPDEMKREASLSFFVEYLERYYFLICFAVYVHSVSSAHQTTLSVEVSFSDWMRARPELYSILRRLCRVSTKTFCLEGSLASTKWYIDLCARFFLDGS

SEQ ID NO: 54105 - protein, 96 aa, Zea mays
  Coding DNA Sequence Number=SeqID_12326
  Homolog annotation: Hit_ID=Q9ZRZ5; Match level="QueryCoverage=39%, HitCoverage=17%, E-value=2e-08, Identity=71%"; Hit description=HB1 homeodomain protein
MAEQYKMHVMNEIQWDYFSVELLDIQHVHIKLVSTDTCFIDLNLAKRLSWKLRGYVKVMIDKQMEVLRKQISIYATICEQLVEMHRILTEHEDTIA

SEQ ID NO: 54106 - protein, 188 aa, Zea mays
  Coding DNA Sequence Number=SeqID_12327
  Homolog annotation: Hit_ID=Q6K9N6; Match level="QueryCoverage=21%, HitCoverage=9%, E-value=7e-12, Identity=90%"; Hit description =Succinyl-CoA ligase [GDP-forming] beta-chain, mitochondrial precursor
  Pfam annotation: Domain name=ATP-grasp_2; Domain location=95-177; Score=-135.1; E_value=0.053; Accession=PF08442.1; Description=ATP -grasp domain
  Subcellular localization annotation: CTP_CleavageSite=37; ConfidenceScore=5.31e-01
MKINREHVWTLSRPSTRFHQSRVPVPRRRAGPLQCPSAPAVDRGALSRGEEGLARPTTVTAQATRGVVKIDGELLHDRSLPLEEVNPKQCRLSSIRVAFFFLCPQIVVKSQILAGGRGLGTFKSGLQGGVHIVKAEEAELIARKFGIVFASISVPIFAALYCPTKLCSIQSETPLSETRCVLMRCHES

SEQ ID NO: 54107 - protein, 90 aa, Zea mays
  Coding DNA Sequence Number=SeqID_12328
MPIVEQRYVRLGLNKIKGEQQRGTNTSEGTGESPEAEAMLKKGSLVSKVEPLWPYGPIGGTRADDEQRGSLRGFEGVGAIRGAGPSVEPV

SEQ ID NO: 54108 - protein, 386 aa, Zea mays
  Coding DNA Sequence Number=SeqID_12329
  Homolog annotation: Hit_ID=Q8H046; Match level="QueryCoverage=35%, HitCoverage=7%, E-value=1e-36, Identity=54%"; Hit description =Putative callose synthase
MNPNLIFEDCVPMSGLDFNTCWMKQTAEPAESCNSGGGVSFLDNVIYPFYEIIAAEAANNKNGRAPHSEWRNYDDFNEFFWSHKCFHLRWPWNLSDPFFSKPSRKYKIYLLDIHVFYTVLSAIYGFLLGARDRLGEISTVEAVHRFFEKFPGAFMHRLHVEEATAIFWSGRGAAGRGEGGDGSSGWGASEPLTPGLSLRDEREWRERKICCEQDEGSGCYLPSLAACDPRADAAYCSSWHDDGFDPCCGQEHGSGKRRERSGGTYESNRRSPDCHMSIWFDYYPTCSELELLLMPKNDVGVLPIVQWPVFLLASKVAVETLAATDVETRVKLREQQEKTVGEDVGKLRACRDVMDVDVLGNNTLMDEIEVDLNILRALMLDMVDGK

SEQ ID NO: 54109 - protein, 136 aa, Zea mays
  Coding DNA Sequence Number=SeqID_12330
MGLEARRGHCASGRNPRRWYGCAPAFDRLPSRWRQPAAGPPTSTPQLICLLSTRPTFRCGVISSSIRVRSYAQSYWAVLPVTFSNLLHIAGQKQPNFRTRQIHLCAKILLTVGLPGYYDPGRYHDVASVKRNQPFK

SEQ ID NO: 54110 - protein, 87 aa, Zea mays
  Coding DNA Sequence Number=SeqID_12331
MSRRGQDKQHGEEPQRPVESPLGGCSEGPSEEKENGTPPASPGAGKGTCLCTSLIECKHEVSDGAKAIVDIGCTVAQSYHIKREGSG

SEQ ID NO: 54111 - protein, 386 aa, Zea mays
  Coding DNA Sequence Number=SeqID_12332
  Gene Ontology: Mol. function=1,3-beta-glucan synthase activity; Cellular component=1,3-beta-glucan synthase complex; Biological process=regulation of transcription, DNA-dependent
  Homolog annotation: Hit_ID=Q6WGM8; Match level="QueryCoverage=36%, HitCoverage=8%, E-value=3e-64, Identity=73%"; Hit description=Beta 1, 3 glucan synthase
MGHEEIFVNQAKWVWTQWKVDDSLDRCKAHWVLRGFTQRPGVDYIETFSQLLRSLTGPLSLLAGSSVGCQECVPPCDTHAKLSDDGATVSDPTAYWSLACSPVGLSLHARFLGTTFNRDQADPSVPSGCFFDDPPHMSSLCRTNLVPGHSSIYMQCSLGAVSSLGPPSFSPWCHDPVLRLSPELSLMGWLRLNFVLQEIYSIKLPGNPKLGEGKPENQNHAIIFTRGNAVQTIDMNQDNYFEEALKMRNLLEEFSLKRGKHYPSILGVREHVFTGRVRMHYGHPDVFDRIFHITRGGISKASRSINISEDIYAGFNSTLRQGCITHHEYIQISEGSQIGSRNQRQQHGHEQYQLTKVVLPAGNHGMLICHGRDMYIIDREMCSRWF

SEQ ID NO: 54112 - protein, 600 aa, Zea mays
  Coding DNA Sequence Number=SeqID_12333
  Gene Ontology: Mol. function=1,3-beta-glucan synthase activity; Cellular component=1,3-beta-glucan synthase complex; Biological process=1,3-beta-glucan biosynthetic process
  Homolog annotation: Hit_ID=Q8H046; Match level="QueryCoverage=68%, HitCoverage=19%, E-value=1e-148, Identity=68%"; Hit description =Putative callose synthase
  Pfam annotation: Domain name=PPR; Domain location=120-154; Score=0.6; E_value=6.3; Accession=PF01535.11; Description=PPR repeat
  Pfam annotation: Domain name=PPR; Domain location=223-257; Score =34.5; E_value=3.6e-07; Accession=PF01535.11; Description=PPR repeat
  Pfam annotation: Domain name=PPR; Domain location=258-292; Score =12.3; E_value=0.26; Accession=PF01535.11; Description=PPR repeat
  Pfam annotation: Domain name=PPR; Domain location=295-329; Score =18.4; E_value=0.026; Accession=PF01535.11; Description=PPR repeat
  Pfam annotation: Domain name=PPR; Domain location=330-363; Score=6.2; E_value=1.4; Accession=PF01535.11; Description=PPR repeat
  Pfam annotation: Domain name=PPR; Domain location=365-399; Score =17.0; E_value=0.067; Accession=PF01535.11; Description=PPR repeat
  Pfam module annotation: Pfam domain module=PPR::PPR::PPR::PPR::PPR::PP R; Domain location=120-154::223-257::258-292::295-329::330-363::365 -399
MSGSQRTRVAVRRQMHHLRRLVRSPLRHVPPRAAFSGRPSVSHGNDAYGSSHAAASDAIVCLVVAGGGGLEADLDRLFSAVLSHGLVSSVLRALTDRGVPAERFFAWASSLGRGFSPGPRAYNLLVENAGRLDDYGAMSRALALMSERRLSLTDRAFAFLAPSSGSSRSGSVEDAARAVLRALDGVGGPCRASGVFSLVKALASIGEFDAAVLVIEETARKVRYYNVLVAAKCKAGDFVGAREVFDEMRRSGSDPDANTWNYLLGCLLKKGRLAEACGLVEAMERLKRSEIPSSLTYEILTYHACKAGKMDSAMQILDQMFSENLTPRITIHSAFIKGYFYAGRIEDACKYVSDMSTRDRHSVNRNYSLLAKLLWKSGRTIDAGRVLYELMEKGLRPDHSAYVKVAKDLHKMGKGNLACELKMMFQRFSVNSRSETHHQPISGSNVVDDKRSMVLSTATIGRWRAISVPPQPTRTRLRPGTRSYQREHPYRLVVILVHPFPWLSLKIVWGHMEASNVQLAVVVKDIQSTIVELAKVIIDSVQPMGGCERYGWLYDIPQEEWVEMASMHLRDEAQEVLDNWETKDQFISCPEFYDTFTTGI

SEQ ID NO: 54113 - protein, 390 aa, Zea mays
  Coding DNA Sequence Number=SeqID_12334
  Gene Ontology: Mol. function=1,3-beta-glucan synthase activity; Cellular component=1,3-beta-glucan synthase complex; Biological process=1,3-beta-glucan biosynthetic process
  Homolog annotation: Hit_ID=Q8H046; Match level="QueryCoverage=72%, HitCoverage=13%, E-value=1e-139, Identity=85%"; Hit description =Putative callose synthase
MAKLHRRGWGMLNQAASLLVGKGRDVGLNQIALFEGKVAGGNGEQVLSRDIYRLGQLFDFFRMLSFYVTTVGFYFCTMLTVLTVYIFLYGKNVSGKMALSGVGESIQNRADILQNAALNAALNTQFLFQIGVFTAVPMILGFILESGVLTAFVQFITMQFQMCSVFFTFSLGTRTHYFGRAILHGGAKYRATGRGFVVRHIKFAENYRIYSRSHFVKGMEVALLLVIFLAYGFNNGGAVGYILLSISSWIMALSWLFAPYLFNPSGFEWQKIVEDFRDWTNWLFYRGGIGVKGEESWEAWWEEELGLFGSILKLPKIATYSMSHLPKVRRSNSAPQFTMSKGILPHFYKSLTSVTYAAGKTCHSCGYKPNTCLTLSNLPNLRYGKLLQVR

SEQ ID NO: 54114 - protein, 167 aa, Zea mays
  Coding DNA Sequence Number=SeqID_12335
MESLQPHLTSWPCSDRLFQMGRDALQSLQWPKFDVVDFLICEIKDTVAQTVPDDDDDNFWDPRLRLLSRLILAAAQQQMSERMLSLFQTIQDRQDALQQLLADRAEHRGLHDFTFFSILVFRFLLFSLHLLQHFRPLLYQRFRQDPTTFIRSFSLSTLAGHPGFFVT

SEQ ID NO: 54115 - protein, 1510 aa, Zea mays
  Coding DNA Sequence Number=SeqID_12336
  Gene Ontology: Mol. function=ATPase activity, coupled to transmembrane movement of substances; Cellular component=integral to membrane; Biological process=transport
  Homolog annotation: Hit_ID=Q42093; Match level="QueryCoverage=98%, HitCoverage=98%, E-value=0.0, Identity=56%"; Hit description =Multidrug resistance-associated protein 2
  Pfam annotation: Domain name=ABC_membrane; Domain location=293-571; Score=89.7; E_value=8.8e-24; Accession=PF00664.13; Description=ABC transporter transmembrane region
  Pfam annotation: Domain name=ABC_tran; Domain location=1160-1343; Score=157.4; E_value=3.6e-44; Accession=PF00005.17; Description=ABC transporter
  Pfam annotation: Domain name=ABC_tran; Domain location=643-817; Score= 128.9; E_value=1.4e-35; Accession=PF00005.17; Description=ABC transporter
  Pfam annotation: Domain name=Dynamin_N; Domain location=646-801; Score=-45.5; E_value=0.084; Accession=PF00350.13; Description =Dynamin family
  Pfam annotation: Domain name=MMR_HSR1; Domain location=1161-1250; Score=-15.6; E_value=0.027; Accession=PF01926.13; Description=GTPase of unknown function
  Pfam annotation: Domain name=SMC_N; Domain location=1149-1347; Score=- 111.1; E_value=0.0017; Accession=PF02463.9; Description=RecFRecNSMC N terminal domain
  Pfam module annotation: Pfam domain module=ABC_membrane::ABC _tran::ABC_tran::Dynamin_N::MMR_HSR1::SMC_N; Domain location=293 -571::1160-1343::643-817::646-801::1161-1250::1149-1347
MGFDPLEWYCQPVKDGVWSHVVENAFGAYTPCGTDTLVVCISYLALFGVCFYRIWRTTRDYTVQRYKLRSPYYNYLLGLLVVYCIAEPLYRIITGTSIMNLDGQPGLAPFEIVSLIIESVAWCCMLVMILLETRIYINEFRWYIRFVVIYMMVGEAAMFNLVLSVRQYYSSSSIFYLYCSEIVCQFLFGILMVVYLPSLDPYPGYTPIRNEVLVDNTDYEPLPGGEQICPERHANIFARIFFSWMTPLMQQGFRRPITDKDIWKLDSWDETETLYSQFQKRWNDELQKPNPWLLRALHSSLWGRFWLGGFFKIGNDASQFVGPLVLNLLLESLGVLAEAQYFQNVMRVGFRLRSTLIAAVFRKSLRLTNDSRRKFASGRITNLISTDAESLQQVCQQLHSLWSAPFRIVISMVLLYAQLGPAALVGALMLVLLFPIQSLLFALIRAVSNQHVFWLFQTVIISKMQKLTKEGLQRTDKRISLMNEVLAAMDTVKCYAWEQSFQSKVQDIRDDELSWFRRAQLLAALNSFILNSIPVVVTVVSFGVYSLLGGDLTPAKAFTSLSLFAVLRFPLFMLPNLITQVVNCKVSLKRLEDLLLAEERLLLPNPPIDPDLPAISIKNGYFSWESEAQRPTLSNVNLDVPVGSLVAIVGSTGEGKTSLISAMLGEIPPVSGSGTSVVIRGSVAYVPQVSWIFNATVRDNILFGSPFQPPRYEKAIDATSLRHDLDLLPGGDLTEIGERGVNISGGQKQRVSMARAVYSDSDVYIFDDPLSALDAHVGRQVFDKCIKGELQHKTRVLVTNQLHFLPYVDKILLIHDGVIKEEGTFDELSNSGELFKKLMENAGKMEEQVEEDESKPKDVAKQTVNGDVTIADEGSQKSQDSSSKTKPGKSVLIKQEERETGVVSARVLSRFSKDMGDIDRNVAVFVNMFMAQISQLLSTFVLIGFVSTMSLWAIMPLLILFYAAYLYYQATSREVKRLDSITRSPVYAQFSEALNGLSTIRAYKAYDRMANINGRSMDNNIRFTLVNMGANRWLAIRLETLGGIMIWFTATFAVMQNQRAENQKAFASTMGLLLTYTLNITNLLTAVLRLASLAENSLNAVERVGTYIELPSEAPPVIEDHRPPPGWPSSGVIKFEDVVLRYRPELPPVLHGISFVINGSEKVGIVGRTGAGKSSMLNALFRIVELERGRILIDDCDTSKFGIWDLRKVLGIIPQAPVLFSGSVRFNLDPFNEHNDADLWEALERAHLKDVIRRNSLGLDAEVSEAGENFSVGQRQLLSLARALLRRAKILVLDEATAAVDVRTDALIQKTIREEFKSCTMLIIAHRLNTVIDCDRLLILSSGQVLEFDSPENLLSNEGSAFSKMVQSTGPSNAEYLKSLVFASGEERSRREEIKLQDIQRRWVASNRWAEAAQFALARSLTSSHSDLLALEAAEGNNILRRTKDAVITLQSVLEGKHNTEIDESLTQYQVPADRWWSSLYKVIEGFGSSLSIICFGLCNVCKNDNATLT

SEQ ID NO: 54116 - protein, 129 aa, Zea mays
  Coding DNA Sequence Number=SeqID_12337
  Subcellular localization annotation: CTP_CleavageSite=21; ConfidenceScore=5.06e-01
MSSQSVAQFLPLLCRAATTISCSTNARHRLRAYHLGTTPSPIDSIRSWDRAAASASAVVAFNMAEHHPLPVPLQSHPAAFPRHPKSVASPARFHPTLLAAPASALMRPRLAPARHEHRAPLCRSPSACA

SEQ ID NO: 54117 - protein, 149 aa, Zea mays
  Coding DNA Sequence Number=SeqID_12338
MAGSVLCERGRGGQTVEGSSRRAGGYSGEQSRVGKCETWENKGGARTVTLRGVPGMHERKLGRGKDAGRRRQLSGCARSAPVNADRANQRRKGRTKGYPELRVMRQSLPRERARCRLNNGHRTTMVPGERRQSLAGRVRRPRERSKKLG

SEQ ID NO: 54118 - protein, 99 aa, Zea mays
  Coding DNA Sequence Number=SeqID_12339
MALILMEDERGEGVTVAVKAPLHATEETALRGSVRLLGSRQTGACCGRLCVHCRGTGQGGLAAWHAGARRAVQVARTARHRGKKGRGALGCLAHGSAGV

SEQ ID NO: 54119 - protein, 68 aa, Zea mays
  Coding DNA Sequence Number=SeqID_12340
MADVDEVVIMRSLWLPVALVKTIGDDFAFLTEGQVANGGRCDCPKSVGVIANEYMFCSKERWSFGKVH

SEQ ID NO: 54120 - protein, 134 aa, Zea mays
  Coding DNA Sequence Number=SeqID_12341
MTFAPHAEDPSVERQSATTNELASCNAESPFASPAPLFALAAMANGPEAVGGGCMWTRQTTYSFAPGVEWHVRRGEWAPSGNHEQDTLRSKQNLIAKIGFWLSNVPFLVFVKIAQIDINAESVESLQQKESIAS

SEQ ID NO: 54121 - protein, 156 aa, Zea mays
  Coding DNA Sequence Number=SeqID_12342
  Gene Ontology: Mol. function=oxidoreductase activity; Cellular component=nucleus; Biological process=metabolic process
  Homolog annotation: Hit_ID=Q91XI1; Match level="QueryCoverage=89%, HitCoverage=21%, E-value=5e-47, Identity=64%"; Hit description=tRNA -dihydrouridine synthase 3-like
MELANVGHRGIMGIGAYMTPWLFTEIKEQRHWDITSGERLNILKDFVRFGLEHWGSDFKGVSGSVFVGVETTRHFLLEWLSYTCRYIPVGLLDVIPQRLNWRPPSYYGRDDLETLMVSDSAADWIRISEMLLGKVPEGFTFAPKHKSNAYDRAENG

SEQ ID NO: 54122 - protein, 349 aa, Zea mays
  Coding DNA Sequence Number=SeqID_12343
  Gene Ontology: Mol. function=oxidoreductase activity; Cellular component=cytoplasm; Biological process=metabolic process
  Homolog annotation: Hit_ID=Q010A0; Match level="QueryCoverage=68%, HitCoverage=37%, E-value=1e-71, Identity=53%"; Hit description=[J] KOG2335 tRNA-dihydrouridine synthase
  Pfam annotation: Domain name=Dus; Domain location=113-349; Score =81.0; E_value=3.6e-21; Accession=PF01207.8; Description =Dihydrouridine synthase (Dus)
MEIDLYFGRKRVVVGDDGNKNKAEAVNDDNPDETCNLNGDDKTLLSSIPENVEPDPTLCKEIDNSGGEPLVVDSVESVEPRASKKSKVEVDETRDKRIKVLPLKIIDFREKLYLAPLTTVGNLPFRRLCKTLGADVTCGEMAMCTNLLQGQASEWALLRRHPSEDLFGVQICGPYPDTVARTVELVDNECSVDFIDINMGCPIDIVVNKGAGSSLLTKPMRIRSIVQAASTVTEKPLTVKVRTAFFEGRNRADSLVSDIYNWGASAITIHGRSRQQRYSKLADWDYIYQCAQKAPDYLHVIGNGDVFSFTDWNKHVSDCSKISTCMIARGALIKEGYFFDFSLQCEKCS

SEQ ID NO: 54123 - protein, 223 aa, Zea mays
  Coding DNA Sequence Number=SeqID_12344
  Gene Ontology: Mol. function=oxidoreductase activity; Biological process=metabolic process
  Homolog annotation: Hit_ID=Q6C4K3; Match level="QueryCoverage=53%, HitCoverage=20%, E-value=4e-14, Identity=31%"; Hit description =Similar to DEHA0D12364g Debaryomyces hansenii
  Pfam annotation: Domain name=zf-CCCH; Domain location=108-137; Score =15.7; E_value=0.011; Accession=PF00642.15; Description=Zinc finger C- x8-C-x5-C-x3-H type (and similar)
  Pfam annotation: Domain name=zf-CCCH; Domain location=147-175; Score =1.2; E_value=0.92; Accession=PF00642.15; Description=Zinc finger C -x8-C-x5-C-x3-H type (and similar)
  Pfam module annotation: Pfam domain module=zf-CCCH::zf-CCCH; Domain location=108-137::147-175
MAATTPATDPPDALLAVTADAPTPARPTPAELVARAVAPVKPAFLCPPPVREAPKEEGKAAGGGAVVKVEKKSKRQLKRERQQIHAQIFTTSKSIRYHVKYNLMEQKSTSHLCIEVGKSGNVDSCKYGTSCHFSHDINAYLSQKPADLEGTCPFTALGHLCPYGLTCRFLSTHKDNLAPQNHPEGNCERNPLSKEIQKLLWKSKYKFPKASAQIKLLGLKVYS

SEQ ID NO: 54124 - protein, 120 aa, Zea mays
  Coding DNA Sequence Number=SeqID_12345
MVAPEKSQIEMMKQRVEGQTFCSNKEINATTTSRVNKNSIGLDGMNLFGEMINLQLSNQEEGKQDLKHMLDDFPIEGNEEDWHGNILEQAELYHTEEYGEHEWEKALSKKGKKKIEGTFQ

SEQ ID NO: 54125 - protein, 176 aa, Zea mays
  Coding DNA Sequence Number=SeqID_12346
MTQEGAQSIEEEQRRHREGMCGRWGQWWQAKVVVGLNEGREGAQLDRSVGLSGIPGGPLTRNGYGCPGPTFSQVVKEGGMAWRTEPGGIVGSDPLRIGWKMMTYWIQSLAGRKTYEPSSREPQGNRLSRISKKLDIIVKEVLQVTRFLGGVVSGEGVGILCQPGVALGVPRFTISQ

SEQ ID NO: 54126 - protein, 58 aa, Zea mays
  Coding DNA Sequence Number=SeqID_12347
MARLLKQEGGLRRAGNGGALDPYVYMVADRSDEVNEALFIEIAMEMFIVRQLDMPSSI

SEQ ID NO: 54127 - protein, 88 aa, Zea mays
  Coding DNA Sequence Number=SeqID_12348
DPVVKESVGALYDRNVGPSRSRGGQGADRDGEGSATSTGRCVLTVGDLTRGPVGLFGDAPANSCILSESLSSGAPDTVRWYTGQSGEN

SEQ ID NO: 54128 - protein, 824 aa, Zea mays
  Coding DNA Sequence Number=SeqID_12349
  Gene Ontology: Mol. function=DNA topoisomerase (ATP-hydrolyzing) activity; Cellular component=chromosome; Biological process=DNA topological change
  Homolog annotation: Hit_ID=Q6Z3H8; Match level="QueryCoverage=79%, HitCoverage=65%, E-value=1e-170, Identity=57%"; Hit description =Putative bzip-related transcription factor
  Pfam annotation: Domain name=DUF632; Domain location=399-708; Score =382.5; E_value=6.5e-112; Accession=PF04782.3; Description=Protein of unknown function (DUF632)
  Pfam annotation: Domain name=Extensin_2; Domain location=8-300; Score= -138.0; E_value=0.065; Accession=PF04554.4; Description=Extensin-like region
  Pfam module annotation: Pfam domain module=DUF632::Extensin_2; Domain location=399-708::8-300
MASSSAAAAAPPVAKQVRIAPDDGHIQFSDGDSDSEDGHIKFHSDEEPDPARRRPEVVRSTGAPGPPPPQMGQPYASGGGYAPPPYGPGYGYGYATGPGPGPGPDYGGIGMNGGGGYEPGHGVMYGQSYGGSGSGGGYDDQGYGGMGSGGGAGGYDQSYAGIGGYGQSFFNISYARSQPPPPSVSHEQRLEATNARVHYYSGNGEQQPPPRGYGGGYSYPPQSSRSYNQYAYGGYYGGGSAPAPPADIPSSSGEPAAVPPPPSPPRVSTWEFLDPFGTYESYYEQPTATAAPYSPGRSLKDVREEEGIPDLEDEDMEVVKEAYGDEKHPVKGYMGNGKAAKGEGRSSTGDELPRKSKSSEASGSGSSLEHDVHVVEKSVVGEQVRHSEPRQHVAGLPPTGSEKLYIDDTEVVVEIRTQFERASQSAGEVSKMLEVGKMPYYQKGSGFKVSAMIVCGIPTMEEEFLRFEEDKAMGSGNLSSTLQKLYMWEKKLLEEVKTEETMRVLYDRKREELKMLDEKGAEAHKLEATEVYIRKLSTKISIAIQVVNTISEKISKLRDEELWPQTCELIQGLMRMWSVMLECHQIQLHAISQAKNIDSMIDTAKFGDAHMDLIKRLELQLLDWIACFVAWVSAQKNYVKTLNRWLTNGVIYVPEETEDGAPPFSPGRLGGPPIFVICNNWAASVDRISEKEVVEAMQAFASNVLNLWERHRSEQRQGLMANKGMDRDLRVMERDEQSMRKALEAQNKKLVLVSSQGSVSLSAQALHEQRGPGAEVGSLQSGLRNIFEAMENFTSASANTYRELHLRAEEEKARVAQESGGSVP

SEQ ID NO: 54129 - protein, 170 aa, Zea mays
  Coding DNA Sequence Number=SeqID_12350
  Gene Ontology: Mol. function=structural constituent of ribosome; Cellular component=intracellular; Biological process=translation
  Homolog annotation: Hit_ID=Q9SXL9; Match level="QueryCoverage=79%, HitCoverage=98%, E-value=5e-58, Identity=80%"; Hit description=Csf-1 protein
  Pfam annotation: Domain name=Ribosomal_L14e; Domain location=80-156; Score=133.7; E_value=4.9e-37; Accession=PF01929.7; Description =Ribosomal protein L14
MERCSPPHVTMPALNRTYKRPGYQKPLHRAATATARMPFKRFVEIGRVALVNYGEDYGRLVVIVDVVDQNRALVDAPDMVRCQVNFKRLSLTDIKIDIKRVPKKTALIKAMEEADVKTKWENSSWGKKLIVQKRRASLNDFDRFKVMLAKIKRGGAIRQELAKLKKASTA

SEQ ID NO: 54130 - protein, 508 aa, Zea mays
  Coding DNA Sequence Number=SeqID_12351
  Gene Ontology: Mol. function=binding; Cellular component=nuclear pore; Biological process=protein import into nucleus, docking
  Homolog annotation: Hit_ID=Q5VN12; Match level="QueryCoverage=96%, HitCoverage=48%, E-value=1e-166, Identity=58%"; Hit description =Putative Importin 9
MKLTVRGRWAHLQDFNFMEDSGLTKYNVRDLLEQMLIDIMGTGVHQYPFLHARAFSSVAKFSSLISKGVSEQYLCNAAHAIASDVPPPVKVGACRALAQLLPESNQNLIQPNIMGILSSLVDLLRQASDETLHLVLETLQSAIKSGGEQSTLIEPVISPIILDVWAQHIADPFISIDAVEVLEAIKNAPGCLQPLVSRILPTIGSILVKNAPVAVVKAVFDTCFVSTVQIVLESDDHGEMQNATECLAAFISGGRQELLVWGGEQGQTLKMLLDAASRLLDPALESSVSLFVGSFVLQLILQIPLHLSPHIPDLIAAIMRHYSDYLSFSKTCPQFTLPAGEIQGAYQIKVTTTALALLISTRHPELSKVEVQGHLIKIFSLLADTLTEIQEQIGAGDDDDSEEDNDWEEVQNGDASISDDIIHSASVPSMTNPSVEHLNAMAKVFDEDDDDSYDDDLTKNDPLNEVKLADFLTNIFANLWENNRPIFEYLCQGLSDSQRSAVEKVLRR

SEQ ID NO: 54131 - protein, 173 aa, Zea mays
  Coding DNA Sequence Number=SeqID_12352
MVLNESTRDYWSQLPPHRNQVGEVGVPESRRGEADNGCGGAQDIVEGGEGHKVLDEGLSVVITPTETTQKAEDECAVQEVERTTKSPSSKSAWRSGRPSPCRASQRGGATDLDLEALGYNREHTSTTIRHVTRGPRSSRGHDCMPLSYNKHTTLSDGTRQPWSGAISAPEPPQ

SEQ ID NO: 54132 - protein, 67 aa, Zea mays
  Coding DNA Sequence Number=SeqID_12353
  Subcellular localization annotation: CTP_CleavageSite=50; ConfidenceScore=5.20e-01
MTNGGWKDGSGRALIKWRGKGVQKTRPSNQIRNPGARLGRECAKSPAETMESLVQRQVFREPGGAGG

SEQ ID NO: 54133 - protein, 443 aa, Zea mays
  Coding DNA Sequence Number=SeqID_12354
  Gene Ontology: Mol. function=binding; Cellular component=nuclear pore; Biological process=protein import into nucleus, docking
  Homolog annotation: Hit_ID=Q5VN12; Match level="QueryCoverage=90%, HitCoverage=49%, E-value=1e-136, Identity=68%"; Hit description =Putative Importin 9
  Pfam annotation: Domain name=HEAT; Domain location=118-154; Score =10.9; E_value=2; Accession=PF02985.12; Description=HEAT repeat
  Pfam annotation: Domain name=HEAT; Domain location=81-115; Score=6.4; E_value=7; Accession=PF02985.12; Description=HEAT repeat
  Pfam module annotation: Pfam domain module=HEAT::HEAT; Domain location=118-154::81-115
MEAHGDQRWLVDCLTDTLDTARDVRAFAEESLRQASLLPGSPPPTFTPSLVDDWLERLAAGYVRQPDGLREGMEGNLLRRVGVVIRQLLLTSLDDSNGKIRTAISMAVAAIGQQDWPEDWPELLPVLLKLIGDQSNGNEVRGALRCLALLSDDLDDMCVPKLVPELFPSLYRIISSPHLYENSLRAKAFAIVHSCISMLGSMSGVYKRDTASLMTSVLDPLIEQFSIVLNYPVQSQNPDDWSMQMETYHLSYIQGAETLDSISYDSDGSEKSLESFEIQLFELWTTIVGNSRLAKVIGGNIKELAYYTIALQQITEEQVQNWSRDANQYVADEDDLTYSCRVSGSLLLEELVTAYEDYGIDSIVEASQMRFHESRELKEAGSADWWRLHEASLFALGSLSEQLCEAQVGRCGVEEGDEGSGMTYPLGGEAVEVWVAVFNASTQ

SEQ ID NO: 54134 - protein, 135 aa, Zea mays
  Coding DNA Sequence Number=SeqID_12355
  Subcellular localization annotation: CTP_CleavageSite=21; ConfidenceScore=5.23e-01
MGRVRVCDAGAKLTVANRTPRRSSRAGPETSSGRRGLCGVLWRARSGGRVEEGSCWSANGGGGEGRVGLRGSKWPRGGGGARVPTRATRGRGGTRGNNAQLSGGGYPEDDGADKAGAREQRERGKQGRARGRRLR

SEQ ID NO: 54135 - protein, 101 aa, Zea mays
  Coding DNA Sequence Number=SeqID_12356
METHRRSATNWRPSAPPPVLLRSTQSRDNGEHEGKFLTSDGVTGTPAHGAARVHGGVAPRRGIATSPTTNSARNYLVHHQSDLPKLLGPDLRSIRWLRGDD

SEQ ID NO: 54136 - protein, 149 aa, Zea mays
  Coding DNA Sequence Number=SeqID_12357
MSPPDSCYRFARRTVLRGINVAELHTILERSPRRNLSHTASTTEPPSFVVRALCGLITALLTAENNPPCGWVCGFGNGAAVLTIMTATARFAGRRRRWGVDLGISGFDLLTEENNPMCGWLCGFSNGAAVLTITAATVGVRGEKKASRR

SEQ ID NO: 54137 - protein, 120 aa, Zea mays
  Coding DNA Sequence Number=SeqID_12358
  Subcellular localization annotation: CTP_CleavageSite=42; ConfidenceScore=5.39e-01
MPFRSIRSPTAPAPSVKPAPAPPLITDGRLCQLHGLQPCALPSSAPTPPPSLAPVTFDRLCPTCPRPLPLSYASALPSPSRPNLARPRPDSVHVAATNLGVTVRLRVYDKGMCSCVVSAA

SEQ ID NO: 54138 - protein, 205 aa, Zea mays
  Coding DNA Sequence Number=SeqID_12359
MAPALRGYHHRERDTTMKVPTQSRRRLSHKQDSPHGSFLHYHSASSAQPSGGGRKKFRYGSTQLDGWNLEVEGACSARAARARAERTASGGAKLLAFSGCRALGGWADSALESRSGSVQAERTAGGGRRRGAARLLRCSGRRAIAGRADDGRRTVAAAQLGASGRADGGRQIEAQRRSGSPSRRCRLLVPSADGWTARALGASAG

SEQ ID NO: 54139 - protein, 65 aa, Zea mays
  Coding DNA Sequence Number=SeqID_12360
MAEDGNGPRKKGLSPGNVLNMKYTHHIYYIEYYFGCVINFKDFLNSQVKILGVTIAINVEESYPI

SEQ ID NO: 54140 - protein, 86 aa, Zea mays
  Coding DNA Sequence Number=SeqID_12361
  Subcellular localization annotation: CTP_CleavageSite=38; ConfidenceScore=5.15e-01
MGTQTGTGTPWGSRSRTSLPPAWAPQPAPETGTWARWRCAAGAGDTVMGRGGGGSKASIAGNRGAFGRDPRRGKGRGGGVRRGQAA

SEQ ID NO: 54141 - protein, 120 aa, Zea mays
  Coding DNA Sequence Number=SeqID_12362
  Gene Ontology: Mol. function=metal ion binding
  Homolog annotation: Hit_ID=Q6ZHB2; Match level="QueryCoverage=80%, HitCoverage=32%, E-value=7e-22, Identity=70%"; Hit description=S -ribonuclease binding protein SBP1-like
  Subcellular localization annotation: CTP_CleavageSite=59; ConfidenceScore=5.35e-01
MAEKLPVLLRYQSLHVHTYFKNSRPRRSPSRLPRSACARSWSVEELAATAGDAGLAESSASAFVDPRCVGPPPDHACLGCRLRPAIVVLLPCRHLSLCNGAMPCPVCLCVRTGSVEAILC

SEQ ID NO: 54142 - protein, 135 aa, Zea mays
  Coding DNA Sequence Number=SeqID_12363
MAWCGLVTDPLYRQRFAQTLAGFLCRVDGDGGTESSRLTRPNAMVPEQKETTRRFINVSGMAEPHPDAFLPFLSPPHGEGLHDVILDAHDGLVLLAHARGHEPPDLHLLLCSPAHLGAFSSSFRPIRLAPSRILG

SEQ ID NO: 54143 - protein, 286 aa, Zea mays
  Coding DNA Sequence Number=SeqID_12364
  Homolog annotation: Hit_ID=Q10SN6; Match level="QueryCoverage=14%, HitCoverage=11%, E-value=2e-11, Identity=80%"; Hit description =Hydrolase, alpha/beta fold family protein, expressed
MALRYGAGGTRERSCLRRCAFGNREWQREERGARSGVRLTDGKASTVPWRTVLPSRCAPAISLGAPSATILARLPPRFLQPRASSFNGADPPRSIRTASVNRLPPRFLQPRAPSTARIPHPRIPPADPTIKQRQRPSMASSLAQRRHAVVCRRGHPNRVRTARGVAAGPPRAARRTTMTTSFSSVAEIRPERGTDTHRPRHHRSLGLGVRLHALFLPQAIHPTRSDPSVHHVGDVDAAGVGRGGRDQGQRGDPSVGRGHAGLAGGVAVPERAASGARVCGTSGACP

SEQ ID NO: 54144 - protein, 393 aa, Zea mays
  Coding DNA Sequence Number=SeqID_12365
  Gene Ontology: Mol. function=metal ion binding
  Homolog annotation: Hit_ID=Q6K5E4; Match level="QueryCoverage=85%, HitCoverage=86%, E-value=3e-81, Identity=52%"; Hit description=RING -H2 zinc finger protein ATL6-like
  Pfam annotation: Domain name=PHD; Domain location=134-179; Score=0.5; E_value=0.05; Accession=PF00628.19; Description=PHD-finger
  Pfam annotation: Domain name=zf-C3HC4; Domain location=135-176; Score= 38.7; E_value=2e-08; Accession=PF00097.15; Description=Zinc finger, C3HC4 type (RING finger)
  Pfam module annotation: Pfam domain module=PHD::zf-C3HC4; Domain location=134-179::135-176
MDTTLLRSNGRLLPLFLLLLAAADFTAVQGQGGQQQQPGPAGGAYYSQSFSPSMAIVIVVLIAAFFFLGFFSIYVRHCYGDGSSGYSANRPPAPGGAAARSRRQRGLDEAVLESFPTMAYADVKAHKAGKGALECAVCLSEFDDDETLRLLPKCSHVFHPDCIDTWLASHVTCPVCRANLVPDANAPPPPPPADDDAPELLPPPPVSAPPAAAAAAVVIDVDETEEERIIREEANELVRIGSVKRALRSKSGRAPARFPRSHSTGHSLAASATTGTGAGAGASTERFTLRLPEHVLRDLAAAGKLQRTTSLVAFRSSRGGSTRRGVSVRTGGGEGSSRAGRSIRLGQSGRWPSFLSRTFSARLPAWGSRSTRRGVEADGSSKGGRAAGAGAAG

SEQ ID NO: 54145 - protein, 125 aa, Zea mays
  Coding DNA Sequence Number=SeqID_12366
MATESAAEIVCRLPEECVAHAISLTALGDACHSSTVSPAPFRAAADSDAAWARFLPPDHADDVLASAPALSIKWLMARPDASMHAFLECIHFPQQQGLAGADIRTVGKVPIDQRFNGLSRKKKLF

SEQ ID NO: 54146 - protein, 384 aa, Zea mays
  Coding DNA Sequence Number=SeqID_12367
  Gene Ontology: Mol. function=transcription regulator activity; Cellular component=nucleus; Biological process=regulation of transcription
  Homolog annotation: Hit_ID=Q6K4B1; Match level="QueryCoverage=56%, HitCoverage=63%, E-value=9e-70, Identity=67%"; Hit description=Helix- loop-helix DNA-binding protein-like
  Pfam annotation: Domain name=HLH; Domain location=171-222; Score =61.0; E_value=4e-15; Accession=PF00010.16; Description=Helix-loop -helix DNA-binding domain
MVADGAPREMAGAQRDGKTVRQGTVDAYDSSSLQAAAAAGGGFLRGETLKGMALEAVVLSQSQFQQGSRFGCGAMAAGGAWSDLLFSGTEGLFEMGGAAGRGWNAAASSPPQLLQELGDNGAAGSLPVASAGSASGGAGQDAPAMAAAAASGRRKRRRMRPVKNEEEVESQRMIHIAVERNRRKQMNEHLAALRSLMPPAHTQRGDQASIVGGAINFVKELEQLLQSLEARRRSPQCAAYAVDPDDAGPFADFLTFPQYSMCAVIAAPENTGHHREGGAVAEQEASGSKPSAVADVEATMVESHANLRVLSRRRPRQLLRLVLGLQGHRLTVLHLNMSSGAHMVLYSFSLKVEDDCQLTSVGEIAAAAHHIVEKINEEQNKAAA

SEQ ID NO: 54147 - protein, 72 aa, Zea mays
  Coding DNA Sequence Number=SeqID_12368
MAQQPDFGPTYRLVTSPEAGPEATVCTQEQGYPLLYTPILLKRRMSGHREITQVIMRQFIGFKLYRTHKGRV

SEQ ID NO: 54148 - protein, 167 aa, Zea mays
  Coding DNA Sequence Number=SeqID_12369
MGLWWGEWRRTEAVESSCRRGLTVRGSYMPSQIMYKNYVMHSQHIAQDNKKDVYFQYKNLANLTKASLPEHMILEPGASCVELRINEAIQNQFSFVVAHSNSTFTCITPAEEGADHLAEELPVVGEDLRLRTAPDKEGWGATDSAKSHISDDGLTTREEEGVVRSWS

SEQ ID NO: 54149 - protein, 129 aa, Zea mays
  Coding DNA Sequence Number=SeqID_12370
MSKWSYFGRQGDAVEGGEALWKACDGRGDAAGGWQSFGRRVVGGRALADGATGGGGFDGASGGVWWVATPRRMALRAATASALADVASTNECGCDFYMAVRAATMNSFGGAWSRGWAEKGRRSQAMVGR

SEQ ID NO: 54150 - protein, 278 aa, Zea mays
  Coding DNA Sequence Number=SeqID_12371
  Gene Ontology: Mol. function=nutrient reservoir activity; Cellular component=apoplast; Biological process=auxin mediated signaling pathway
  Homolog annotation: Hit_ID=O49002; Match level="QueryCoverage=77%, HitCoverage=93%, E-value=2e-99, Identity=85%"; Hit description =Germin-like protein 6
  Pfam annotation: Domain name=Cupin_1; Domain location=111-266; Score =170.1; E_value=5.5e-48; Accession=PF00190.13; Description=Cupin
  Pfam annotation: Domain name=Cupin_2; Domain location=147-228; Score =29.3; E_value=1.4e-05; Accession=PF07883.2; Description=Cupin domain
  Pfam module annotation: Pfam domain module=Cupin_1::Cupin_2; Domain location=111-266::147-228
MGGSIHRQDEGIPQRVRRAVCFTWARSPMQRNKEGRRAGEQFQKLRVFRRTQRFRLLETISKALVTSQAIASDPSPLQDFCVADKDSPVKVNGFVCKDPMAVNADDFFKAAKLDQPRDTTKSKVGSNVTLINVMQLPGLNTLGISLARIDYAPLGQNPPHTHPRATEILTVLEGTLYVGFVTSNQADRSNKLFAKVLNKGDVFVFPQGLIHFQFNPVHDKPAVALAALSSQNPGAITIANAVFGSKPPISDDVLAKAFQVQKGTIDWLQAQFWENNHY

SEQ ID NO: 54151 - protein, 511 aa, Zea mays
  Coding DNA Sequence Number=SeqID_12372
  Gene Ontology: Mol. function=nucleic acid binding; Cellular component= cytoplasm; Biological process=regulation of mRNA stability
  Homolog annotation: Hit_ID=Q2PEV8; Match level="QueryCoverage=62%, HitCoverage=72%, E-value=2e-98, Identity=60%"; Hit description =Putative DNA binding protein
  Pfam annotation: Domain name=Extensin_2; Domain location=1-250; Score= -130.5; E_value=0.033; Accession=PF04554.4; Description=Extensin-like region
  Pfam annotation: Domain name=RRM_1; Domain location=123-205; Score =22.2; E_value=0.0013; Accession=PF00076.12; Description=RNA recognition motif. (a.k.a. RRM, RBD, or
  Pfam annotation: Domain name=RRM_1; Domain location=224-296; Score =59.3; E_value=1.3e-14; Accession=PF00076.12; Description=RNA recognition motif. (a.k.a. RRM, RBD, or
  Pfam annotation: Domain name=RRM_1; Domain location=354-417; Score =56.9; E_value=6.6e-14; Accession=PF00076.12; Description=RNA recognition motif. (a.k.a. RRM, RBD, or
  Pfam module annotation: Pfam domain module=Extensin_2::RRM_1::RRM _1::RRM_1; Domain location=1-250::123-205::224-296::354-417
MMPQQQQPGMAPPPPQAAPGAPPHWGGIPPPMAPQHQYAPPPTHQAPPPPQMWGQAPPPPPPPQAAYGQAPPPPQAAYGQALPPPQAAYGQAPPPPQAAYYGAVPAPAAVAAAPVGPSEVRTLWIGDLQYWMDDNYIYGCFASTGEVLHANSLPMWQVQNVKLIRDKHTGQLQGYGFIEFISRAAAERVLQTYNGTMMPNVELPFRLNWASAGEKRDDTPDYTIFVGDLAADVTDYVLQETFRAHYPSVKGAKVVTDKLTMRTKGYGFVKFGDPNEQARAMTEMNGMLCSSRPMRIGPAANKKATVVQEKARLDFIEALGPVWRGAYGAAARHTCGGRFGRHTRGSRSVARFLLVVLTPNVTEDMLKQVFTPYGDVVHVKIPVGKRCGFVQYANRSSAEEALVILQGTLVGGQNVRLSWGRSPSNKQVQPQQDSNQWAGANAGYYGYGQGYEAYGYPQSQDPNMYNYGAGAYAGYPNYQQQPVAQQPPQQQFLATMVKWNIDLVSAGFLYL

SEQ ID NO: 54152 - protein, 43 aa, Zea mays
  Coding DNA Sequence Number=SeqID_12373
MANEVATIEAKTIITVWRGTLKMPNSQLVTPISIKLQRPDGYD

SEQ ID NO: 54153 - protein, 217 aa, Zea mays
  Coding DNA Sequence Number=SeqID_12374
  Gene Ontology: Mol. function=nutrient reservoir activity; Cellular component=apoplast; Biological process=auxin mediated signaling pathway
  Homolog annotation: Hit_ID=Q2QXJ1; Match level="QueryCoverage=99%, HitCoverage=99%, E-value=1e-93, Identity=74%"; Hit description =Germin-like protein subfamily 1 member 8, putative
  Pfam annotation: Domain name=Cupin_1; Domain location=62-205; Score =156.0; E_value=9.9e-44; Accession=PF00190.13; Description=Cupin
  Pfam annotation: Domain name=Cupin_2; Domain location=86-167; Score =30.9; E_value=4.5e-06; Accession=PF07883.2; Description=Cupin domain
  Pfam module annotation: Pfam domain module=Cupin_1::Cupin_2; Domain location=62-205::86-167
MAASTYFLLVAFLALVTSHAIASDPSPLQDFCVADKDSPVKVNGFVCKDPMAVNADDFFKAAKLDQPRDTTKSKLPGLNTLGISLARIDYEPLGQNPPHTHPRATEILTVLEGTLYVGFVTSNQADRSNKLFAKVLNKGDVFVFPQGLIHFQFNPAHDKPAVALAALSSQNPGAITIANAVFGSKPPISDDVLAKAFQVQKGTIDWLQAQFWENNHY

SEQ ID NO: 54154 - protein, 291 aa, Zea mays
  Coding DNA Sequence Number=SeqID_12375
  Gene Ontology: Mol. function=nutrient reservoir activity; Cellular component=apoplast; Biological process=auxin mediated signaling pathway
  Homolog annotation: Hit_ID=Q2QXJ1; Match level="QueryCoverage=68%, HitCoverage=87%, E-value=7e-87, Identity=80%"; Hit description =Germin-like protein subfamily 1 member 8, putative
  Pfam annotation: Domain name=Cupin_1; Domain location=103-257; Score =163.0; E_value=7.7e-46; Accession=PF00190.13; Description=Cupin
  Pfam annotation: Domain name=Cupin_2; Domain location=138-219; Score =30.0; E_value=8.6e-06; Accession=PF07883.2; Description=Cupin domain
  Pfam module annotation: Pfam domain module=Cupin_1::Cupin_2; Domain location=103-257::138-219
  Subcellular localization annotation: CTP_CleavageSite=58; ConfidenceScore=5.24e-01
MVSIGANAEHNLDQTNLATIKHVLVQAQTLPSTAKSKSQRSQGRDFAQSRVQLAALVTSQAIASDPSPLQDFCVADKYFPVKVNGFVCKDPMAVNADDFFKAAKLDQPRDTKNKVGSNVTLINAMQLPGLNTLGISLARIDYAPLGQNPPHTHPRATEILTVLEGKLYVGFVTSNQANNNNKLFTKVLNKGDVFVFPQGLIHFQFNPVHDKPAVAIAALSSQNPGVITIANAVFGSKPPISDDVLAKAFQAKTIEDFGDWMTKTAKTPRLCLPQCKKGPVYNPTHVVRPRP

SEQ ID NO: 54155 - protein, 145 aa, Zea mays
  Coding DNA Sequence Number=SeqID_12376
MGHCEFVAVDESLPRIRRAAWASSQPPQQPVRTSPIAPPWASNAVARVRFVNGGVDGGIDCDRRWCSPRIITVYFAYMFGVMLILPIQHLSVLLRLAVRLRGSEVHPVTWNLKSQASCALDHFFLPTHVLINHNDLHRLNFDGTQ

SEQ ID NO: 54156 - protein, 144 aa, Zea mays
  Coding DNA Sequence Number=SeqID_12377
MGIGLCCCGEEKLQGRGTSMAGNKGAQMASMVRGVVTRAPGTSRSRGRKMAGEELGADAPTALTTVEARAGGRAGHGDLLLSARAKERLSRRGSCRGGCREGEGDRERSGCSDDLMGRCWQLLARAEDTIFAPTNFVSSENRAK

SEQ ID NO: 54157 - protein, 131 aa, Zea mays
  Coding DNA Sequence Number=SeqID_12378
MGIGLCYCGEEKLQGRGTSMAGNKGAQMASMDEQEQREEDGRRGARSQCPDGVDDRGGASRGARRPWGPPAQRPSEGEAKPQGKLQGRVCGAMGEGGDPLLAVVLEKEKFHGRDGWEKKKGWRLVDLTGHR

SEQ ID NO: 54158 - protein, 89 aa, Zea mays
  Coding DNA Sequence Number=SeqID_12379
MAKISRCVPEAGMEFGEPTTAQSGLAAVMLIRRAISTARVTILEWRGYDHLPPGLKEPLGTILRQWSMEVEVPQRRHPPLFPVVVALGG

SEQ ID NO: 54159 - protein, 210 aa, Zea mays
  Coding DNA Sequence Number=SeqID_12380
  Gene Ontology: Mol. function=zinc ion binding
  Homolog annotation: Hit_ID=Q2QNJ3; Match level="QueryCoverage=96%, HitCoverage=43%, E-value=2e-64, Identity=86%"; Hit description =Phospholipase/Carboxylesterase family protein, expressed
MDATGQQEQHTGSAGGDLYGVLLYYKYAEVPDAAALAAFYEAHCRSLALVGRVRVGPDGVNATLGGQMNALEKHIAEMSSNDLFVGTDFKLASCDDPVDERVARECGFTSLSVRVVKELVTLCCNPALAPPEISSAGRHLSAAEFHSVLQNVGTAQEVYAVKWHQLIFAQKVKDLRTFFSYMEAFSGIWSNSQMVAILKERILYLTTGFY

SEQ ID NO: 54160 - protein, 125 aa, Zea mays
  Coding DNA Sequence Number=SeqID_12381
MAPKRANSKATVCIDDAAKAALLAVKKGKAPIADDIPQEAFDEDAVNSKRQRQDNQPTPEGTARTCSSVGAPQAASLGFIHPEGEDTVEDGEIIGISAEDQLKLRALCIKNIHLQKQKEILAAKC

SEQ ID NO: 54161 - protein, 107 aa, Zea mays
  Coding DNA Sequence Number=SeqID_12382
  Subcellular localization annotation: CTP_CleavageSite=24; ConfidenceScore=5.20e-01
MAMPPPVAPAAAARPPSPPRMTKTTMMGSSGAAQELSVDDYMVESVTMFDTQTGLPCAGVEAGHLKVVPSTVAAGLVGATKGDAVKGGTWTLEDPWSRFCAATGGGG

SEQ ID NO: 54162 - protein, 187 aa, Zea mays
  Coding DNA Sequence Number=SeqID_12383
MEKEKEDLDRRLVDEKEDAEKAREEAQATRAEAQAAWRMWGLRFLGWLQDKLESLPSIVMGLMSYASLVTCEGAINALSREGCRHFEVFDRANEDFVRGVFQIEDGMLKHSIGALYDRMWGPHGRCIVRERADRALAHVMNKEGMEDLAGLECSVSQRSASVEAGAEEQTTLLGDADEGLAAADTSA

SEQ ID NO: 54163 - protein, 101 aa, Zea mays
  Coding DNA Sequence Number=SeqID_12384
MRHEEWHHVMLYHLTNLDESRQQEDHHTGEEDHRAIAIETKLPCRGGGPSLNCGSSSRMLEQTLALVEAREKDCRFGRTTRLEQIATLIDMEKVLEATAMA

SEQ ID NO: 54164 - protein, 93 aa, Zea mays
  Coding DNA Sequence Number=SeqID_12385
MRLAAWWRSYVRGAGAGVGQMRISARRGASEDFGDDGGYNTVGMSPGRLAQRERFLGSEMRRAGRGHENDPELKDTLAELEVVHKIIDEAIDE

SEQ ID NO: 54165 - protein, 750 aa, Zea mays
  Coding DNA Sequence Number=SeqID_12386
  Gene Ontology: Mol. function=nucleic acid binding; Cellular component= intracellular; Biological process=DNA integration
  Homolog annotation: Hit_ID=Q8W0X4; Match level="QueryCoverage=99%, HitCoverage=48%, E-value=0.0, Identity=91%"; Hit description =Putative pol protein
  Pfam annotation: Domain name=RVT_2; Domain location=362-617; Score =520.6; E_value=1.8e-153; Accession=PF07727.4; Description=Reverse transcriptase (RNA-dependent
  Pfam annotation: Domain name=rve; Domain location=5-149; Score=104.6; E_value=2.9e-28; Accession=PF00665.16; Description=Integrase core domain
  Pfam module annotation: Pfam domain module=RVT_2::rve; Domain location=362-617::5-149
MTGEKRMFSSYVKNKDPQDSIIFGDGNQGKDKSETQGTLKRFLRRAQNEFELKVKKIRSDNGSEFKNLQVEEFLEEEGIKHEFSALYTPQQNGVVERKNRTLIDMARTMLGEFKTPEGFWSEAVNTACHAINRVYLHRLLKKTSYELLTGNKPNVSYFRVFGSKCYILVKKGRTSKFAPKAVEGFLLGYDSNTKAYRVFNKSSGLVEVSSDVVFDETNGSPREQVVDLDDVDEEDVPTAAIRTMAIGDMRPQEQLEQDQPSSSTMVHPPTQDDEQVPQVEAHDQGGAQDDQVEEEEAPQAPPTQVRATIQRNHPVDQILGDISKGVTTRSRLVNFCEHYSFVSSIEPFRVEEALLDPDWVLAMQEELNNFKRNEVWTLVPRPKQNVVGTKWVFRNKQDEHGVVTRNKARLVAKGYAQVAGLDFEETFAPVARLESIRILLAYAAYHSFRLYQMDVKSAFLNGPIKEEVYVEQPPGFEDERYPDHVCKLSKALYGLKQAPIAWYECLRDFLIANAFKVGKADPTLFTKTCDGDLFVCQIYVDDIIFGSTNQKSCEEFSRVMTQKLVMSMMGELNYFLGFQVKQLKDGTFISQTKYTQDLLKRFGMKDAKPAKTPMGTDGHTDLNKGVATPCFRICYPKGSNFDLIGYSDSDYAGCKVDRKSTSGTCQFLGRSLVSWNSKKQTSIALSTAEAEYVAAGQCCAQLLWMRQTLRDFGYNLSKVPLLCDNESAIRIAENPVEHSRTKHIDIRITF

SEQ ID NO: 54166 - protein, 230 aa, Zea mays
  Coding DNA Sequence Number=SeqID_12387
MDKMGYPKLECDLSAMLKDQLVDCLAYNNLKGKRRLNRVFDAIRFVYPNYSFLVQGKGKERKSALKPPLAVMKQKRLKVLAKRPKSYSEDRAMVLSALMTSIEDVFTQTAPTVGPKEEKKDEEEINKVLIQDEVPLASLQLEAQPKVEAQPKPKAAPGKIIEPRLGTPVVESVKAELEVVVSPKINLDLNKASQIVEVQDYVEDLKYPSSSLVYGGNDEDDYLHCLPDYR

SEQ ID NO: 54167 - protein, 196 aa, Zea mays
  Coding DNA Sequence Number=SeqID_12388
  Subcellular localization annotation: CTP_CleavageSite=35; ConfidenceScore=5.21e-01
MTASKKGSGKEVFRKNPSQQRKQAPSPPTDQGRPRACRVRDNPGYVRYMAKAWATLPREIRLARPQPRPREGSSPRPTQASASALASGGGLRLARPRPRPQLRPREEISASPDPGLGLSSSLGRRSPPRPTPGSASGEVTASLEMASNRLRNDDPRHALMTSTIPKLSTKSKERQQDQGLYRQPRFYRAQALLHRP

SEQ ID NO: 54168 - protein, 63 aa, Zea mays
  Coding DNA Sequence Number=SeqID_12389
MAILIHQSFPPFLKKWKRDWTHGRRWDMMLKPKDQKLEKMLDTLKNWLQKSGNGVGKISEEMI

SEQ ID NO: 54169 - protein, 196 aa, Zea mays
  Coding DNA Sequence Number=SeqID_12390
  Gene Ontology: Mol. function=protein binding; Cellular component =mitochondrion; Biological process=ubiquinone biosynthetic process
  Homolog annotation: Hit_ID=Q4SK89; Match level="QueryCoverage=87%, HitCoverage=48%, E-value=9e-16, Identity=33%"; Hit description =Chromosome 13 SCAF14566, whole genome shotgun sequence
  Pfam annotation: Domain name=COQ9; Domain location=84-166; Score =39.3; E_value=1.4e-09; Accession=PF08511.1; Description=COQ9
MPISLFSSALDILCSQPCHQPDLMGFFMDDCLQQLMDRIDAGEGEQLKNLILSERLSKLVRMRLEMQAPYISKWPQALSIQSQPANVSTSLKQRAILVDEIWHAAGDSGAWWYLLNLRGVYVDRQFSSVHMLMYCSYLWHMAEFRDTWTFVNRRIKDALDLQKTFQEAAYLAEAVGAGMSGTVQGVLNRVFQNRSG

SEQ ID NO: 54170 - protein, 44 aa, Zea mays
  Coding DNA Sequence Number=SeqID_12391
MKMRAEGNGPACRLFNEAKKDYTGADSKFEEADGSNGSCREHCA

SEQ ID NO: 54171 - protein, 105 aa, Zea mays
  Coding DNA Sequence Number=SeqID_12392
  Gene Ontology: Mol. function=structural constituent of ribosome; Cellular component=ribonucleoprotein complex; Biological process =translation
  Homolog annotation: Hit_ID=P25873; Match level="QueryCoverage=66%, HitCoverage=25%, E-value=2e-21, Identity=71%"; Hit description=50S ribosomal protein L15, chloroplast precursor
  Pfam annotation: Domain name=L15; Domain location=33-64; Score=21.1; E_value=0.0041; Accession=PF00256.13; Description=Ribosomal protein L15
GSHQLSFETPHSSLEPRARNQFQVQLALGVVPLILGDGELNVKLNLKARAFSTSSKEKLKAVSCSLTVLPGRKKWAKPSVAKNLAQAEEYFAKKRAASSSDYTSA

SEQ ID NO: 54172 - protein, 48 aa, Zea mays
  Coding DNA Sequence Number=SeqID_12393
  Homolog annotation: Hit_ID=O04716; Match level="QueryCoverage=79%, HitCoverage=2%, E-value=3e-11, Identity=76%"; Hit description=DNA mismatch repair protein MSH6-1
MACQVGNGVEGAEEVTFLYKFTLGACPKSYGVNVARIAGKGFLTQYYE

SEQ ID NO: 54173 - protein, 141 aa, Zea mays
  Coding DNA Sequence Number=SeqID_12394
  Gene Ontology: Cellular component=vacuole; Biological process =response to biotic stimulus
  Homolog annotation: Hit_ID=Q9SSK9; Match level="QueryCoverage=95%, HitCoverage=93%, E-value=9e-38, Identity=52%"; Hit description=MLP -like protein 28
  Pfam annotation: Domain name=Bet_v_I; Domain location=5-140; Score =190.7; E_value=3.4e-54; Accession=PF00407.9; Description =Pathogenesis-related protein Bet v I family
MASSTLTGKLEADVDIKASPEQFHEMFAHKPHHVHHTCYDKIQGCDLHEDGKAKKAKEVVEAVDPDKNLITFRVIEGDLMEEYKSFVATILVSPKSEDSGSVVHWTLEYEKLHDGIADPETLLQLVQDISKDIDAHLIQAN

SEQ ID NO: 54174 - protein, 116 aa, Zea mays
  Coding DNA Sequence Number=SeqID_12395
  Gene Ontology: Cellular component=vacuole; Biological process =response to biotic stimulus
  Homolog annotation: Hit_ID=Q9AXU0; Match level="QueryCoverage=98%, HitCoverage=83%, E-value=2e-29, Identity=48%"; Hit description=Major latex-like protein
  Pfam annotation: Domain name=Bet_v_I; Domain location=1-115; Score =125.7; E_value=1.3e-34; Accession=PF00407.9; Description =Pathogenesis-related protein Bet v I family
MFAHKPHHVHHTCYDKIQGCDLHEDGKAKKAKEVVEAVDPDKNLITFRVIEGDLMEEYKSFVATILVSPKSEDSGSVVHWTLEYEKLHDGIADPETLLQLVQDISKDIDAHLIQAN

SEQ ID NO: 54175 - protein, 76 aa, Zea mays
  Coding DNA Sequence Number=SeqID_12396
MVEVISECELRPANEAHEGGFIPPVGDNNPHRSPRGFRLAFRGKLLARSAILTETTPPDRRVPRAEGKLHTRRYSD

SEQ ID NO: 54176 - protein, 101 aa, Zea mays
  Coding DNA Sequence Number=SeqID_12397
  Gene Ontology: Mol. function=metal ion binding; Cellular component =nucleus; Biological process=regulation of transcription, DNA -dependent
  Homolog annotation: Hit_ID=Q8LHP0; Match level="QueryCoverage=66%, HitCoverage=76%, E-value=2e-18, Identity=54%"; Hit description =Transcription elongation factor 1 homolog
  Pfam annotation: Domain name=Elf1; Domain location=7-68; Score=77.2; E_value=5.1e-20; Accession=PF05129.4; Description=Transcription elongation factor Elf1 like
MGKRKSRKAPPSKKVAQKVATAFDCPFCGHSGSVECSIDLKDRVAKAECGVCMAVYATIANALTEPVDVYSEWIDECEKANEGVDAEESRQRGRRRRRRLT

SEQ ID NO: 54177 - protein, 79 aa, Zea mays
  Coding DNA Sequence Number=SeqID_12398
MELFPIKPMAGALVEVGSRSVTGAGRSVHDVTALWATSMGLSGCKDIGVDHANFDLIFSAFSVLDDEAVMRKQLHEARE

SEQ ID NO: 54178 - protein, 90 aa, Zea mays
  Coding DNA Sequence Number=SeqID_12399
MTLPYRDEIQMRFEGEEALEQREAIFWCNSNYFLNCITSRLCILSRFDVAGTQMSLLVLDSRQDGCGFLQSSAEQPLGLTLLGSSRSSIL

SEQ ID NO: 54179 - protein, 45 aa, Zea mays
  Coding DNA Sequence Number=SeqID_12400
MGRRETEHEGGKKQAKGKPVAFVLPCAQVGRKERAQVYNGGVAVC

SEQ ID NO: 54180 - protein, 39 aa, Zea mays
  Coding DNA Sequence Number=SeqID_12401
MAGEQRVAEVSLTPSSDVLETRVEVFASTVGTTASQAKA

SEQ ID NO: 54181 - protein, 67 aa, Zea mays
  Coding DNA Sequence Number=SeqID_12402
MARRWPGAAVADLCGCTGNGGVLQHVEIHVASGPQFPTVQGGSSFIKNTISEKIRVLVNMSLYSSMD

SEQ ID NO: 54182 - protein, 71 aa, Zea mays
  Coding DNA Sequence Number=SeqID_12403
MFDTLDFLATATGDLRLNTLDRKRSLKRRVAALKCRLNWRTNTSDGSLAIHPSGYHRTQQEELDALIRKLD

SEQ ID NO: 54183 - protein, 172 aa, Zea mays
  Coding DNA Sequence Number=SeqID_12404
MARLPSLVLVRQLRRHFKAATRLFKLRFLCIDPSGACELCARGDAYVEGVEAKITGGGGEEVEGVEHDVAPQHEENEGSFPFIVQGLDSTMGTCILLGRARLVAHGQHGSSGAVRRVMRSHTPIMTYYHVRTSYRFLLSVFHSHPHGSARRVPQAYTWYVVSTTHYPVFRSL

SEQ ID NO: 54184 - protein, 96 aa, Zea mays
  Coding DNA Sequence Number=SeqID_12405
  Gene Ontology: Mol. function=polygalacturonase activity; Biological process=carbohydrate metabolic process
  Homolog annotation: Hit_ID=Q69P92; Match level="QueryCoverage=69%, HitCoverage=13%, E-value=2e-20, Identity=68%"; Hit description =Putative polygalacturonase
MPKHAVASLGQWAAFPPVYDLREFGAVGDGRTVNTAAFESTIATIAVRGGGRLTVPAGRWLTTPSNLIVPAGRAGARCTRMTRKMMILIAANNAYK

SEQ ID NO: 54185 - protein, 73 aa, Zea mays
  Coding DNA Sequence Number=SeqID_12406
MVKDLLTKTWVVEGIGSIMLQGLFLSKALRNKRNVEDEAAQKEIMKLRSQVFGLGFDCDEKEKKFQDSRKGLY

SEQ ID NO: 54186 - protein, 136 aa, Zea mays
  Coding DNA Sequence Number=SeqID_12407
MDDLVHPVGNIEKALFSIDALGPNEGNHLVRALTEANSSFVKVVVVGGIYSLQPPKKPLGRLLSMGALDSPSRPLHADSCCPLTHWIVQWHTGQSSELKRSAPQFSREWLVRLRADMVHRTLSGGKPDSPVTVCAK

SEQ ID NO: 54187 - protein, 101 aa, Zea mays
  Coding DNA Sequence Number=SeqID_12408
MAAFVALCEGYLGMSPCFLPLVLHFLDRVALQAVPLEALKAWYGASRRIRIKGQSGSLLQCQFSMIVGHAGGCDRELPLPGVAPLMARRLPLFRMTVEALD

SEQ ID NO: 54188 - protein, 37 aa, Zea mays
  Coding DNA Sequence Number=SeqID_12409
MDIYSAGFAQSWATRVARPRLELDSERNFGPQRRSDI

SEQ ID NO: 54189 - protein, 38 aa, Zea mays
  Coding DNA Sequence Number=SeqID_12410
MAACVRQVGTKTGHLVIDSPSVVWVVAKLFRRFEESKR

SEQ ID NO: 54190 - protein, 370 aa, Zea mays
  Coding DNA Sequence Number=SeqID_12411
  Homolog annotation: Hit_ID=Q6YSY6; Match level="QueryCoverage=45%, HitCoverage=45%, E-value=2e-11, Identity=27%"; Hit description=Mucin- like protein
  Pfam annotation: Domain name=PMEI; Domain location=201-347; Score =22.1; E_value=0.00022; Accession=PF04043.6; Description=Plant invertasepectin methylesterase inhibitor
MKLSDANLTLEKKYVHLNRLQAKMEAFLRTKDDESASHSTVLRGARLISVVVAATSSSPVEVDAEPLLPTAAAERERERDDDGRTVRLDKSFGSGCVRGTSRRWRGLLGGSIVHAQPSRYIRMPACQPCILATIASYSYFFSPLPPARSPGVASVSDPIHRASISTAMEARAAMSWYCGSLLAVAIALFLSVSLGVRAAGAGAGVDIKVSCAATPDPDVCLRALQADSDSKTPRDLAEAALRAATTAGGAAGDYARHEMDVVKDNDMWQCLNECAGEIEEALDHLDDTEGGLDDGKLHDVKLFLDTAEEDTWSCDVCCKHAPSTPVKTTLLAKNKDFEALMRVAHALIKRATGGAGDAPAPAPAARAKIH

SEQ ID NO: 54191 - protein, 469 aa, Zea mays
  Coding DNA Sequence Number=SeqID_12412
  Gene Ontology: Mol. function=pepsin A activity; Cellular component =cellulose and pectin-containing cell wall; Biological process =proteolysis
  Homolog annotation: Hit_ID=Q5Z4D1; Match level="QueryCoverage=87%, HitCoverage=81%, E-value=1e-120, Identity=54%"; Hit description =Putative nucleoid DNA-binding protein cnd41
  Pfam annotation: Domain name=Asp; Domain location=128-467; Score= -74.4; E_value=3.2e-09; Accession=PF00026.14; Description=Eukaryotic aspartyl protease
  Subcellular localization annotation: CTP_CleavageSite=83; ConfidenceScore=5.14e-01
MASALQLSLLVLCSYGCTIALAVATGHQERKFTVVPTAFLQSSSEEASCSTPRGTPHANRVSVPLAHRNGPCSPVRGKGELPRAEMLRRDRERTEYIIRRASRSRRLQDNNDAVSVPTQLGSSYDSQEYVATVGLGTPAVPQTLILDTGSSLTWVQCKPCNSSQCYPQRLPLFDPNTSSSYSPVPCDSQECRALAAGIDGDGCTSDGDWGCAYEIHYGSGATPAGEYSTDALTLGPGAIVKRFHFGCGHHQQRGKFDMADGVLGLGRLPQSLAWQASARRGGGVFSHCLPPTGVSTGFLALGAPHDTSAFVFTPLLTMDDQPWFYQLMPTAISVAGQLLDIPPAVFREGVITDSGTVLSALQETAYTALRTAFRSAMAEYPLAPPVGHLDTCFNFTGYDNVTVPTVSLTFRGGATVHLDASSGVLMDGCLAFWSSGDEYTGLIGSVSQRTIEVLYDMPGRKVGFRTGAC

SEQ ID NO: 54192 - protein, 115 aa, Zea mays
  Coding DNA Sequence Number=SeqID_12413
MADLARRRHGGSCEVRAWRWGLGGWCGCAEGKTDAGRGHGRAEEVMEAYKKKGWALTNPLPNLPGQRMEECRMLFQILFLGPSNLFELNASFCSNVAKMIASPIVSTTASNKVRM

SEQ ID NO: 54193 - protein, 232 aa, Zea mays
  Coding DNA Sequence Number=SeqID_12414
  Gene Ontology: Mol. function=protein binding; Cellular component =spliceosome; Biological process=mRNA processing
  Homolog annotation: Hit_ID=UPI0000DA43ED; Match level="QueryCoverage =82%, HitCoverage=98%, E-value=1e-14, Identity=31%"; Hit description =PREDICTED: similar to keratinocytes proline-rich protein
  Subcellular localization annotation: CTP_CleavageSite=52; ConfidenceScore=5.22e-01
MVPPVTWSVRALGWAKWRLLQGRGRVCLPRPRSSPSPWVERGGDRRLRPGLSPSPGVGRSGVCRLPGLSPSPSPGGRAKRSSSSSGAEPESEPRGRAKRSSSSSGAEPKSEPWGRAKRSSSSSGAEPESEPWGQAKRSSSSSGAEPESEPWGRAKRSSSSSGAEPESEPWDRAKRNFLWRQGSGLAAVSLTLSCGTAVGAAQAALSSCQAGQWSGEVTMVTSALSTGGRASG

SEQ ID NO: 54194 - protein, 89 aa, Zea mays
  Coding DNA Sequence Number=SeqID_12415
  Subcellular localization annotation: CTP_CleavageSite=25; ConfidenceScore=5.00e-01
MDLLTPASSAAAGSCAPSPGRCRVRGKSLDVGLETSGLDRICAYRFTRVDLERWQLIGRSWRLRVMACCAPSDLDLRSHAAYRFALVRI

SEQ ID NO: 54195 - protein, 218 aa, Zea mays
  Coding DNA Sequence Number=SeqID_12416
  Homolog annotation: Hit_ID=Q6ZT46; Match level="QueryCoverage=80%, HitCoverage=76%, E-value=6e-11, Identity=37%"; Hit description=CDNA FLJ44967 fis, clone BRAWH2016514
MRLTDSLLHWLRDWAIAQLATSPVRGLGYHSPCRLAVSPSRGLGHCLPSCFTGSGAGLSLASPSHYFVASGAVPPCALLTRCSTSSGARSSLTLPRHYFVASGAASSCASLTRCFIGSWTGPLLASLTHFFIGSRAAPPCAPLTRCFTGSGAAPPCAPLTRCFVGSRPRPLPASSTHCFTGSRARPSSASPTRCFVDSGRLHHRLISLTTAAHLTKTT

SEQ ID NO: 54196 - protein, 121 aa, Zea mays
  Coding DNA Sequence Number=SeqID_12417
MQEQMAQQNEILRQLVQRQPQPQHFGGGYHADKDEKKRDRFWRGLSTKLRECLNTVRANNYNVLVNLAISQEDCIMAHRAEKKRKAPMAGPSTQPQRFRILSNIQSRGPQQQHGQWVISPP

SEQ ID NO: 54197 - protein, 167 aa, Zea mays
  Coding DNA Sequence Number=SeqID_12418
  Gene Ontology: Mol. function=binding; Cellular component =intracellular; Biological process=metabolic process
  Homolog annotation: Hit_ID=Q10S36; Match level="QueryCoverage=87%, HitCoverage=25%, E-value=9e-47, Identity=53%"; Hit description =Pentatricopeptide, putative, expressed
MGLRNYVLMALSGRALNQSFLLTASRNNSDIDKAEYAAERIFQLEHNNTGCYVVLSSMYADAGRGEDVGRIRSPIKEKGLRKTEARSLVDLNAVLPDKHCVRLAASFGLISSEARTTVLVQKNVCLCNQSHHAQKLISKYLRQTIVVGDTKIYRIFSDGSGCCGDYW

SEQ ID NO: 54198 - protein, 85 aa, Zea mays
  Coding DNA Sequence Number=SeqID_12419
MEMAAALAQLSSREGGRDGRGRGEELGSSVWSFYRRPGWGRGREMACPGELATTEMVAHSGDDRMVRADRATGWLGQTQGAKLSW

SEQ ID NO: 54199 - protein, 81 aa, Zea mays
  Coding DNA Sequence Number=SeqID_12420
MVHSRSCAQGKLRRDSREGNRLKDEKTTWALSDFHKSLTNVMDINDLPDDIRVAQEKKLEELKRQQELQNQLVVQRSTVER

SEQ ID NO: 54200 - protein, 74 aa, Zea mays
  Coding DNA Sequence Number=SeqID_12421
  Subcellular localization annotation: CTP_CleavageSite=24; ConfidenceScore=5.08e-01
MVHGGYPRRDAAVRRPKSSSSAVVADRKRKWTAAAKNTSLKNQIRSTERFLHKGARGKLMLQLRPLFVAFRSVA

SEQ ID NO: 54201 - protein, 354 aa, Zea mays
  Coding DNA Sequence Number=SeqID_12422
  Gene Ontology: Mol. function=triose-phosphate isomerase activity; Cellular component=chloroplast; Biological process=tryptophan metabolic process
  Homolog annotation: Hit_ID=Q9FQ77; Match level="QueryCoverage=99%, HitCoverage=100%, E-value=1e-147, Identity=80%"; Hit description =Indole-3-glycerol phosphate lyase
  Pfam annotation: Domain name=PcrB; Domain location=130-344; Score= -117.1; E_value=0.054; Accession=PF01884.7; Description=PcrB family
  Pfam annotation: Domain name=Trp_syntA; Domain location=99-352; Score= 420.2; E_value=2.9e-123; Accession=PF00290.11; Description=Tryptophan synthase alpha chain
  Pfam module annotation: Pfam domain module=PcrB::Trp_syntA; Domain location=130-344::99-352
  Subcellular localization annotation: CTP_CleavageSite=47; ConfidenceScore=5.83e-01
MASAIKAASTSSQWSSSPAAVHSSPLSKRLPAAVAMPGRRRSVATVRAVAAVAPGAPAKLTAGAGGRCLPVSQTMSRLRRRARHSHVRVLTWNSVVSWFSQTAFIPYITAGDPDLATTAEALRLLDACGADVIELGVPFSDPYADGPVIQASAARALASGTTPDGVLAMLKEVTPELSCPVVLFSYFNPIVRWGLADFAAAVKEAGVHGLIVPDLPYGNSCALTLRTEAIKNSLELVLLTTPSTPADRMGEITRASRGFVYLATVNGVTGPRANVNTRVQSLIQEVKQVTDIPVAVGFGISKPEHVKQIAEWGADGVIIGSAMVRQLGEAASPKEGLKRLEKYARSMKNALPCQ

SEQ ID NO: 54202 - protein, 118 aa, Zea mays
  Coding DNA Sequence Number=SeqID_12423
MRANGEIQRGEKAKAVQEGRLANTIIRSYLTFSRGNLADGVATKPPLIDKIDQRHDLGAVGAPDMSGAHRTVRCPILTVGSATCRAPIARPTVGPADRLARSNRWLTGQSGCTPDSPV

SEQ ID NO: 54203 - protein, 91 aa, Zea mays
  Coding DNA Sequence Number=SeqID_12424
MEPSKIACVAAIDRDSSWTTVATDSSVRVGVGVVEDGGEMVVIGPEMVEADDSYSYPRSPSCYIGHLVAVKNELGERDDETRDHDVENSGG

SEQ ID NO: 54204 - protein, 83 aa, Zea mays
  Coding DNA Sequence Number=SeqID_12425
MAVATAAPPWASLGPDSACGRSSSSGLLEDELFDNGWGSVVDAFMAMHYKHQLRSGGAQLAPSSAQPTPGEAQEVADIDKDIE

SEQ ID NO: 54205 - protein, 286 aa, Zea mays
  Coding DNA Sequence Number=SeqID_12426
  Gene Ontology: Biological process=lipid metabolic process
  Homolog annotation: Hit_ID=Q6ASS6; Match level="QueryCoverage=91%, HitCoverage=60%, E-value=1e-23, Identity=42%"; Hit description =Patatin-like phospholipase domain containing protein
  Pfam annotation: Domain name=Patatin; Domain location=43-285; Score= -17.0; E_value=0.00028; Accession=PF01734.12; Description=Patatin -like phospholipase
MCVDKLSHQLFSLLETRLLGGWCPSVPGTPARALLDGGRVRVLAIDGCGAGAEDALLAAAALARLEARLRDRTGDPDARVADFFDVAAGAGAGGVLAAMLLLRGADGRPRYSAQEALAFVAGSVGTKRLVRPARAVGEALPPRFTRRRPHAPPRVRGRHAEGHRRAAARAVLRPRHGRAPFVFSRADARRERHLETSALGDRSAARPLCPGGGAVRANPSSGGRLHRRRPPASGGRAAHVQPGPGPQPPTRSTPTGSSPSPPGVDDLLVLSHRRRRLRPPTVRARR

SEQ ID NO: 54206 - protein, 199 aa, Zea mays
  Coding DNA Sequence Number=SeqID_12427
  Subcellular localization annotation: CTP_CleavageSite=66; ConfidenceScore=5.31e-01
MAKLLTKILANRLPPMLMQMISKNQSAFMKGRGIHDNFQRGAGLFFFFFFFPPRTVIIATRVLLTAAGANQQECRRLDSVRPHLEWRRHRVVVRDRVLAMERRYDPTSINHELVLMGQIPDDVDDMHDVLEDLFSSTARTPTINLDDNNVAAAEGEATLDGSAPATASTTASTNRKRKCTSDVWEDMDKFFATENGVMV

SEQ ID NO: 54207 - protein, 429 aa, Zea mays
  Coding DNA Sequence Number=SeqID_12428
  Gene Ontology: Biological process=lipid metabolic process
  Homolog annotation: Hit_ID=Q6ASS6; Match level="QueryCoverage=99%, HitCoverage=100%, E-value=1e-100, Identity=53%"; Hit description =Patatin-like phospholipase domain containing protein
  Pfam annotation: Domain name=Patatin; Domain location=46-246; Score =55.1; E_value=2.4e-13; Accession=PF01734.12; Description=Patatin -like phospholipase
MASPPTKGMGVDKLSYEIFSLLERTFLLGPGTPPRALLDGGRVRVLAIDGCGAGAEDALLAAAALARLEAGLRDRTGDPDARVADFFDLAAGAGAGGVLAAMLFLRGADGRPRYTANEALAFVAGSIGGKGWGGRRRGPWAKLFRGAARGGDRSFFRSAFGDATLRDTVAPLLVPCHDLATAAPFVFSRADAVESDSFDFRLRDVCAATCAAGGALASVRSVDGATAIAAASGGVAAMGNPAAAAITHVLHNKQEFPLATGVQDLLVLSIGAGASATVCDGSSTPMPARSPSPRELARVTAEGVADMVDESVAMAFGDACGCKYVRIQARKAPAPLHAAAGAMLAQRSVESVLFRGRRLSERTNAEKVDALAAELVKEQERRRHSPLPNVAIKQVATPRLSSATTTSSGTATARTASTMPSPASWDSRR

SEQ ID NO: 54208 - protein, 200 aa, Zea mays
  Coding DNA Sequence Number=SeqID_12429
  Gene Ontology: Mol. function=protein binding; Cellular component =nucleus; Biological process=regulation of transcription, DNA -dependent
  Homolog annotation: Hit_ID=Q8W514; Match level="QueryCoverage=51%, HitCoverage=23%, E-value=1e-31, Identity=83%"; Hit description=MSI type nucleosome/chromatin assembly factor C
  Subcellular localization annotation: CTP_CleavageSite=70; ConfidenceScore=5.77e-01
MEPLFPTLHFAQFLSHPPAPPSRRVPPFRPPLTNSNPLRSQTLTLALARSRADRRCRRQAGGAADEEEFRAEVEEPPHQRGVQDLEEETHPSSTTSSSPTRSKWPSLTVQWLPDRTEPPGKDHSVQKMILGTHTSDNEPNYLMLAQVQLPLDDAEADARHYDDDHADIGGFGAASGKVEFPLPPLPQTLLRVLLDLSGVN

SEQ ID NO: 54209 - protein, 222 aa, Zea mays
  Coding DNA Sequence Number=SeqID_12430
  Gene Ontology: Mol. function=protein binding; Cellular component =nucleus; Biological process=regulation of transcription, DNA -dependent
  Homolog annotation: Hit_ID=Q8W514; Match level="QueryCoverage=95%, HitCoverage=46%, E-value=1e-117, Identity=93%"; Hit description=MSI type nucleosome/chromatin assembly factor C
  Pfam annotation: Domain name=WD40; Domain location=1-41; Score=15.7; E_value=0.17; Accession=PF00400.22; Description=WD domain, G-beta repeat
  Pfam annotation: Domain name=WD40; Domain location=107-143; Score =9.6; E_value=2.7; Accession=PF00400.22; Description=WD domain, G -beta repeat
  Pfam annotation: Domain name=WD40; Domain location=161-200; Score =27.2; E_value=6e-05; Accession=PF00400.22; Description=WD domain, G -beta repeat
  Pfam annotation: Domain name=WD40; Domain location=48-87; Score=43.7; E_value=6.3e-10; Accession=PF00400.22; Description=WD domain, G-beta repeat
  Pfam module annotation: Pfam domain module=WD40::WD40::WD40::WD40; Domain location=1-41::107-143::161-200::48-87
MPGVPSYPPHHDGVVEDVAWHLRHEYLFGSVGDDYHLLIWDLRSPAPTKPVQSVVAHQGEVNCLAFNPFNEWVVATGSTDKTVKLFDLRKIDTSLHTFDCHNLTLMFQYLGVIREEVFQVGWSPKNETVLASCCLGRRLMVWDLSRIDQEQTPEDAEDGPPELMFIHGGHTSKISDFSWNPCEDWVVASVAEDNILQIWQMAENIYHDEDDLPISDEPAKTS

SEQ ID NO: 54210 - protein, 132 aa, Zea mays
  Coding DNA Sequence Number=SeqID_12431
  Homolog annotation: Hit_ID=Q337I5; Match level="QueryCoverage=74%, HitCoverage=23%, E-value=2e-25, Identity=58%"; Hit description =Expressed protein
MSAEQPLRNPEAAKFQSRVLLEHRTLSGVHRTVRLDSSEELRNFTTFEIDVVEGASEVLLRSDVAVDEGSFAVFMEKMWKESRELVNLDTTTLVAIVSGISNGGVGKLMAAPEAETRARFKCNYKFIIDQVA

SEQ ID NO: 54211 - protein, 189 aa, Zea mays
  Coding DNA Sequence Number=SeqID_12432
  Subcellular localization annotation: CTP_CleavageSite=10; ConfidenceScore=5.21e-01
MGTPGRSQGRAMATLSQGRARRGAPWGGAGEPGRGMPRRGEGARGTKPRRAGRHSRAPRRAKAAPRTAPGNCERAAASRPLRAGPCRARHAQWNKPGPRKKRGAGEERETRLTAGRGPSGRARQQRFWDTRAMGRREKALGDVGGRKEMNRGRFGKLTGGPNGWRRLGNRPARTDQASEPHSRAGGWPA

SEQ ID NO: 54212 - protein, 101 aa, Zea mays
  Coding DNA Sequence Number=SeqID_12433
MGLGVCGSLCQGGDVDDVYDYDNGKWYSFRLERVVHAATIAQEKMKPWRKTSRSSKSTMSSRCGLAATPSRLPMKAACISTFRFHTLIIVKDYVDVSDIMM

SEQ ID NO: 54213 - protein, 110 aa, Zea mays
  Coding DNA Sequence Number=SeqID_12434
MWSKSVADATLTNSASHFLRLTSPPAPADEALVVSAASAGLAAAWTCLLDDQGEFSSMEDARELSRWLMSDLSFDGVPPRPYILDRGAFHAAPTSEGTARENWVNTVDNA

SEQ ID NO: 54214 - protein, 219 aa, Zea mays
  Coding DNA Sequence Number=SeqID_12435
  Gene Ontology: Mol. function=kinase activity
  Homolog annotation: Hit_ID=Q6QP54; Match level="QueryCoverage=50%, HitCoverage=38%, E-value=1e-13, Identity=49%"; Hit description =Putative kinase
  Pfam annotation: Domain name=Skp1; Domain location=1-58; Score=58.3; E_value=2.6e-14; Accession=PF01466.9; Description=Skp1 family, dimerisation domain
MAANYLDIKGLQGLTCRAVVDMIQGKSPEEIRKIFNIKNDLTKEEEEGSDSGSAPEDGELRSARPRARTRAKSRKTANSAPPDPGLGLGLSPGRRRTLLRPTQGSDLGSAPEDDELRSARPRARTRAQPRKTANSALPDPGLGLGLDPRRRRTPLRPTQGSDLGSALEDDELRLARPRGSDSTSATEDRLDLGFGGASTSPNLGHRPATSTGGAIITLP

SEQ ID NO: 54215 - protein, 324 aa, Zea mays
  Coding DNA Sequence Number=SeqID_12436
  Homolog annotation: Hit_ID=Q2QNZ9; Match level="QueryCoverage=19%, HitCoverage=7%, E-value=2e-13, Identity=59%"; Hit description =Expressed protein
MTIALETLQLQQIQQTLAEIKERTPDVNISRFVASVLGDWMETEYATSERKRGDAGHGRGAGPSDARPCAPTLEMDWAACVLPLHGEDAHFGHAEAGVVGVADGVGGYRDNGVDAGAFARALMANALASAERVAKASRRLRRLCPEKQQRRFNYPYQLSSEGGGLDDAKVGSMPAARDGDVVVVGTDGLFDNVHDWQLERAVRMGTNLGFSPKNMADIIAGIAYGISKDKWACTPFGMGYMKITAPSVPSYVELFGSAPALPKAMPSSSLNNIFDSFKQPASTLSLPRSKHSSMPVFDNPVYDDNIFIEVSRELDLSTFIRIWI

SEQ ID NO: 54216 - protein, 69 aa, Zea mays
  Coding DNA Sequence Number=SeqID_12437
MVSSIPAVVDMVVLQGQLYANTRYMMMYIFLELYDLGSAFPDIIPFMARCPNAYVKRSFMVESPCSKLM

SEQ ID NO: 54217 - protein, 106 aa, Zea mays
  Coding DNA Sequence Number=SeqID_12438
MWGRGLTFLLDTFRTSGLEGSGLLLSGGLHGHFLKPQGLKLPCNMPPLDYKGKGTCSLHGERTQTLWETLERTQTFDSQSYTTHSGCRVLRSGGLNHSKTFVLLCS

SEQ ID NO: 54218 - protein, 507 aa, Zea mays
  Coding DNA Sequence Number=SeqID_12439
  Gene Ontology: Mol. function=transferase activity, transferring hexosyl groups; Cellular component=cytoplasm; Biological process =metabolic process
  Homolog annotation: Hit_ID=Q6H7J1; Match level="QueryCoverage=96%, HitCoverage=96%, E-value=1e-148, Identity=54%"; Hit description =Putative indole-3-acetate beta-glucosyltransferase
  Pfam annotation: Domain name=UDPGT; Domain location=11-504; Score= -71.4; E_value=5e-07; Accession=PF00201.9; Description=UDP -glucoronosyl and UDP-glucosyl transferase
MGVESTQAKRAMVFVPFPAQGHITPMIYLARALAVRGGITATVAVPDFVHHRMGRLTEDACGAELALVPIPSGVPDDGRGEPPGFATIVHAMEHHMPAHLERIVMGAGHGRVPCSCLVVDVLASWAVSVAARCDVPAVGFWPVMFASYRIVAAIPALVSKAFISASGAPLPPPSTNGVDDEDQANKHQNIGDPILPSKLQLSTKDLPWLVGGAASQQSRFAFWKRTVDRAKRLPAILVNSFPGEGAGDSDRYDPPPGQRILHVGPLFNVNVSLAAGAAENNGSSCVPLEKPNAAAATTMWQADSTCMDWLDRRSPGSVVYVSFGSWVAPIGPERMAEFALGLQAAGRPFLWVLKNHPSWRAGLPDRFVETVASSRGIGKIVPWAPQEEVLGHHAVGCYITHCGWNSTLEAVRHRVRMICYPISGDQFINCAYIVKMWEAGMAMDSTDRDGVKDCIERVMEGEEGRRLQEKVNGMEKVVAGEARSIAKGNLDLFINGIESGDDWVTKL

SEQ ID NO: 54219 - protein, 37 aa, Zea mays
  Coding DNA Sequence Number=SeqID_12440
MEPPSAQAMSATDDFQDKAVDEWSFGDDVCNPDSNHR

SEQ ID NO: 54220 - protein, 123 aa, Zea mays
  Coding DNA Sequence Number=SeqID_12441
  Gene Ontology: Mol. function=protein binding; Biological process =ubiquitin cycle
  Homolog annotation: Hit_ID=Q10SN2; Match level="QueryCoverage=67%, HitCoverage=29%, E-value=3e-25, Identity=66%"; Hit description=F-box family protein, putative, expressed
  Pfam annotation: Domain name=F-box; Domain location=22-69; Score =26.7; E_value=8.2e-05; Accession=PF00646.23; Description=F-box domain
MGAWVSVLLGMDGAAAAGPAAVGLGDLPELCAAQVLLRLDPPEICRLAQVNHAFRGAAGADFVWEAKLPENYNYLMEFVGSGDEGKRRRRRAGKKEIYARLARPVPFGDGKKTQISGRKVATF

SEQ ID NO: 54221 - protein, 68 aa, Zea mays
  Coding DNA Sequence Number=SeqID_12442
  Homolog annotation: Hit_ID=Q6DTM5; Match level="QueryCoverage=43%, HitCoverage=3%, E-value=6e-08, Identity=86%"; Hit description=MSH4
MEPLPPPPPAFSRRPSDDDNERRYSQQLHAIANPSEEDVALPSSSTTTKLLQVQGHQKKTRVIQDIKF

SEQ ID NO: 54222 - protein, 96 aa, Zea mays
  Coding DNA Sequence Number=SeqID_12443
MEMIEKTKPSCVLEFTTKMAREELTLHRALFITVDGTRPEVLGVEVLEVAHNFDVNIEAMWIHQVLPEDFLLILPNEATASRVLNDGKAYRGLILV

SEQ ID NO: 54223 - protein, 215 aa, Zea mays
  Coding DNA Sequence Number=SeqID_12444
  Gene Ontology: Mol. function=mismatched DNA binding; Biological process=mismatch repair
  Homolog annotation: Hit_ID=Q6DTM5; Match level="QueryCoverage=64%, HitCoverage=17%, E-value=5e-34, Identity=50%"; Hit description=MSH4
  Pfam annotation: Domain name=MutS_V; Domain location=29-160; Score= -152.2; E_value=0.00058; Accession=PF00488.12; Description=MutS domain V
MAAFERIWRTWAPPKCHFSLWLVMHNKCWTADRLAKRGLPHPASCPLCDQEGDDIHLILIISLKVFMSLKQPPGFIKNIERYTVFATHMERLSELSTMYPNVKILHFEVDLRNDRLDFKFCLKDGIRRVPHYGLLLARVAGIPTSVIDTSTSITSQITEQEMTRMNANCEEYWSLQMTYQVVQRLICLKYSNHGDDYIREALQNLKESYSAGRLT

SEQ ID NO: 54224 - protein, 150 aa, Zea mays
  Coding DNA Sequence Number=SeqID_12445
MHLMEVHLTEKIVGRCDIAERRVDARCNELHSRFTARGYTIQQEVDVVVYDESSDHDGYGAAPFDINDSDEKSIFDEGPIFDEEHGTFNVDNMHFNDMLRAHSFETLCNPSSPACSPPSARPPTGAPRPMIVCSSPLTSTTFWGTIAQAM

SEQ ID NO: 54225 - protein, 33 aa, Zea mays
  Coding DNA Sequence Number=SeqID_12446
MATEGNPYFVLDDMEEKQMWLEFWTMPRISTTY

SEQ ID NO: 54226 - protein, 375 aa, Zea mays
  Coding DNA Sequence Number=SeqID_12447
  Homolog annotation: Hit_ID=Q8GTK9; Match level="QueryCoverage=30%, HitCoverage=20%, E-value=7e-20, Identity=48%"; Hit description =Putative asparaginyl-tRNA synthetase, chloroplast/mitochondrial
  Subcellular localization annotation: CTP_CleavageSite=57; ConfidenceScore=5.51e-01
MAAAAAARILRLAPRRIQVPKTSPLAALSFPLPRTAPIAAASGRRQRFCAVAQAPAPAAAATGAAGEAVGEFRKRLRVADVKGGEDEGAAWVGKELAVRGWVRTCRAQRTITFVETGGSLRPTSECAACPSPDGSSAWASAKGGREVAGDGRERGGNPAAFVFVPRPGRAEPELLGRARRRLFGRGQGGVRALGSGRSGVRRLLGLSPSPSPGSGGAEFAVFRGLSPCPSPGSGGAEFAVFRGLSPSPSPGSGGAEFAVFQGFSPSPSPGSGGAEFAVFRGLSPSPSPGSGGAEFAVFRGLSPSPSPGSGGAEFAVFRGLSPSPSPGSGGAEFAVFRGFSPSPSPGSGGAEFPMAPLARPDCLSVSLCQVALQSE

SEQ ID NO: 54227 - protein, 195 aa, Zea mays
  Coding DNA Sequence Number=SeqID_12448
  Gene Ontology: Mol. function=binding
  Homolog annotation: Hit_ID=Q9AUY1; Match level="QueryCoverage=78%, HitCoverage=29%, E-value=3e-29, Identity=49%"; Hit description =Putative arm repeat containing protein
MAITAKLDKLPACLSDLSSHPCFARNSLCRELLQVGGATHAARCPSIGGRQVEDVERRQRARREARPRLRDCALLVKTDVLSDVAGPFPLQVPDVQELLVRLQIGHTEARSQVVDALCRDERGVLAALGRAIVATLVQLLTASAPAVREKDATTVCHVVGSTAARVEGWAAQPTALLGRPGAVGACGECAPEPSG

SEQ ID NO: 54228 - protein, 80 aa, Zea mays
  Coding DNA Sequence Number=SeqID_12449
MAWGCPYRSDWHSACYGKKALMGCISSIVFYDVGKSSATDIEGRANLRRGGGSNETDMTALGRRSLGRDGDSPELLSYPR

SEQ ID NO: 54229 - protein, 144 aa, Zea mays
  Coding DNA Sequence Number=SeqID_12450
MGVELPSGASSPAEAAIGRPLEASGAWSYHGRVATVFHRRRVLPLTERRLCLDEMRLNASMESSSMASTALSTDELLWRVKGTVGRTDCTTPVLMRPNQGYVFVEFVGFPLCFWSSPSHLTPSIPFAVGAGLSNRPTPGSGGRG

SEQ ID NO: 54230 - protein, 90 aa, Zea mays
  Coding DNA Sequence Number=SeqID_12451
MARPTQKSRRNPTSVLPRPSIAQIGTAKAAGEAYLELSGQIMENGTSTTADSCCRRTGTGVAPAARVRASNSYLYLLAKGLNIVYQFCKA

SEQ ID NO: 54231 - protein, 160 aa, Zea mays
  Coding DNA Sequence Number=SeqID_12452
MMSRSCYLAVSVLLAVAATASGAIAPALLHEVRLEEEGLLVAEGARVASTWAGNKVSRAQPMEAWPSGGVATQGDDQSSSGGGEHAKEEGSSKEGEKQGRSCLTKEECHKKKVLCGKACTLSAHSKCAAKCTKSYCGNSSSKMPFTAAVALELDDGAKTE

SEQ ID NO: 54232 - protein, 66 aa, Zea mays
  Coding DNA Sequence Number=SeqID_12453
MEREAESESEPAGENLGRIQFDTARRKDKADQGGSCVSDSEKNRPHGDLHADVNDRVMVMSLRQEE

SEQ ID NO: 54233 - protein, 142 aa, Zea mays
  Coding DNA Sequence Number=SeqID_12454
  Homolog annotation: Hit_ID=Q6T7D3; Match level="QueryCoverage=47%, HitCoverage=59%, E-value=2e-08, Identity=35%"; Hit description=Fiber protein Fb34
  Pfam annotation: Domain name=DUF1218; Domain location=17-117; Score =53.7; E_value=6.3e-13; Accession=PF06749.3; Description=Protein of unknown function (DUF1218)
MASIIVIAVVLVLDVLAFVLAIGAERRRSYANVTAADSSGRAYCVYSSDASTAYGRRVTFVIAELCLLAGSVRNAYHTKYVSLFSNAPPRCAVLRRGVFAAGAAFAFLTALLAELHYLFYARARAAAAVPPPIVGGIGMTRM

SEQ ID NO: 54234 - protein, 516 aa, Zea mays
  Coding DNA Sequence Number=SeqID_12455
  Gene Ontology: Mol. function=protein binding; Cellular component =integral to membrane; Biological process=protein amino acid phosphorylation
  Homolog annotation: Hit_ID=Q9FHL8; Match level="QueryCoverage=91%, HitCoverage=94%, E-value=3e-82, Identity=35%"; Hit description =Disease resistance protein-like
  Pfam annotation: Domain name=LRRNT_2; Domain location=44-84; Score =46.6; E_value=8.2e-11; Accession=PF08263.3; Description=Leucine rich repeat N-terminal domain
  Pfam annotation: Domain name=LRR_1; Domain location=120-143; Score =2.1; E_value=1.1e+02; Accession=PF00560.23; Description=Leucine Rich Repeat
  Pfam annotation: Domain name=LRR_1; Domain location=145-167; Score =14.8; E_value=0.32; Accession=PF00560.23; Description=Leucine Rich Repeat
  Pfam annotation: Domain name=LRR_1; Domain location=169-191; Score =11.2; E_value=2.3; Accession=PF00560.23; Description=Leucine Rich Repeat
  Pfam annotation: Domain name=LRR_1; Domain location=193-215; Score =9.9; E_value=4; Accession=PF00560.23; Description=Leucine Rich Repeat
  Pfam annotation: Domain name=LRR_1; Domain location=217-239; Score =9.9; E_value=3.9; Accession=PF00560.23; Description=Leucine Rich Repeat
  Pfam annotation: Domain name=LRR_1; Domain location=241-263; Score =12.6; E_value=1.2; Accession=PF00560.23; Description=Leucine Rich Repeat
  Pfam annotation: Domain name=LRR_1; Domain location=265-287; Score =10.6; E_value=2.9; Accession=PF00560.23; Description=Leucine Rich Repeat
  Pfam annotation: Domain name=LRR_1; Domain location=289-311; Score =9.0; E_value=5.8; Accession=PF00560.23; Description=Leucine Rich Repeat
  Pfam annotation: Domain name=LRR_1; Domain location=313-336; Score =11.3; E_value=2.2; Accession=PF00560.23; Description=Leucine Rich Repeat
  Pfam annotation: Domain name=LRR_1; Domain location=338-360; Score =9.3; E_value=5.1; Accession=PF00560.23; Description=Leucine Rich Repeat
  Pfam annotation: Domain name=LRR_1; Domain location=374-396; Score =9.5; E_value=4.9; Accession=PF00560.23; Description=Leucine Rich Repeat
  Pfam annotation: Domain name=LRR_1; Domain location=397-419; Score =14.0; E_value=0.56; Accession=PF00560.23; Description=Leucine Rich Repeat
  Pfam annotation: Domain name=LRR_1; Domain location=421-443; Score =8.6; E_value=7.2; Accession=PF00560.23; Description=Leucine Rich Repeat
  Pfam annotation: Domain name=LRR_1; Domain location=445-467; Score =17.9; E_value=0.037; Accession=PF00560.23; Description=Leucine Rich Repeat
  Pfam annotation: Domain name=LRR_1; Domain location=469-492; Score =1.9; E_value=1.3e+02; Accession=PF00560.23; Description=Leucine Rich Repeat
  Pfam module annotation: Pfam domain module=LRRNT_2::LRR_1::LRR_1::LRR_ 1::LRR_1::LRR_1::LRR_1::LRR_1::LRR_1::LRR_1::LRR_1::LRR_1::LRR_1: LRR_ 1::LRR_1::LRR_1; Domain
  Pfam module annotation: Domain location=217-239::241-263::265 -287::289-311::313-336::338-360::374-396::397-419::421-443::445 -467::469-492
MQLSPRLLRVLAILLAALPPRCCAGHHADSSSTVAGDRPSPPCSPADRAALLGFKAGVAVDTTGILATWAGGDCCGAWEGVTCDAATGRVVALQLEAPKAEVGRHYMQGVLSASLGGLEFLEALVVRDMARIAGAIPAALARLTRLRQLYLEGNMLSGAIPRSLALLRSLQYLSLAGNRLDGQLPPELGAVSGLEQINVARNRLSGAVPPSYENLSRLAYLDLGSNLFSGAVPGFLGQLKNMALVDLSNNSFSGEIPASLCTLRSLTDLSLSHNKLGGQIPTQMGTLRSLNSLAMDGNMLVGPIPASLLGLQKLWYLNLSGNGLSGPLPTGAGIALPSMVSMDLSRNRLTGDIGQLLRSLSVNRTSPQIVLAQKLEHLDVSENKIAGALPDLARGAGLRWLDISGNAIGGQIPSSISKLSGLERLDMSRNRVRGTIPASMAEMVRLRWLDLSRNELVGRIPDNFTRLTGVRHASFRGNKLCGQIPQARPFNLFRAAAYAHNLCLCGKPLPACRKIW

SEQ ID NO: 54235 - protein, 130 aa, Zea mays
  Coding DNA Sequence Number=SeqID_12456
MVEGLLDMNPGEILDPFGSLVGPLYVAQIVGGKWSFGARLDGSTGDGLRRWGRPPLVRDLLRSAIGGGRQPMNRRSRYQWPRLEDRANLTRAYLRHSIMIVRAGLHSVVLNPSHRPVILRFWLLTASVMG

SEQ ID NO: 54236 - protein, 223 aa, Zea mays
  Coding DNA Sequence Number=SeqID_12457
  Subcellular localization annotation: CTP_CleavageSite=26; ConfidenceScore=5.22e-01
LSVDRPRPRYRTPARPTERPHARRRRASRSRPPLASPHRPRLSRPDPRCILLSVPTAEISTTLSREECPTIYRRLPWSPRTAFLAAQAPTSTTRLALSSRLGPLLALPMDPAAPEPIPAPATDTDAVTNADTDAEVGGEGAGAGTETGSGTMPAGGVAEMKELPEEFAKGVVCPKYETSAEAVAAGVGRTCRVYVVGTAHVSQRTLPVLIASHAVVLLLLQKH

SEQ ID NO: 54237 - protein, 416 aa, Zea mays
  Coding DNA Sequence Number=SeqID_12458
  Gene Ontology: Mol. function=transcription factor activity; Cellular component=nucleus; Biological process=regulation of transcription, DNA-dependent
  Homolog annotation: Hit_ID=Q84MM9; Match level="QueryCoverage=90%, HitCoverage=87%, E-value=1e-112, Identity=58%"; Hit description =Protein MONOCULM 1
  Pfam annotation: Domain name=GRAS; Domain location=10-326; Score =232.1; E_value=1.2e-66; Accession=PF03514.5; Description=GRAS family transcription factor
MLGAPGHDGDDAAERAQEQAAAAAAAAADDAPSSPRGLVVASAGLLHRGDVDGARRATAEVLSTMDQRGDAADRLAHHFARALARLVDDKAAAAGGGDVAAAPAGGAPPPAPPGPTAYLAYNQIAPFLRFAHLTANQAILDAAASTSGGARRLHIVDLDAAHGVQWPPLLQAIANRADPAVGPLEVRITGAGPDRDVLLRTGDRLRAFASSLNLPFRFHPLHLPYSVQLAADPNTGLELHSDETLAVNCVLFLHRLGGEGEVATFLKWVKSMNPAVVTIAEKEANSIGSDDCSDDLPRRVTAAMSYYSAVFDALEATVPPGSADRLLVESEVLGREIDAALTPGRVGEHSWGFDAWASAARTAGLSPRPLSAFAVSQARLLLRLHYPSEGYVAEEARGACFLGWQTRPLMAVSSWQ

SEQ ID NO: 54238 - protein, 111 aa, Zea mays
  Coding DNA Sequence Number=SeqID_12459
MGEPIPNLSGHQDPPPSARRRQQQASPLPGDYILLLLLSSPAAVRTPSKGTLFWQSEYSSGEGSSLLQFTSSWNNKFIKWFREKPRDTYDVADVSDDEDVEDEDANAEEDT

SEQ ID NO: 54239 - protein, 601 aa, Zea mays
  Coding DNA Sequence Number=SeqID_12460
  Gene Ontology: Mol. function=3-oxoacyl-[acyl-carrier-protein] synthase activity; Cellular component=mitochondrion; Biological process=fatty acid biosynthetic process
  Homolog annotation: Hit_ID=Q8L3X9; Match level="QueryCoverage=70%, HitCoverage=93%, E-value=1e-141, Identity=60%"; Hit description=3 -oxoacyl-[acyl-carrier-protein] synthase, mitochondrial precursor
  Pfam annotation: Domain name=Ketoacyl-synt_C; Domain location=440 -557; Score=188.3; E_value=1.8e-53; Accession=PF02801.12; Description= Beta-ketoacyl synthase, C-terminal do
  Pfam annotation: Domain name=ketoacyl-synt; Domain location=173-435; Score=77.4; E_value=4.5e-20; Accession=PF00109.16; Description=Beta -ketoacyl synthase, N-terminal domain
  Pfam module annotation: Pfam domain module=Ketoacyl-synt_C::ketoacyl -synt; Domain location=440-557::173-435
MHKVEAVADDDGEVERLNDVVGEIGDEADEWGPREGRVPRDNRSMMPFSDKALESAVRPSPPATAAPTRSVVCVDVVCRAPEAQAPPARVLLAARLSAIRKSGCFGLRGLTRRLLLPASVSHSPQSHTATATPPSSSRLMSCLRRASRLTRGLSSSSAAEAETLPPPRPSAGRRVVVTGLGAVTPLARGVGATWDRLVAGRCAVRSLAAEDLRFPEEAAGRTLEQLPSRVVAAVPRGKGEDEFAEDTWTKDKSVSGFISYALCAADEALRDANWLPSEDDKKERTRLRRLSPYFIPKILINMASGHVSMRYGFQGPNHAAVTACATGAHSIGDATRMIQFGDADVMVAGGTESNIDALSIAGFSRMAARWTVDTGGGMERRRALHTGGRRLEHKPLQQPHDGAESRRSRGGAVARWRRGDGYCAAAVALDHAKERGAKIYAEVRGYGMSGDAHHITQPQSGGRGAILAMKRALDQSGLHVNEIGYVNAHATSTPLGDAVEANAIKSVFGDHAASGDLAISSTKGAIGHLLGAAGSVEAIFTVLAIHHGLAPPTLNLERPDPLFEGAFTPLAAPKKMSIRAAISNSFGFGGTNTSLLFSCPP

SEQ ID NO: 54240 - protein, 145 aa, Zea mays
  Coding DNA Sequence Number=SeqID_12461
MASPGRLSLATSGGAARVHGRDSLETRARARWGPYGDRKGSGRSGECCEPERGHGTDTEALEGGGPRQDGSATALPHTGEESRAIEGREGEIRGRRRLVTSREDSRTLDGGRGMTRAQVDGSGAAATRKKSGERGQREPEGEGVN

SEQ ID NO: 54241 - protein, 116 aa, Zea mays
  Coding DNA Sequence Number=SeqID_12462
EVPDDGSARRSSGKRVDRPSGAMTGAPERLSPNWTYPDPFPQPNFTNDPMVFTGHDDHGCCGWMNAFPATRGLLIQLDGLASITDVVLAAGEEEEAWRGEYVSLAVAGSSAMMGRQ

SEQ ID NO: 54242 - protein, 39 aa, Zea mays
  Coding DNA Sequence Number=SeqID_12463
MGEGIEQWVDRGSVHGGVLGDDVVFSEFCGSSIQSAGTG

SEQ ID NO: 54243 - protein, 79 aa, Zea mays
  Coding DNA Sequence Number=SeqID_12464
MVPRGGEYVNGAKVSMSRCDERGGQRNSVMREFVERGKNALTRWVPRAVRSGARQQPDPQGFAVAATTNAEIPGWKNAQ

SEQ ID NO: 54244 - protein, 145 aa, Zea mays
  Coding DNA Sequence Number=SeqID_12465
MTIDASKESSAFSMEELQDDFWQQVGLPATNHWLMEADEVGLEDPCRQFQTGRMGNSTIGRFATSSKTETDCDVGRFHAAKATRNRHREIIEFRYRSSTKTAAASGSKFERTCRPDIDYRKGTEVVDGTDRNFNSPIPRIWKVGE

SEQ ID NO: 54245 - protein, 79 aa, Zea mays
  Coding DNA Sequence Number=SeqID_12466
MVPRGGEYVNGTKVSMSRCDERGGQRNSVMREFVERGKNALTRWVPRAVRSRARQQPDPQGFAAAATTNAEIPGWKNAQ

SEQ ID NO: 54246 - protein, 445 aa, Zea mays
  Coding DNA Sequence Number=SeqID_12467
  Homolog annotation: Hit_ID=Q9LY75; Match level="QueryCoverage=47%, HitCoverage=36%, E-value=4e-54, Identity=51%"; Hit description =Peptidyl-prolyl cis-trans isomerase
  Pfam annotation: Domain name=Pro_isomerase; Domain location=8-177; Score=226.0; E_value=8.4e-65; Accession=PF00160.11; Description =Cyclophilin type peptidyl-prolyl cis-tr
MERKRNPIVFLDVSVGDEPDERMIFELFADVAPLVTENFRALCTGELGIGHKTKKPLCYKGSSFHRVIEGFMAQGGDIAKGNGSGGENIYSGKSADETCVLPHDDRGLLTTADTGSKASGSQFCITFKPNSHLDRKHTVFGKLVVGSDVLKRIEQVDVQSPDSTPVVPVTIVNCGELTDRKDIGSMRIGIDKKRAAKSKLSKGISSDEESNEGQHKGRRNKSSKRRRKKRYFYSESDSSSESETESSDSESDSDTYSSDSSDVSSSSDDRRRRRKRHSKKNKRKRSRRKHDQRRERRRRKRDRKSKQKSKRIKGDSEAESSSDSSSEDARSKRHRHGRKSKASSQVFEENIAAVSALKDATSPQQKSGIPNSPAQDVSPLQNGENYTNGVNESKIERNAAVMPVLTGNQSKSRFPILLHTSFFVLTASGSGVSSDIDKQEPEHEC

SEQ ID NO: 54247 - protein, 76 aa, Zea mays
  Coding DNA Sequence Number=SeqID_12468
MVDDDKGKGKVTNEKEALNNEPKGEKPINTGSEMKKDGNKKRINSVWVHRTVSGGAPDSVQCARLTQANLLLSGSD

SEQ ID NO: 54248 - protein, 139 aa, Zea mays
  Coding DNA Sequence Number=SeqID_12469
  Gene Ontology: Cellular component=integral to membrane
  Homolog annotation: Hit_ID=Q5Z407; Match level="QueryCoverage=84%, HitCoverage=47%, E-value=3e-11, Identity=30%"; Hit description =Senescence-associated protein-like
MTMLMLNRQTYMTIVFMLIILEGAITLDVFLNSNWEEVSLLTHQAKFGDFKHFVRSNSEICEWVGLSVVAAQVLSIVLGMVLRTLGPDRETDYDSEDDTAVPARLPLLRNQSQHGSWDYAEATTSRQGLPLLHSKCVQR

SEQ ID NO: 54249 - protein, 68 aa, Zea mays
  Coding DNA Sequence Number=SeqID_12470
MVACSMRKSSFKVLEADIQHANTLLADALGLLMILIYKVYVDGSTTTMSCMFQNYSTAAAAAASAILT

SEQ ID NO: 54250 - protein, 85 aa, Zea mays
  Coding DNA Sequence Number=SeqID_12471
MARRVTAIDMIVPPQVRPHTRSHYLEGLDGPVHIGPQHWSFYSDSNIGLITVGNTARCTTTPYDWPAGEYDYARSYEHRQRNNAT

SEQ ID NO: 54251 - protein, 273 aa, Zea mays
  Coding DNA Sequence Number=SeqID_12472
MALAAMWLARRRCHTGAVRWWRGAVVDAAGWGWGWERESMVAIRGWGRGRRGMRIKEARKPRLILLLAVSARFQYKIAKPVKNHGTKICVGRRSWRGITPNGSNIRSSNLLKTTALRFVLGEEVGVESLQTTCVLVRCSGDRSRGCITTSVPVCQERGCQRFNTNQSKEQVKSQKEGAKREPKAALVWRTGQSGVPPDSVRCTRVLQLKLFHLRVFQAQLRYNSPDCLVCHQTVRCTSGATAICAQRSNLQSEQYCDRSQSSGQRGTGLSGAT

SEQ ID NO: 54252 - protein, 398 aa, Zea mays
  Coding DNA Sequence Number=SeqID_12473
  Homolog annotation: Hit_ID=Q7XDY9; Match level="QueryCoverage=99%, HitCoverage=84%, E-value=1e-135, Identity=61%"; Hit description =Expressed protein
MAPPGQLYQPFHPPPSPLPPSLRNLDLSERLQILRDRMGLWHEYAPLISSLSRDGFNPSSIQEATGISGVEQNCLVVASQVRDSLLDDRAAAFPPDLLPYFDSLGGPEVLYELRFLNARQRADAARHAIGYRLEPKGVRELARAMKGFPRWRGEEGWEAFSKDSPADCLAFARFRQSREAIDVQDRVAELERALQVVETESGRARVELELERARRKAAGEEEVDEEGEEDDAAASLRPGVTVVRLRYGEVAEATTVILLPVVRETDGVAAMESAPRRAKTDVGLGVVEVDRAWARWAVVPGWGPVAEAADDAVVVELADGRRLPWRMSDEEPVLVIANRSKKEVVEEGVYVLEREGRLVVERGKKLAEQGIAAAAAEVVIVVRPPKDEDDMVSDEEWD

SEQ ID NO: 54253 - protein, 1212 aa, Zea mays
  Coding DNA Sequence Number=SeqID_12474
  Gene Ontology: Mol. function=nucleoside-triphosphatase activity; Cellular component=cytoplasm; Biological process=maintenance of fidelity during DNA-dependent DNA replication
  Homolog annotation: Hit_ID=Q6EQN5; Match level="QueryCoverage=24%, HitCoverage=64%, E-value=1e-111, Identity=73%"; Hit description =Bystin (51.6 kD)-like
  Pfam annotation: Domain name=Bystin; Domain location=139-365; Score =138.8; E_value=1.5e-38; Accession=PF05291.2; Description=Bystin
  Pfam annotation: Domain name=MutS_V; Domain location=669-920; Score =0.2; E_value=5.7e-15; Accession=PF00488.12; Description=MutS domain V
  Pfam annotation: Domain name=Smr; Domain location=1141-1212; Score =57.9; E_value=3.4e-14; Accession=PF01713.11; Description=Smr domain
  Pfam module annotation: Pfam domain module=Bystin::MutS_V::Smr; Domain location=139-365::669-920::1141-1212
MAGKKRKSGSEKPTKHRLPLGADADAVAEASKRRRSGATKQHQADEEASIPPSLSAKILREARKQQEEEMRADSSDEQRPSAVEATAGPSTSSSFPVPAADGENEGDDVDEFDGFDALSEYDGGEVEINEEDEKALAAFMSKDKAAERTLGDIILQKIREKDAEVATGEGRPRVKLDNSIIELYKEVGKFLSRYTSGKIPKAFKRIPSMECWADVVQLTEPENWSPNAVYQATRLFSSNMNTKNAERFYEAILLPRVRNDIRKNKRLHFALYQSLKKALYKPAAFNKGILLPLCRQLPHGGVQSPENIPVSLRRQSLPRLARTRIGRQRLPRDAGYRAPIPRRQQPRRLTAAATEASSYNLPSRSSPEAPETRQIRLETESALEWGGVCERLAHFTATAAGRAACEGGRVPVGRSREESERLIDQTAAAVLLPTPLDFGGVEDVSALVAAAVAGRALAVRELCAVGRSIRAVRAVFHQLKRLADEMPDGRYSSLVDILQGCDFLTELVQRIEFCLDSTLSLVLDRASKKLEIIRRERRRNIEMLESLLKDTAAKIFLAGGIDNPLVTKRRSRMCVGVKASHKHLMPGGIVLSSSGSGATYFMEPQDAVELNNREVKLSGEERAEELVVLSLLTSMIADSQLKIRNLMDNVLELDLACARGSYALWTNSVRPTFTDSYTISQSDQCNDYSIYIEGIRHPLLLEQSLMAEESTTEASEMPVPLDMWVKKNARIVVISGPNTGGKTATMKTLGLSSLMSKAGIFFPAKGRPRIPWFDQVLADIGDHQSLEHSLSTFSGHISRLRKIVEMVSKDSLVLIDEIGSGTDPAEGVALSTSILKYLASRVNLAIVTTHYADLSRLQSVDNRFENAAMEFCVETLQPTYRILWGSTGNSNALSIAKSIGFDQKVLDRAQEWVEKLLPDKQKERQGLLYDSLVDEKELLESQANEAASVLSQVEGLYNEIRLEADDLESRVAALRARETQKVQQELKVVKYRMDTIIKNFEAQLKNSKLEQYNSLMRKAEAATASVVAAHQPSEIAFDDDDENRISFVSQVGDKVYVQGLGGETMATVVETLGEDESCMVQYGKIKVRVKRSRIKLVQRGTNNEATTSSSVKAKGRTPKQRSATTTDVSFGPVVQTSKNTVDLRGKRVSEAAFELRMAVDACRPYQVLFVVHGMGTGAVKDCAIDVLRKHPRVARFEDESPLNYGCTVAYIQ

SEQ ID NO: 54254 - protein, 582 aa, Zea mays
  Coding DNA Sequence Number=SeqID_12475
  Gene Ontology: Mol. function=calmodulin binding; Cellular component =integral to membrane; Biological process=cell death
  Homolog annotation: Hit_ID=Q94CG6; Match level="QueryCoverage=78%, HitCoverage=100%, E-value=0.0, Identity=92%"; Hit description=Seven transmembrane protein Mlo9
  Pfam annotation: Domain name=Mlo; Domain location=6-471; Score=564.5; E_value=1e-166; Accession=PF03094.6; Description=Mlo family
MAGGEGEMRSLALTPTWSVATVLTLLVAGSLLIERSIHRLSNWLKKTHRNPLYKAMEKMKEEMMLLGFISLLLAATSRIISGICIDSKYYNSRFSPCTKEEVQESINAEHAIAHARKHLLEVILHHSPRRNLKTSYHNHEGCREGYESFVSHEGLEQLHRFIFVMAVTHVTYSCLTMLLAILKIHKWRKWEDEAFRDNHESFSQIAYESATRRQPALTKSYSFRSWSQNNVVMWLVCFIAQFGQSVVRADYLILRKGFIMTHNLPPTYDFHNYMIRSMEEEFEKIVGVSGLLWGFVVAFMLFNVDGSNLYFWIAILPVTLVLLVGAKLQHVIATLTAEGAKMSTYGPRIQPRDDLFWFKKPEFLLWLIHFVLFQWQFGYDSCFIKNHLLVYCRLILGFAGQFLCSYSTLPVYALVTQMGSKYKAALIPRRIRETIHGWGKATRKKRRRRRGDDSTVRTETSTVCSLTDDDEDFEDDDDHHHHGPSYDTPRAGGRPPYLKIETHRQSGSGHDGPRPGGTPCFHPSGSGSGHAMLLRQASVSAPSSPSYRGGNNVTRSASMPGIAALRTTGSGTPTRVSHEEPT

SEQ ID NO: 54255 - protein, 100 aa, Zea mays
  Coding DNA Sequence Number=SeqID_12476
MAVSCRGFSFRRDAAAAEPEAGKKGRYNEQRGKGCCFLGACGAAASRINQQHNNEEREVRWARRSMGPTVSVAACAEGGASKVELDARTGRPWRLASNRS

SEQ ID NO: 54256 - protein, 163 aa, Zea mays
  Coding DNA Sequence Number=SeqID_12477
  Gene Ontology: Mol. function=RNA polymerase II transcription factor activity; Cellular component=nucleus; Biological process=regulation of transcription, DNA-dependent
  Homolog annotation: Hit_ID=Q680U9; Match level="QueryCoverage=76%, HitCoverage=27%, E-value=2e-46, Identity=65%"; Hit description=MRNA, complete cds, clone: RAFL22-33-O09
MVMNLDVAVDGEVGAGGGGAAEGLGVVVGDRRLPDTRVEYQLPNLIVGAVTKESIYGAFENGITAEQIISFLRQNAHPRVADKIPAVPENVTDQIRLWETDLNRVEMIPSHLYEDFPSKEWFEQCCDYARDNGYLLWEDPKRMRLIVRGEFHPEMREFLRRQR

SEQ ID NO: 54257 - protein, 362 aa, Zea mays
  Coding DNA Sequence Number=SeqID_12478
  Gene Ontology: Mol. function=RNA polymerase II transcription factor activity; Cellular component=nucleus; Biological process=regulation of transcription, DNA-dependent
  Homolog annotation: Hit_ID=Q680U9; Match level="QueryCoverage=80%, HitCoverage=70%, E-value=2e-69, Identity=46%"; Hit description=MRNA, complete cds, clone: RAFL22-33-O09
  Pfam annotation: Domain name=Tfb2; Domain location=13-326; Score= -56.1; E_value=3.7e-13; Accession=PF03849.5; Description =Transcription factor Tfb2
MPQVMVVARNFMDMVAALPAGKLDMLYDSAFICEAVLRSLPPLAKKYALQMLYVLAPVTAAAMEEWVLDEYAAKHKVAIDKLLQLRVFVEVRDRRRDVSYKMNQKFQGNMQKYLVDGGSLPREPLPLSVTGRLPTPADLEAYALDQWEYSWIIYPVAFSRILHNNTYTKQDGEASKLTENGFQFLVSSLFPANTITGRFPSLLLIFSMLSADGNKCTTLERGVDPTELISFLLELSFHKLGAAYSLNTLTDVQRIAIRDLAELGLVKQQQGFVVVETNFRMYAYSTSKLHCEILRLFARRAVLRVRRLGEEQTADAQVHELTSAGADEQTGKWRLGERQQAGNLARGGGVPRVEAGAANLVL

SEQ ID NO: 54258 - protein, 113 aa, Zea mays
  Coding DNA Sequence Number=SeqID_12479
LLEISFGALSEVWALSGVVRRRGMRSGAAAGEDSALLEISFGALSEVWALSGVVRRRGMRSGAAAGEDSGNPSSMTSREICQNPGRDGGNQKGEDEVEQGRMGFDGLDATART

SEQ ID NO: 54259 - protein, 98 aa, Zea mays
  Coding DNA Sequence Number=SeqID_12480
MGPSPATLASAHGRAEGGEVKRKEKANDQGRVKKAVEADELFKEAEGILAGVWETVSSGDILRLLADPHAKRAAPKKSTTSRMAPIPPEASRSFGTQM

SEQ ID NO: 54260 - protein, 225 aa, Zea mays
  Coding DNA Sequence Number=SeqID_12481
MGTNAACVRASREPGGGVGWGSMHTLLLLATAARATQIGQASHPPVGAARRRRQGKEISLRGGVQVLGATVLGLAEARADAGCVRRGGGGRMTGGDGRGRGGDDAAPVAADESGGRGTASEDKSINLGHLVKADNRDQAKKIQVNESAKPVGANGENIIWFEYLNLERSCSRSPLYCPRVVDVADVKGPPVSVLPLRYRNSITEFAGEDGISGSKAISRAPDRGG

SEQ ID NO: 54261 - protein, 906 aa, Zea mays
  Coding DNA Sequence Number=SeqID_12482
  Gene Ontology: Mol. function=methyltransferase activity; Cellular component=cellulose and pectin-containing cell wall
  Homolog annotation: Hit_ID=Q2QWY0; Match level="QueryCoverage=99%, HitCoverage=99%, E-value=0.0, Identity=52%"; Hit description =Dehydration-responsive protein, putative
  Pfam annotation: Domain name=DUF248; Domain location=390-895; Score =1104.0; E_value=0; Accession=PF03141.7; Description=Putative methyltransferase
  Pfam annotation: Domain name=Methyltransf_11; Domain location=509 -604; Score=31.5; E_value=2.9e-06; Accession=PF08241.2; Description =Methyltransferase domain
  Pfam module annotation: Pfam domain module=DUF248::Methyltransf_11; Domain location=390-895::509-604
MALFDRNQRQRSSFCSTATFVVFVALCLLGMWMISSPENVPSAISLSSEKVVKSDVKEEDSSIDATNTVKQDSANVVSEATTDGGAATESAEDVDLPGKPGGGGASEGDGGKASSKDQSFDDENGRTESGELVKPGAGETDAVAGQEQDKGTGEDPVLENDAKVDAAGKEQTPIDTKDASGLDQSVEQTVTDTKASASEQAAATGLDKVSSAEAGGGTPKKLTFDDENGKMDGVDLVKDDGNKTRISEESAKVEGAALTVKPSAKAATATATDAEKQEEASAVATDAEKQEEASAVATDASTTASTTTSEDERKQDGVEQQLPATEAQPNVQAELLTERAAQNGSFTTQAAESTEEKKNRAEKKGKKGKKKAAGVAAVAWKLCNSSAGADYIPCLDNVAAIKKLKTDKHYEHRERHCPEVAPTCLVPAPPEYREPIRWPHSRDKIWYYNVPHTKLAEYKGHQNWVKVSGEYLTFPGGGTQFKHGALHYIELIQNSFPDVAWGRQSRVVLDVGCGVASFGGYLFDRDTLTMSLAPKDEHEAQVQFALERGIPAISAVMGTQRLPFPANVFDVVHCARCRVPWHIDGGMLLLELNRLLRPGGFFVWSATPVYQKLPEDVEIWDEMVKLTKAMCWELVAKTRDTVDLVGLVIFQKPIDNVCYDRRPEKEPALCEPSDDPNAAWNIKFRACMHRVPEDQSVRGARWPVLWPARLRKAPYWLDRSQVGVYGKPAPDDFAADLQHWKKVVRSSYLAGMGIDWKTIRNVMDMRAVYGGFAAALRDMKVWVMNVVTIDSPDTLPVIYERGLFGIYHDWCESFSTYPRSYDLLHADHLFSKLKPRCKVLPVIVEVDRILRPNGKLIVRDDKETVDEIQGVVRSLQWEVRMTVSKNKQAMLCARKTTWRPTEIETR

SEQ ID NO: 54262 - protein, 165 aa, Zea mays
  Coding DNA Sequence Number=SeqID_12483
  Subcellular localization annotation: CTP_CleavageSite=46; ConfidenceScore=5.22e-01
MAGDGRKQRDPNGHNAAWTNGAARTNGTAWPGQGMARARRGCGVTKTARAWASSIGERARARPTCIEGRREESGHQGRRRVGGAINAIDGVGCNEEKVGEREEEEPMVLGLREMRGCDRGRARGRLGRARKPGWWGMPSGATMLAARACLHGEEDGHPRWGPPVS

SEQ ID NO: 54263 - protein, 116 aa, Zea mays
  Coding DNA Sequence Number=SeqID_12484
MRSIECTGLGGSNDSEEASLEEVENSSDFKEWSGGEGDGGEGDSSSDDDDGKGSDDDGGEGSGDGNGGEGSGSGNGKGDGSCDGKGDGGGDNGGGKGSGDDGDGGDGNGGGIMLPA

SEQ ID NO: 54264 - protein, 122 aa, Zea mays
  Coding DNA Sequence Number=SeqID_12485
MDGMFSKIKLDGGSIMAMMGSTLEKMYLCQVVRGLLDKDNGRWAHFVRPGVCNTLHEEVHVMYSRLHPDVLVDPVGMGVGASRTAGEGNDEELDLFRPPPSMNLADDRTPTTRNEETKDDED

SEQ ID NO: 54265 - protein, 214 aa, Zea mays
  Coding DNA Sequence Number=SeqID_12486
  Homolog annotation: Hit_ID=Q9ZWM7; Match level="QueryCoverage=14%, HitCoverage=16%, E-value=1e-07, Identity=90%"; Hit description=Root cap-specific glycine-rich protein
MAGTKLVSLGLLVLMGIGLANAARVARYSSADGTGNGEGQGGGYVNGGGSGSGSGTGSGDSSPYGTYASAGGGGAGGGASQYGGSGYGSGSGSGSGSSTYSQGGYYSGYGESSNAGGSGGGGGGGQAGGYGNSNAQGSGSGTGSGSSYANRYWDGSSEGGANANGNGGGTGNSQNGGGGGGSAMFLNGGGIGNSQNGGGSGGSGDGSGYGNAYP

SEQ ID NO: 54266 - protein, 106 aa, Zea mays
  Coding DNA Sequence Number=SeqID_12487
MTRTPTSPAGTAPGGLEAPTVSGTVALDGCSKTPHLGALGQRVPSLMWLEEAVALELEGLRRREGEAARSWFIVGGVRAEREGAVVRCRVRQHKKRKAQMDEEAYD

SEQ ID NO: 54267 - protein, 121 aa, Zea mays
  Coding DNA Sequence Number=SeqID_12488
MAHRTVFGAPGLYRVKPATLGKMEARSAIIHRTVRCATGLSSEPAEQRLSAPTVDSAKATVPQQSQKRKSQRAPDCPVQLEDKHLQRSTAQNPNGCTDVARTGQCIVTVRCVHRQQKSTNG

SEQ ID NO: 54268 - protein, 793 aa, Zea mays
  Coding DNA Sequence Number=SeqID_12489
  Gene Ontology: Cellular component=nucleus; Biological process =regulation of progression through cell cycle
  Homolog annotation: Hit_ID=Q6ZIX9; Match level="QueryCoverage=99%, HitCoverage=65%, E-value=1e-139, Identity=68%"; Hit description =Cyclin-like protein
MLKQPDMQLSIVEVAATLAEQSSAIASPTTMGAISDLVRHLKRTFHITLGSKDTELVKWNEKFRKGIDECLVQLSKKASRRWSNALDRLTALKTMPDTTHKPVQRGNDVSAAVAAAKLRQPSPPLAGHTETKQHSRRRPSLPRPQAPQVPGRQRHHLHCPVRGEACRAAENAVRRTHTAKEANMELPRRGGDGRARAACRAGSESPTVGALAPSLQRLHASTRQHSSDDDEGEMEGGAQQPCHCRRAREAAMELAGDVLHGGTPDLAMDTPDPGMGSPELASGDPQRRPGRHERSNPWGSQPRREERRAPPPSLHRRELPGRVLERRRGGVSDAGPVLDMMAVMLENIASTPVVARSTAAAVYRTAQIIASVPNLQYQNKSSLNISERSFNVFESIFYVCKGRPKFLKQESVLVKLSARQITLLLSSIWAQSTSPENTPVNYEAIAHTYSLLLLFSGSKASTFEALTQSFQVAFSLRSYSLTEAAMIIFSSRAYNVLPLIPICKQMINDRAADPFLHLVDESRLTAVKDSSNDPSKIYGSPEDNNNALKSLSEIELSESQSRECIVSTIMNNIANMLDAELHNVRSQLLSDFTPDDMCPTSTQFFEVHADNPSSGSYETGHHQEGLLIDLGNDHDAFGEASESAEASASSIPASDLLSIDQLLETVGAEPAPQAGVVSADIGFKDMTSHCEALTIGKQQKMSAFMSFQQSVQAAGLPSSQPNQMELDLSQDPQLPQTGAHSTNPFTDDSLQGYPQYTKGPNGDNAQPGQDFQQQSLKLPAASPYDNFLRAAGC

SEQ ID NO: 54269 - protein, 144 aa, Zea mays
  Coding DNA Sequence Number=SeqID_12490
MGGFHIFMVDDASEADMGWIDDVDDVLVVGGFHGFMADSASEGTGEGVGGDIRVLMQGWAHTLGGFHVASEAGGRWFHSVVITAGAEDAGRECLGGKVGRAIWMTTRMGAKDVIGARWTTNGFRLRTTRVTHDDKKSCFKGVHK

SEQ ID NO: 54270 - protein, 67 aa, Zea mays
  Coding DNA Sequence Number=SeqID_12491
MSAVWGEGVGSGAACLGMGARRESPRGGRSAWAPPRALGVTPPAALGAWRDRHEEQRLRSGGSSRPP

SEQ ID NO: 54271 - protein, 434 aa, Zea mays
  Coding DNA Sequence Number=SeqID_12492
  Gene Ontology: Mol. function=transcription regulator activity; Cellular component=nucleus; Biological process=regulation of transcription
  Homolog annotation: Hit_ID=Q10NS6; Match level="QueryCoverage=54%, HitCoverage=55%, E-value=3e-64, Identity=62%"; Hit description=Helix- loop-helix DNA-binding domain containing protein, expressed
  Pfam annotation: Domain name=HLH; Domain location=215-264; Score =50.3; E_value=6.7e-12; Accession=PF00010.16; Description=Helix-loop -helix DNA-binding domain
MGGHGDHHHHHQEVGVLVDDDGDDEELEHQGRACGGATSGGVVEQGVGDGGSAGHQDAAGMAFEASISSVGSVSAATTMAPPQILCWPPPPQQQQLQQHHNLGGGHHQSPFFPLLQPPPPPPPPPPQPPFFADLYARRALQLAYDHHHSGGGGGPSTSSDPLGLYMGHPHHHQQHAGPGMMMMMPPPFASSSSPFGDFVGRMTAQEILDAKALAASKSHSEAERRRRERINAHLARLRSLLPNTTKTDKASLLAEVIQHVKELKRQTSEITEEACQLPTESDELTVDASSDEDGRLVVRASLCCDDRADLLPDLVRALKALRLRALKAEITTLGGRVKNVLLITADDSSAAAGCHDDGGAAAPDDDDDDRQEEAAPVSVSSQQHTVASIHEALRAVMERTAAASAAEDSGAAAAGLKRQRTTSLSAILENSRSI

SEQ ID NO: 54272 - protein, 369 aa, Zea mays
  Coding DNA Sequence Number=SeqID_12493
  Homolog annotation: Hit_ID=Q10NR7; Match level="QueryCoverage=41%, HitCoverage=66%, E-value=5e-20, Identity=47%"; Hit description =Expressed protein
MALTVLETTEQQLLPCQQSVEHGAGDGGNGKAAAAGAEKATVMLKETGHGGDVDRPDRDNIWSMIQAQKPPPAAPRQAQAPAPYVHPLARRSSGLLTQKSLETCTESLGSETGSDGFSDADDSATDRSCTGCGDDERGEEEEEEVAPHAAPPRSFPPPLPSLARRRVEPTTMEMRQERQDGRLLVKLDRRSGDQPETEQQADEEDEEDEVEVVDRGTVLEVKVSAQPQRQARSGSGPRVHRSALVINKFVGAEPVITSSCEIDGGAPAAQHPVAPVKPPRRATGSTTTAVAALLAAASALSATAAPPSNGDDAAVPGATCGENKLLMTARRHSSKEELMMHMRRCSGQLSPSLFVWEGTKGASQFATSS

SEQ ID NO: 54273 - protein, 330 aa, Zea mays
  Coding DNA Sequence Number=SeqID_12494
  Gene Ontology: Mol. function=protein serine/threonine kinase activity; Biological process=protein amino acid phosphorylation
  Homolog annotation: Hit_ID=Q10NR1; Match level="QueryCoverage=90%, HitCoverage=52%, E-value=4e-49, Identity=41%"; Hit description =Mitogen-activated protein kinase 1, putative, expressed
  Subcellular localization annotation: CTP_CleavageSite=52; ConfidenceScore=5.54e-01
MGPPPGAQDPAPSPSGGSGSSRRRFRRLDRRNASKHIAYDATNFCQYPPSPQAASAPGSGRASLASSAACSIDLVNSFRIGGSGDGGGDLRFLCENLGLSGPDDFAVPRADWEAHKAARSSASASSSPNSARPNYDSPQRNSPLSQVGAEEPAQASDAETELPAATGRDGPIEAPERPARLDLPLESTCPDARRAPGQGGIKGRAPATAVCGVGSTWDILRSLAPDEKDDAPASRSGRRFGHLDAVEKDDDERAAVLLMLDDLRLEESSESFTGTSSLSTTNDDDTSSTTTESMFYISPNGRFRRRIKSWSRGVLLGSGSFGTVYEGISE

SEQ ID NO: 54274 - protein, 1129 aa, Zea mays
  Coding DNA Sequence Number=SeqID_12495
  Gene Ontology: Mol. function=nucleoside-triphosphatase activity; Cellular component=nucleus; Biological process=cell cycle
  Homolog annotation: Hit_ID=Q10NR0; Match level="QueryCoverage=91%, HitCoverage=91%, E-value=0.0, Identity=53%"; Hit description=AT hook motif family protein, expressed
MGGLVEVRCRCRDLVMRQVTPWPPEVSVSMARMQLMLAVALPVYWRGSGGGHGRWKRRPAWTSGSGWLLQSLQNSSVSMRGSSSKQKQWQDQSNKDGVILVDESPQKKQRKGRKQDAILKEPNASRKRCKTSEAPDGPGSCQQLHISQIEASSPAAAPVIIDVDLMSTPSKAGHANSIDQDISPLKVDLRSEAKIAAEEIRRLSSGKKIHPFFHSRKLNKCASQDQDVINIENMHGLCDSERDPPFYPIHVVYQSEINVDTQNLLRPGASCQASLLDLNVEPEDPQNGCQPACYLWTDKYRPETVAQVCGNSEHVKFLAEWLKSWDEKGHKIGVANGDTNDNSYQDISDSDYSESASDCENTLLITGPVGCGKSAAVFACAREQGFNVIEVNTSDMRNGAYVRQKFEEATKSHGLEKWSQEEVINPLRDDSLDPDSGTPDRTEYQCLMSCATRVMIDCDQQKSPVGYYSGLKACDEPPKQVANKTLILFEDVDTVFDEDRGFISTILKMAETTKWPIILTSNSDIRRVVMFLQFWYQGHQFTERPKECLCGPFSLDLDAVHSTVPKMLPWEFPCKLSETLCMEVDKTILLAEEKKKQMEISDLEGLQLHVTAPLIKGRTSKTRRAKKSKLKRAHSTEHNDISPCKNELDDFHDLPDISLPSDKQIKRNRHRSLLLSESDDDPADVGTEKHNIFTVTEVGFFPQPSEVPPMHGQGISDQFHFPVESRETCEIADSFQNPPESNMYGSISQVCDTFMSQDVSCVPESSLILDGTSASISGDEFLSRAVSNGFSAFCEGTYTTSRMVLEDSDCVKNLMAERQKDVEDVVGETSETYMESFRRNEQASCSAAGFQLMDECSRAESIWLLSGKKSNDSCKVELVQDTWNRLRSCRLEFTSEANHNRATSGALKLVSEVSDLISESDLMLFRCYPLTKDTLDPSLTPCDEPVDSSWYSNQVEMGSVYAQHALRILSRNSQKIDGGSVDLSQELFASTAAVSFGKITCSGFRNDYGSTDLSHMKNPTTCIFKRRERHVHLCETLSPVVPPKLLQSLRGPAFVDYLSSISQISKLENLRLSENKVINKRRRSRQARHYLSSGALQLSHEDVVLLEESGCFSSRRERVEVVEQAPVST

SEQ ID NO: 54275 - protein, 178 aa, Zea mays
  Coding DNA Sequence Number=SeqID_12496
  Gene Ontology: Mol. function=protein serine/threonine kinase activity; Cellular component=cytoplasm; Biological process=protein amino acid phosphorylation
  Homolog annotation: Hit_ID=Q10NR1; Match level="QueryCoverage=50%, HitCoverage=18%, E-value=7e-38, Identity=72%"; Hit description =Mitogen-activated protein kinase 1, putative, expressed
  Pfam annotation: Domain name=Pkinase; Domain location=1-144; Score= -100.6; E_value=0.014; Accession=PF00069.15; Description=Protein kinase domain
  Pfam annotation: Domain name=Pkinase_Tyr; Domain location=1-112; Score=-168.8; E_value=0.041; Accession=PF07714.7; Description =Protein tyrosine kinase
  Pfam module annotation: Pfam domain module=Pkinase::Pkinase_Tyr; Domain location=1-144::1-112
MKPTDSKSNFAKYFQIQDIKCANILVHANGSVKLADFGLAKEVVNPQQTYGPAADIWSLGCTVLEMLTRQIPYPDLEWAQALYRIGKGESPAIPNTLSRDARDFISRGRMILVRANHAELAEREFVLTGASIVNAQQHCRQPLIGVSLVDSLAYAREEDVLVEPPANFKNELASDKYY

SEQ ID NO: 54276 - protein, 171 aa, Zea mays
  Coding DNA Sequence Number=SeqID_12497
  Homolog annotation: Hit_ID=Q10NR2; Match level="QueryCoverage=76%, HitCoverage=53%, E-value=1e-27, Identity=59%"; Hit description =Expressed protein
MAATNVESMAGDVNAGAMRVKPGGVNEGAAARARGLRGEASSTNNKGKSMDIEGTDAGETDKALSSKTVKQKDSVESVIKQISGIAISESHATPSTNTTNNSQPESSAPDIDKKIRALKKKRYEILIIRLAEAQVQGDPEKLRLEALEKMKKIDGWLKELKLLEDKRAPAA

SEQ ID NO: 54277 - protein, 202 aa, Zea mays
  Coding DNA Sequence Number=SeqID_12498
VWFSGVGKGGRGGRQSSVVPPQESAPILRERTLEALRSPKAAIAGPRGRAGEDGVLGAKTLAHPPLLLQHHLFVEPHHTELHGDRHKTLKELMAIGPSLVSPPWGCGQAEMGWGAMQGAGEGESESRRKTKSDGEQRGRGRVGGARFDRGFVWSNAETTMGVKTHRFFLMEVVTLWNPSPNRFLETRSSNVEDTGYCGSKEL

SEQ ID NO: 54278 - protein, 440 aa, Zea mays
  Coding DNA Sequence Number=SeqID_12499
  Homolog annotation: Hit_ID=Q337M3; Match level="QueryCoverage=82%, HitCoverage=73%, E-value=1e-32, Identity=31%"; Hit description =Expressed protein
MPDARCDDDGDDCVILDGDPDKPVAVAKEEGGPPRDAPEDELQIVAEKGELACRDFPHPRHLCAALPFSSSSHASHCSMCHCYVCDCPAPCALWDKHCHATDKDRKWKRLREISKNKSQPNPKRRIPQHFKRSVTTGPSSSQYSANMTGFTGRFPASGTANQIQQVDISVMVAQDMVRGISLPSAPSPTPRTKNRSYGSKGAQIAPPIYTFSNDNHFQPSVPSYGLVRPHASKTAHVSSGGHVSAKTFQSNPSQFCVRAPMGSHGHRYRPPSYPQPPPNTVVGTGVPLSRCASLNAEAQGTQRPQVPPAGTISKESLANLARRLGLPYYNTNQPLGQQSTSTSQFLHMHPHEMLPAQGAQNTTWQAYVKKSVATTSQIVPSSEHNSSIHAPGSTVLPSGSVQIQQPLRPIQIGHCSIIWCSPDPPAASAPTRFSEQCYSE

SEQ ID NO: 54279 - protein, 360 aa, Zea mays
  Coding DNA Sequence Number=SeqID_12500
  Gene Ontology: Mol. function=binding; Cellular component =intracellular; Biological process=RNA processing
  Homolog annotation: Hit_ID=Q10RZ6; Match level="QueryCoverage=96%, HitCoverage=97%, E-value=4e-78, Identity=52%"; Hit description =Expressed protein
  Subcellular localization annotation: CTP_CleavageSite=67; ConfidenceScore=5.06e-01
MLVRSASTPVLGALHPSGCHSPAVSSPAVHFAESPASAAYHAPPISCHLGGPGSGSDHERSRSRGAGAGMRRTCSEDNLASLAGGRADDHDHHHLLLPPSGKGAPRARPVPLETIQSFRGPHASTDDEEEEDDDDEDAYEVERELRFGQFSFAGGAYSQEHPLFLARGLGIDRLGSGLLSADGGGGFGGSDGSGSGGGGGNLVTSGNGGDRSGIETHYKKMIEEDPCNVLDDAQISYTKFLILLLTAAPTCAAHWIGSQVKGDYRRADEYYSRAILADPDDGELLSEYAKLVWEVHRDEDRASSYFERAAKASPQNSHVLAAHAAFLWDTDDEEGGADALSYAAFAQPAHSSLASATATT

SEQ ID NO: 54280 - protein, 242 aa, Zea mays
  Coding DNA Sequence Number=SeqID_12501
  Gene Ontology: Mol. function=transcription factor activity; Cellular component=nucleus; Biological process=regulation of transcription, DNA-dependent
  Homolog annotation: Hit_ID=P93392; Match level="QueryCoverage=68%, HitCoverage=51%, E-value=1e-27, Identity=50%"; Hit description=S25 -XP1 DNA binding protein
MVPNFSSYYHSYIISNAAYAHDWRLPEQDDGIRLCIGLPAPAAAHHVVDVDTNHYSSNTIVGAAFQTSSDPAATYDLGESTQRRSGTPRATASACGSAPSTAPGPPRSPTTKPPTPCAAPPRCSTSPSSAWRSRCARWDWGSAALGLGLGGGAVEDSPVLALKRRHCIRKRLRTNKSKAATADKEGCHVEAEAREQVAVTARHGQGKRKDKVTAGVLELKDLGPEYLEELLAQSDQCNEEFH

SEQ ID NO: 54281 - protein, 158 aa, Zea mays
  Coding DNA Sequence Number=SeqID_12502
  Subcellular localization annotation: CTP_CleavageSite=13; ConfidenceScore=5.16e-01
MTREVGQGSGSSECMGGPPPPPITTPPPDLRFHRRRAASHAPASARRSLAPAANSSPITPPARPARPQFAPSRRQPQIAVAPRPTSVRPRLRSPPPQTARRNPARTPRTHAIRAIPLPTANRRRAAPDLRSPFARPRRKQLADNPANSSPIYPSEKRI

SEQ ID NO: 54282 - protein, 600 aa, Zea mays
  Coding DNA Sequence Number=SeqID_12503
  Gene Ontology: Mol. function=glutamate-tRNA ligase activity; Cellular component=cytoplasm; Biological process=tRNA aminoacylation for protein translation
  Homolog annotation: Hit_ID=Q9LIZ8; Match level="QueryCoverage=99%, HitCoverage=93%, E-value=0.0, Identity=57%"; Hit description =Putative multifunctional amino acid-tRNA ligase
  Pfam annotation: Domain name=tRNA-synt_1c; Domain location=161-431; Score=201.4; E_value=2.1e-57; Accession=PF00749.11; Description=tRNA synthetases class I (E and Q), catalytic domain
  Pfam annotation: Domain name=tRNA-synt_1c_C; Domain location=379-575; Score=185.9; E_value=9.5e-53; Accession=PF03950.8; Description=tRNA synthetases class I (E and Q), anti-codon binding domain
  Pfam module annotation: Pfam domain module=tRNA-synt_1c::tRNA-synt_1c_ C; Domain location=161-431::379-575
ESLHGVNPIILYIARGASIASLSGKNDIEFGHVVEWLEYAPTFLSGSEFENACLFVDGFLASRTFLVGHGLTIADIAVWSNLAGIGQRWESLRKSKKYQNLVRWFNSIDSEYKEALNEVVAAFVGKRGIGKSPAPSLKEKVHDSKDPSAPEVDLPGAKVGKVCVRFAPEPSGYLHIGHAKAALLNKYFAERYQGRLIVRFDDTNPSKESNEFVENLLKDIETLGIKYDAVTYTSDYFPKLMEMAESLIKQGKAYIDDTPKEQMRKERMDGIESRCRNNTVEENLSLWKEMVNGTERGMQCCVRGKLDMQDPNKSLRDPVYYRCNTDPHHRVGSKYKVYPTYDFACPFVDALEGGASKNLNLMEWDKLWTINKKIIDPVCARHTAVLKDQRVIFTLTNGPEEPFVRILPRHKKFEGAGKKATTFANRIWLDYADAAAISKGEEVTLMDWGNAIVKEIKVESGVITELVGELHLEGSVKTTKLKITWLADIEELVPLSLVEFDYLISKKKKDSLFLGKLMLNYSVGGIWQLEEDEDFLDNLNPCTRREIPALGDANMRNIKRGEVIQLERKGYYRCDAPFIRSSKPVVLFAIPDGRQQASLS

SEQ ID NO: 54283 - protein, 110 aa, Zea mays
  Coding DNA Sequence Number=SeqID_12504
MAQLCNDFIKNNKEYLGAVAVKQNGTSMKETVVSANPISSSNRNQGRTRDESPCEAKIRKGEVTRQRLFRKLFLRNFRRLSASLGAPFFQGIPIFTRKNELISLGKMKIP

SEQ ID NO: 54284 - protein, 66 aa, Zea mays
  Coding DNA Sequence Number=SeqID_12505
MAHSGGDGIARAGGVKGQHGHRFQAYPFGISGPSIEIGIRIIFMLWKNEEVILYIPTLAKSEEKEH

SEQ ID NO: 54285 - protein, 512 aa, Zea mays
  Coding DNA Sequence Number=SeqID_12506
  Gene Ontology: Mol. function=transporter activity; Cellular component= membrane; Biological process=transport
  Homolog annotation: Hit_ID=Q2QN30; Match level="QueryCoverage=91%, HitCoverage=92%, E-value=0.0, Identity=81%"; Hit description=Metal transporter Nramp2, putative, expressed
  Pfam annotation: Domain name=Nramp; Domain location=109-440; Score =599.1; E_value=4.1e-177; Accession=PF01566.9; Description=Natural resistance-associated macrophage protein
MAATDDGAVDSASAAAAARAVEEARALLPAPAPDYDDEDLEERAYEAAEKVIVSISGGPDPEDVDGDGDGAELCSSSGSSPPPFSWRKLWLFTGPGFLMSIAFLDPGNLEGDLQAGAVAGDTLLWLLMWATAMGLLVQLLAARLGVATGRHLAELCRDEYPDWARRALWLMAEVAMVGADIQEVIGSAIAIKILSRGYLPLWAGVVITALDCFIFLSLENYGVRKLEAVFALLITTMAVSFAWMFTDTKPNGKDLLIALVQSRKIDQNKEYQVREALRYYSIESTIALVVSFMINLFVTTVFAKGFYGSKEAGNIGLENAGQYLQEKFGGGFFPILYIWGIGLLAAGQSSTITGTYAGQFIMGGFLNLRLKKWVRALITRSFAIVPTITVALFFDTSDSALDILNEWLNVLQSIQIPFALIPLITLVSKEQVMGVFKIGPNTQAVTWTVATLLITINGYLLMDFFSSEIRGPLSGSLLCVAVLIYASFVLYLILRGTELSEKIAKAIRGSFS

SEQ ID NO: 54286 - protein, 693 aa, Zea mays
  Coding DNA Sequence Number=SeqID_12507
  Gene Ontology: Mol. function=RNA-directed DNA polymerase activity; Cellular component=intracellular; Biological process=RNA-dependent DNA replication
  Homolog annotation: Hit_ID=UPI00004C1731; Match level="QueryCoverage =94%, HitCoverage=52%, E-value=0.0, Identity=79%"; Hit description =UPI00004C1731 related cluster
  Pfam annotation: Domain name=RnaseH; Domain location=332-459; Score =10.9; E_value=5.6e-06; Accession=PF00075.14; Description=RNase H
  Pfam annotation: Domain name=rve; Domain location=472-629; Score =93.5; E_value=6.3e-25; Accession=PF00665.16; Description=Integrase core domain
  Pfam module annotation: Pfam domain module=RnaseH::rve; Domain location=332-459::472-629
MAVPNYTYLKLKMPGPNGVITVGPTYKHAFECDVECVEMKESDQLATSFITPFGMYCYVTMSFGLRNAGATYQRCMNHVFGQHIGRTVEAYVDDIVVKTRKASDLLSNLEVTFRCLKAKSVKLNPEKCVFGVPRGMLLGFIVSERGIEANPEKIAAITSMGPIKDLKGVQRVMGCLAALSRFISRLGERGLPLYRLLRKAECFTWTPEAEEALGNLKALLTNAPILVPPAAGEALLIYVAATTQVVSAAIVVERREEGHALPVQRPVYFISEVLFETKIRYPQVQKLLYAVILTRRKLRHYFESHPAIKSQVLADFVAEWVDTQLPTAPIQPELWTMFFDGSLMKTGAGAGLLFISPLGKHLRYVLRLHFPASNNVAEYEALVNGLRIAIELGVRRLDARGDSQLVIDQVMKNSHCRDPKMEAYCDEVRRLEDKFYGLELNHIARRYNEIADELAKIASGRTTVPPDVFSRDLHQPSVKINDTPGPEKAPGGYTHLLVAIDKFSKWIEVRPLNSIRSEQAVAFFTNIIHRFGVPNSIITDNGTQFTGRKFLDFCEDHHIRVDWAAVAHPMTNGQVERANGMILQGLKPRIYNDLNKFGKRWMKELPSVVWSLRTTPSRATGFTLFFLVYGAEAILPTDLEYGSPRTRPYADQSNQANREDSLDQLEEARDMALLHSARYQQSLRRYHTRGVRS

SEQ ID NO: 54287 - protein, 72 aa, Zea mays
  Coding DNA Sequence Number=SeqID_12508
MAQALNIEIVLHPLDQDRTHQTDPAETGGGERKTSGEVLTRYVGEGGAARHDARGGDLPGQLTWNSTRPEDS

SEQ ID NO: 54288 - protein, 198 aa, Zea mays
  Coding DNA Sequence Number=SeqID_12509
MVARFSSPSFAFAFAFAPHEATTHPPPHLRVGISLGRDTRKKIHGRDGFGCTICVSVCVRPSRTEKANAFLAHGCCSASASARAHVCSAEKPSPVLLAAAAQFWWRGNQGKAGAAQQPGQKLGSSNAQAAELLSLLRRAQLSSAQLADPSRPGECAAKSYITRPAPVIASGGGGDESYDPASRRGSGRTRTPTSIWCA

SEQ ID NO: 54289 - protein, 71 aa, Zea mays
  Coding DNA Sequence Number=SeqID_12510
MTRPRWGRALRLWGKHAPVSVGRPSKLAIGEGLAQWRERWGWGCLAPDPTMGGHRRSGAQQACAFKKYVDI

SEQ ID NO: 54290 - protein, 74 aa, Zea mays
  Coding DNA Sequence Number=SeqID_12511
METPYGVKTRILQVTMSCLPLSARQVSYLPIRKLNKACGPGRVWIWAEGAAVLTEPLRQDKKPAQPRTVDRAPR

SEQ ID NO: 54291 - protein, 337 aa, Zea mays
  Coding DNA Sequence Number=SeqID_12512
MEFGVHQGTTVALAIAQLHFGGNLRGAIILLDGSTTASQDCMIIDPSSVPTPMFCTNWIRMDLDQDQASRSSVPSPTGRTDVKESYQRKFTSSGSGPACWAQRTRYAASGVRQGHLPLTAKRLPAPRQAEQIRYARREWTWTPTPPGPDERKGQAQILISSTGIRLIGHGHHSPPAQSVCAVAMDPMVLVLLHATVARPPVLTAVQFDTGAVCHGCLSAGSLVCSIDSHPVSGREAEAGSPAQECTFASSGIRGIREWEVAALPLAAVAATAGKEGSSCGSALRQRRGRARAAFPTALHSPLQLSRNTKKQQPATISNGHVSAREPNMHALLSSYYC

SEQ ID NO: 54292 - protein, 39 aa, Zea mays
  Coding DNA Sequence Number=SeqID_12513
MPKLSPIKLRHSDMSQDEGTIVKGIIVIIHRLRPVPINR

SEQ ID NO: 54293 - protein, 166 aa, Zea mays
  Coding DNA Sequence Number=SeqID_12514
MAKSFIIALEGLVLTWYTSDLRASVLYSHCIRDPPKHLQELYQLFKKYSRVRLTAARSGLRRHRKLRLARPQGSDSGSAPEDDGLRFARPQGSDSGSAPKDDGLRFARPQGSDSGSAPEDDELRLARPQGLNSGSAPEDDELRLARPQGSDSGSAPEDDELRFARP

SEQ ID NO: 54294 - protein, 406 aa, Zea mays
  Coding DNA Sequence Number=SeqID_12515
  Gene Ontology: Mol. function=protein dimerization activity; Cellular component=nucleus; Biological process=regulation of transcription, DNA-dependent
  Homolog annotation: Hit_ID=Q7X970; Match level="QueryCoverage=41%, HitCoverage=6%, E-value=3e-27, Identity=48%"; Hit description=BZIP -like protein
  Pfam annotation: Domain name=bZIP_1; Domain location=122-185; Score =30.6; E_value=5.5e-06; Accession=PF00170.11; Description=bZIP transcription factor
  Pfam annotation: Domain name=bZIP_2; Domain location=122-176; Score =9.4; E_value=0.076; Accession=PF07716.5; Description=Basic region leucine zipper
  Pfam module annotation: Pfam domain module=bZIP_1::bZIP_2; Domain location=122-185::122-176
MSDDSDGQRQCRRGVTVDVELGAAMALADMAGVAGPGGEQPPPVRRATPAPSAHQEDEASTRLSLELGEVSIQASPCSSSSSFGGHPPPPPSHQAAYQQPAVPEPATTGYGPRPRHAVTEAEKEAKRLRRVLANRESARQTILRRQAIRDELARKVADLSSQNESMKKVGTTAPCSAAAASGVMSSSQACVRTEDTSVDFIAFSDWSWRRQHKLITRTCAHSILRAQVAKTSRKPAMPAQQQAAESLVPAPPRPGFLYSAAPPAPVPVPYVWGSWPPSAAAGSEQHGSPPPLCLQPCAWYYPAVADPRGSPSSAHAQQPPAFQDPRAATGEEDTDDDPCSLTLGLEVDKRSAPVGIVAGPASGSGSGGGGAQSDRDRAAQARRRRRDLTKLKHTHAAARPGSSEQW

SEQ ID NO: 54295 - protein, 243 aa, Zea mays
  Coding DNA Sequence Number=SeqID_12516
  Subcellular localization annotation: CTP_CleavageSite=53; ConfidenceScore=5.74e-01
MPSVAGPAPSRGPAAAFPNGLRAHPGRSPSPAQPAPLRPTTRMINSAPLAYTRAGQVAGPTASRPAAQCAQPVQRPRSPCSCRRHAHVGMVRTPGAPPTGQQAQALGHRGAASRHSCASSKNCLPAMCTQSRNRSADAQRAGRAAMAAGLPSHDLCMARPRAKHLPHRVGAASPRQISSSSAFNSHARARCLHAQHTSSSAVVARDVWITGGDEDDVYDYSNGKEEGVEADLQEFQDFDEFED

SEQ ID NO: 54296 - protein, 66 aa, Zea mays
  Coding DNA Sequence Number=SeqID_12517
  Subcellular localization annotation: CTP_CleavageSite=45; ConfidenceScore=5.26e-01
MAAGLPSHDVCKARPRAKHLPHRVDAASPRQLSSSFAFNSHTRARCLHAQHTSPSVVVTSINVSSI

SEQ ID NO: 54297 - protein, 114 aa, Zea mays
  Coding DNA Sequence Number=SeqID_12518
MDCGLIQTSAKVSLAINLNEGVWLTINGQMVITFPELQYAHARYTAAAAVVGPSPTRDTVAKTQSATGEEERDDYWARQAVSARRRRRNVAGLTLGPHRPVTTEAVHVTGRLRG

SEQ ID NO: 54298 - protein, 154 aa, Zea mays
  Coding DNA Sequence Number=SeqID_12519
MDCGLIQTSAKVSLAINLNEGINGQMVITFPELQYAHARYTAAAAVVGPSPTRDTVAKTQSATDERSAWRIPWLEMDHGAGARSRNFAATITEYGGIRFGLRLKERRKGMTTGPARQEAARLTERARMSARAVRGFGPRSTLLLVGQIDGERPI

SEQ ID NO: 54299 - protein, 83 aa, Zea mays
  Coding DNA Sequence Number=SeqID_12520
MDTLPQEDDWRIIRLNTRQHHLQSLLHHPLIKILARGELTYGRGSASGRSNASLTRCVNRSRDVEDKNQIALKVMLVDEPKDG

SEQ ID NO: 54300 - protein, 1019 aa, Zea mays
  Coding DNA Sequence Number=SeqID_12521
  Gene Ontology: Mol. function=cellulose synthase (UDP-forming) activity; Cellular component=membrane; Biological process=cellulose biosynthetic process
  Homolog annotation: Hit_ID=Q5Z6E5; Match level="QueryCoverage=98%, HitCoverage=99%, E-value=0.0, Identity=80%"; Hit description =Putative cellulose synthase-like protein D4
  Pfam annotation: Domain name=Cellulose_synt; Domain location=158 -1019; Score=1865.3; E_value=0; Accession=PF03552.5; Description =Cellulose synthase
MHEGLGRWGLDSLKYGCHSNYTVRMPPTPDNQPYSVGGGAPLSVCAGGTKPDDLPLPPSKLVNRRGGACADDGLAGASGKMDRRLSTARVPAPSKSLLVRSQTGDFDHNRWLFETRGTYGIGNAYWPQDSSAYADDEDGGVGSDPVKMEDLVDKPWKPLSRKVPIPPGILSPYRLLVLVRFISLFLFLIWRATNPNLDALWLWGISIVCEFWFAFSWLLDQMPKLNPINRAVDLSALREKFESPTPSNPTGRSDLPGLDVFISTADPYKEPPLTTANSLLSILGTEYPVEKLFVYISDDGGALLTFEAMAEACEFAKVWVPFCRKHSIEPRNPDAYFNQKGDPTKGKKRPDFVKDRRWIKREYDEFKVRINGLADLIRRRANAMNARERKIARDKAAAASSDAPVADASTVKATWMADGTHWPGTWLDSAPDHAKGDHASIVQVMIKNPHYDVVHGDAGSHPYLDFTGVDVRIPMFVYLSREKRPGYDHNKKAGAMNAMVRASAILSNGPFMLNFDCDHYIFNCMAIREAMCYMLDRGGDRICYIQFPQRFEGIDPSDRYANHNTVFFDGNMRALDGLQGPMYVGTGCLFRRYAIYGFNPPRTNEYRGIYGQVKVPIDPHGHHAPGAAEELRPLSEHPDHEAPQRFGKSKMFIETIAVAEYQGRPLQDHPSVQNGRPPGALLMPRPPLDAATVAESVAMISCWYEDGTEWGQRVGWIYGSVTEDVVTGYRMHNRGWRSVYCITRRDAFRGTAPINLTDRLHQVLRWATGSVEIFFSKNNALLASQRLKFLQRLSYLNVGIYPFTSLFLIMYCLLPALSLFSGQFIVATLDPTFLCYLLLITITLMLLCLLEVKWSGIGLEEWWRNEQFWVIGGTSAHLAAVLQGLLKVIAGIEISFTLTAKAAAEDDDDPFAELYLVKWTSLFIPPLAVIGINIIALVVGVSRAVYAEIPQYSKLLGGGFFSFWVLAHYYPFAKGLMGRRGRTPTLVYVWAGLISITVSLLWITISPPDDRITQGGVDV

SEQ ID NO: 54301 - protein, 433 aa, Zea mays
  Coding DNA Sequence Number=SeqID_12522
  Gene Ontology: Mol. function=metal ion binding; Cellular component =integral to membrane
  Homolog annotation: Hit_ID=Q10GD6; Match level="QueryCoverage=97%, HitCoverage=80%, E-value=1e-103, Identity=48%"; Hit description=Zinc finger, C3HC4 type family protein, expressed
  Pfam annotation: Domain name=zf-C3HC4; Domain location=19-59; Score =25.7; E_value=0.00017; Accession=PF00097.15; Description=Zinc finger, C3HC4 type (RING finger)
MANQVVKVRREAVAACMTCPLCNTLVKDATTISECLHTFCRKCIFDKIEEEDLECCPICNIDLGSVPLEKLRPDHNLQDVRAKIFPLKGRKAKSPEVLPPVTMPTRRKERSLSSLVVNAPKVSTQTTMTGRRTKAVARKAGSLRGSSFSVEKPVKRERDSVEDHKESASSPETLNKFTQNKRQCTSSAEPSQQKDKGVENGGESRDGKLDLWKPLDCLAEVANRSKSFKSNSQGCDSKLELEPTHVINPEAQTCRNRHRKDNGKTKVEEEKNNAAPATTSGIVNPKKLRRIRQKSGSGFGDSGISLQAVLDAAGPRHEKRIGPVWFSLVASEDQVGEVPLPQIPANFLRIKDGNIPVSFIKKYLMKKLHLADEDEVEIKFMGQPVVPTLQLYNLVHLWLQKASTSQRVPASVGSSAKDFIMVLAYARKAPQQL

SEQ ID NO: 54302 - protein, 261 aa, Zea mays
  Coding DNA Sequence Number=SeqID_12523
  Gene Ontology: Mol. function=metal ion transporter activity; Cellular component=membrane; Biological process=metal ion transport
  Homolog annotation: Hit_ID=Q10D38; Match level="QueryCoverage=79%, HitCoverage=45%, E-value=7e-61, Identity=63%"; Hit description =Magnesium transporter CorA-like family protein, putative, expressed
  Pfam annotation: Domain name=CorA; Domain location=32-258; Score =92.6; E_value=1.2e-24; Accession=PF01544.9; Description=CorA-like Mg2+ transporter protein
MKHNIPEAFRAQNLKRLLRPKAQVATLKKKTAVTTSWISIDAKGKSVILDVDKYAIMRRVQVHARDLRILDPMLSYPSTILGREKVIVLNLEHIKAIITAEEVLLRDPYDDNVIPIVAELKRRLPQDNLTCQDQGGEEEEHPSARNDMDTEEENEFPFEFRALEVALEAICSFLDARTRELEIDAYPALDELTSKVIVGFAATYWGRVLALKISSRNLDRVRKLKSAMTRLTNRVQKARTRINLEQAEIIVSCLGLDFSEW

SEQ ID NO: 54303 - protein, 55 aa, Zea mays
  Coding DNA Sequence Number=SeqID_12524
  Homolog annotation: Hit_ID=Q1S4N1; Match level="QueryCoverage=98%, HitCoverage=5%, E-value=5e-09, Identity=48%"; Hit description =Peptidase S8 and S53, subtilisin, kexin, sedolisin; Integrase, catalytic region; Zinc ...
  Homolog annotation: Hit description=finger, CCHC-type; Peptidase aspartic, catalytic
MKEFESIKEYSDKLIDITNKQILVSVPEKHEAIIASLENTKDLTQLRVVELINVL

SEQ ID NO: 54304 - protein, 115 aa, Zea mays
  Coding DNA Sequence Number=SeqID_12525
  Homolog annotation: Hit_ID=Q1S4N1; Match level="QueryCoverage=81%, HitCoverage=7%, E-value=1e-09, Identity=31%"; Hit description =Peptidase S8 and S53, subtilisin, kexin, sedolisin; Integrase, catalytic region; Zinc ...
  Homolog annotation: Hit description=finger, CCHC-type; Peptidase aspartic, catalytic
MSNGDLNVQCYFVEPPKDVKFSEEALWNLEVIEAEMVEQSQIELNVRTDEVQHQDGDSVDDLPVKGTRPISEIFESYNVVVLEPASYEKTVKENGWKEAMEAELAMIKENDLRVG

SEQ ID NO: 54305 - protein, 303 aa, Zea mays
  Coding DNA Sequence Number=SeqID_12526
  Gene Ontology: Mol. function=transferase activity, transferring hexosyl groups; Cellular component=integral to membrane; Biological process=carbohydrate biosynthetic process
  Homolog annotation: Hit_ID=Q2R1U9; Match level="QueryCoverage=99%, HitCoverage=64%, E-value=7e-94, Identity=47%"; Hit description =Glycosyl transferase family 8 protein, expressed
  Pfam annotation: Domain name=Glyco_transf_8; Domain location=33-277; Score=164.6; E_value=2.6e-46; Accession=PF01501.10; Description =Glycosyl transferase family 8
MANDTEEQVQVEKNEESYLIQLAGRTTPKGLHCLSIRLTTEYLLLQPEERQFPNQHKLQDLDFYHYAVFSDEILACAVVVNSTTASAKEPEKIVFHVVTDSLNLPAISMWFLLNPPGKATIDVQSIENFEWLSTEYSSALKEQKSNDPRYTSALSHLRFYLADIFPALDKIVLFDHDVVVQRDLTGLWSVNLNGKINFQQRGLMLVFAHGHLGLKRPLWKTKSLPLDWITFYNQTVALEKSWHAFGLGHNSGLSQGDIEHAAVIHYDGIMKPWLEIGIAEYKGYWSKHVQYDHPYLQECNIHE

SEQ ID NO: 54306 - protein, 54 aa, Zea mays
  Coding DNA Sequence Number=SeqID_12527
MALRLDNGEWCFDQKSLQAEAVKFFEKLYGKDPQSIRDLPDSGVTWSCLFGSIA

SEQ ID NO: 54307 - protein, 145 aa, Zea mays
  Coding DNA Sequence Number=SeqID_12528
MGKDKKGRGSPRRTGDKRKREPSPPSEDFGDSEYSEEFSSESEGSPGIADEVWTYIWSVEHAELEGSDESEVSLDEENSSSSSEKGSGGDGDDDDEGDESGEGGGGDGGNDGGKGGGGGSDGGKSDGDGKSDSSSSKASGKAPLA

SEQ ID NO: 54308 - protein, 257 aa, Zea mays
  Coding DNA Sequence Number=SeqID_12529
  Pfam annotation: Domain name=zf-CCCH; Domain location=139-165; Score =18.9; E_value=0.0042; Accession=PF00642.15; Description=Zinc finger C-x8-C-x5-C-x3-H type (and similar)
  Pfam annotation: Domain name=zf-CCCH; Domain location=76-101; Score =25.8; E_value=0.00015; Accession=PF00642.15; Description=Zinc finger C-x8-C-x5-C-x3-H type (and similar)
  Pfam module annotation: Pfam domain module=zf-CCCH::zf-CCCH; Domain location=139-165::76-101
MERERNAATAGAGRWEAPDGVIVLPVGSAAPQQGRQKEHQYQQRKREMEREREQQDPGAREGVLGLDPQPPEKVYYKTRLCEKFEAGKCAYEGGCTFAHGSEELRPPLPLPLLTSLVRRKSPLPSSSPGAAASSPHGGYCVRVCFEFRDTGACHRGDRCAFVHASTTEMPFPGGPRSMEYALRNSSSYAKAYSPGSTAAAYRNSSSTSTSNYAPATTRAFQSVSADAAGEGGCKATRLELLGRKKMNDIYGDWPEQD

SEQ ID NO: 54309 - protein, 192 aa, Zea mays
  Coding DNA Sequence Number=SeqID_12530
MRIFFNLRPPPAGAACPSRRLGLPLSLLLGDKKGSPKEHMTVAQGKREQAHRKEQELLRPSPRRSVRRLAVEVAPRLLELGKTEDDGQALHHRRTRRVSGSGIYDQSATRLGGQPCRAAGTTAPDSAAEDGQTQPGSARTAQQQPGAARTAVCRVGDLGLGLRGGGEPAAGSPGRFTKTAEDGDATRVFVGD

SEQ ID NO: 54310 - protein, 193 aa, Zea mays
  Coding DNA Sequence Number=SeqID_12531
  Gene Ontology: Mol. function=protein dimerization activity; Cellular component=nucleus; Biological process=regulation of transcription, DNA-dependent
  Homolog annotation: Hit_ID=Q5VR11; Match level="QueryCoverage=51%, HitCoverage=30%, E-value=3e-35, Identity=76%"; Hit description =Putative TGACG-motif binding factor
  Pfam annotation: Domain name=bZIP_1; Domain location=102-166; Score =40.9; E_value=4.3e-09; Accession=PF00170.11; Description=bZIP transcription factor
  Pfam annotation: Domain name=bZIP_2; Domain location=102-156; Score =41.9; E_value=2.2e-09; Accession=PF07716.5; Description=Basic region leucine zipper
  Pfam module annotation: Pfam domain module=bZIP_1::bZIP_2; Domain location=102-166::102-156
  Subcellular localization annotation: CTP_CleavageSite=23; ConfidenceScore=5.04e-01
MAAQEQEHEKQQAKTSTTSSLPSSSERSSSSAPNNLREGAEAAGAGVESDEEIRRVPELGGASASASASSGAGKEDGARAVAAGAQGHPPAAGKKRGRAPGDKEQNRLKRLLRNRVSAQQARERKKAYLTELEARAKDLELRNAELEQRVSTLQNENNTLRQILKNTTAHASKRSGGGGKGGDGGKKHHFAKS

SEQ ID NO: 54311 - protein, 48 aa, Zea mays
  Coding DNA Sequence Number=SeqID_12532
MRNHITGDKAKDRSLGEATYNGTRIVEGEEEEASLSVMHDSCECLMNP

SEQ ID NO: 54312 - protein, 89 aa, Zea mays
  Coding DNA Sequence Number=SeqID_12533
MAAIEAPLTQETDDGFSNGSVARGIGRGFHAQAAIGVALAGGCSRSSRLGVAAAVGPGGASRAACAGAGAAESGVVAPCARVRQSKGER

SEQ ID NO: 54313 - protein, 89 aa, Zea mays
  Coding DNA Sequence Number=SeqID_12534
MAAIEAPLTQETDDGFSNGSAARAIGRGFHAQAAIGVALAGGCSRSSRLGVAAAVGPGGALRAACAGAGAAESGAVAPCARVRQSKGER

SEQ ID NO: 54314 - protein, 149 aa, Zea mays
  Coding DNA Sequence Number=SeqID_12535
  Gene Ontology: Mol. function=rRNA N-glycosylase activity; Biological process=negative regulation of protein biosynthetic process
  Homolog annotation: Hit_ID=Q00531; Match level="QueryCoverage=64%, HitCoverage=17%, E-value=6e-23, Identity=56%"; Hit description=60 kDa jasmonate-induced protein
MPMHDLYLSIHSLTSSLSLWCICNANWTVEAAECTCSCGRPEAAKPDTVLGPKSKVSRPVLAKETSSGLPPPKWIHVVLNSKGGAAPTVAIHSDNAYIVGFTNSKRTWYQLSKTGTKDKLVDENPVMAGFDVNYSSLIGGGDKLQTIKG

SEQ ID NO: 54315 - protein, 161 aa, Zea mays
  Coding DNA Sequence Number=SeqID_12536
  Gene Ontology: Mol. function=rRNA N-glycosylase activity; Biological process=negative regulation of protein biosynthetic process
  Homolog annotation: Hit_ID=Q00531; Match level="QueryCoverage=54%, HitCoverage=26%, E-value=4e-14, Identity=37%"; Hit description=60 kDa jasmonate-induced protein
MTLEKIAPIVQVTPFNMMSDSYATFIQNVRAAVAGPKPDTVLGPKSKLSKTGTKDKLVDENPVMAGFDVNYSSLIGGGDKLPTLNVAKFRDKDDKPFQPFKGLGINSGEEALAVVALLKLILGSNSLLAWLKCFSGLLVKKLKREDTNYEKPKTAAIVNPL

SEQ ID NO: 54316 - protein, 94 aa, Zea mays
  Coding DNA Sequence Number=SeqID_12537
MVDRPSTLWGILSLTSCGTSFCCAIGGVFVGAVHGFAAASFGDPEGDFLSGEVAMRCRIPSTSATQEMVLKQKTAPGLKVINALENNDHGVSVD

SEQ ID NO: 54317 - protein, 141 aa, Zea mays
  Coding DNA Sequence Number=SeqID_12538
  Gene Ontology: Mol. function=rRNA N-glycosylase activity; Biological process=negative regulation of protein biosynthetic process
  Homolog annotation: Hit_ID=Q00531; Match level="QueryCoverage=97%, HitCoverage=25%, E-value=8e-34, Identity=54%"; Hit description=60 kDa jasmonate-induced protein
  Pfam annotation: Domain name=RIP; Domain location=7-141; Score=-76.7; E_value=0.023; Accession=PF00161.9; Description=Ribosome inactivating protein
MALEKIAPIVQVTPFNMMSDSYITFIQNVRAAVAGPKPDTVLGSKSKVSRPVLAKETSSGLPPPKWIHVVLNSKGGAAPTVAIHSDNAYIVGFTNSKRTWYQLSKTGTKDKLVDENPVMAGFDVNYSSLIGGGDKLQTIKG

SEQ ID NO: 54318 - protein, 108 aa, Zea mays
  Coding DNA Sequence Number=SeqID_12539
MVDRPSTLWGILSLTSCGTSFCCAIGGVFVGAVHGFAAASFGDPEGDFLSGEVAMRCRIPSTSATQEMVLKQKTAPGLKAQYPTSCGSFLYCGDFTSCDYENGRLRMR

SEQ ID NO: 54319 - protein, 116 aa, Zea mays
  Coding DNA Sequence Number=SeqID_12540
MAVSCVTGRRCERVAGGLAAPCRPPRASRGRAGRASRAVPGRHGRTWVHATSGDLQPHARKAVSRAGRALGRARREHGEEGDGEEGEEVGTGGLGRGENERILGLEWEIVGKQERR

SEQ ID NO: 54320 - protein, 67 aa, Zea mays
  Coding DNA Sequence Number=SeqID_12541
MDAGIFRGSGSFMAEGFCCVTTEEDGASVPLVSWAAPCGSGNCFAMAEELHRAAATALCTAARELRV

SEQ ID NO: 54321 - protein, 247 aa, Zea mays
  Coding DNA Sequence Number=SeqID_12542
  Homolog annotation: Hit_ID=Q9UQ35-2; Match level="QueryCoverage=54%, HitCoverage=5%, E-value=6e-07, Identity=26%"; Hit description =Isoform 2 of Q9UQ35
  Subcellular localization annotation: CTP_CleavageSite=34; ConfidenceScore=5.64e-01
MSSSSSSSSSSSSLSAFRTWGVPGPTSKLSPRALAQMGPRETEREGGKSRRETGVRGEIQRPSCLSRAQGRAKRSSSSFGAEPESEPWGRAKWSSSSSGAEPKSEPWGRAERSSSFSGAEPESEPWGRAEQSSSSSGAEPESEPWGRAEWSSSSSGAEPESKPWGLAERSSSSSGAEPESESEPWGRAEWSFLWRLRPDLAAVSLTLSSGTIVGAAQAALSSYQTGQWSGEVTTVTLALPIGGRASG

SEQ ID NO: 54322 - protein, 116 aa, Zea mays
  Coding DNA Sequence Number=SeqID_12543
MEGHCLPFVEGDQEESNIDPRAGWPEGISRRLGGHFITLGIECRPSGDSPSSREEVLVELLRVEYYLQALDIEHANLCAIIDIVPFPLRVPWEGDMAQGGLSLLLVREQGFEPKSE

SEQ ID NO: 54323 - protein, 84 aa, Zea mays
  Coding DNA Sequence Number=SeqID_12544
MALVLYFTDLLLLAARRSDLLGATLSLRPPSASLCPLAGVGMGLCKKWMMGRWLTMAALPRIRVIQRHPSSCTDLHAQEGGSAK

SEQ ID NO: 54324 - protein, 83 aa, Zea mays
  Coding DNA Sequence Number=SeqID_12545
MADTPAASQGSSSILNLALAVLPPSNLGDGKVESRGCQGRKRKEPIGVGIRASVAWIQWSTEHRAAVNGSAPRFDARAVEDGP

SEQ ID NO: 54325 - protein, 77 aa, Zea mays
  Coding DNA Sequence Number=SeqID_12546
MAGMTLRGSNMPGKHGQGLTERVGVAEEVGDKRWQRDKLQRGRGTTVGQGRGPEELGDDRESSIELQGSRWRTVTPH

SEQ ID NO: 54326 - protein, 641 aa, Zea mays
  Coding DNA Sequence Number=SeqID_12547
  Gene Ontology: Mol. function=ribonuclease H activity; Cellular component=mitochondrion; Biological process=DNA integration
  Homolog annotation: Hit_ID=UPI00004C1732; Match level="QueryCoverage =93%, HitCoverage=41%, E-value=1e-171, Identity=91%"; Hit description= UPI00004C1732 related cluster
  Pfam annotation: Domain name=rve; Domain location=358-512; Score =67.1; E_value=5.8e-17; Accession=PF00665.16; Description=Integrase core domain
MGCLAALSRFISRLGERGLPLYCLLRKAECFTWTPEAEEAVGNLKALLTNAPILVPPAAGEALLIYVAATTQVVSAAIVVERREEGHALPVQRPVYFISEVLSETKIRYPQIQKLLYVVILTRRKLRHYFESHPVTVVSSFPLGEIIQCREASGRIGRWAVEIMGETISFAPRKAIKSQVLADFVAEWVDTQLSAAPIQPELWTMFFDGSLMKTGVGAGLLFISPLGKHLRYVLRLHFPASNNVVEYKALVNGLRIAIELGVRRLDARGDSQLVIDQVMKNSHCRNPKMEAYCDEESCPSTEPKLGDWRGVPSRSSCWETGRSSTTAAPQASSSDAYPSPKARSSYKKYTRGLAVITQRLEPLLETPSDKKAPGGYAHLLVAINKFSKWIEVRPLNNIRSEQAVAFFTNIVHRFGVPNSNITDNGTQFTGRKFMDFCEDHHIWVDWAAVAHPMTNGQVERANVMILQGLKPQIYNDLNKFGKRWMKELPSVVWSLRTRPSRATSFTLFFLVYGAEAILPTDLEYGSPRARAYDDQSNQANREDSLDQLEEARDVALLHSARYQQSLRRYHARGVRSRDLQVGDLVLRLRQDARGRHKLTPPWEGPFVIAKVLKLGTYKLANSQGEVYSNAWNIRQLRRFYP

SEQ ID NO: 54327 - protein, 633 aa, Zea mays
  Coding DNA Sequence Number=SeqID_12548
  Gene Ontology: Mol. function=phospholipid binding; Cellular component= coated pit; Biological process=endocytosis
  Homolog annotation: Hit_ID=Q60EC1; Match level="QueryCoverage=99%, HitCoverage=89%, E-value=1e-147, Identity=49%"; Hit description =Putative clathrin assembly protein
  Pfam annotation: Domain name=ANTH; Domain location=31-369; Score =182.4; E_value=1.1e-51; Accession=PF07651.6; Description=ANTH domain
MAPSKLRQALGAVKDQTSIGLAKVGSGGSLEADLDVAIVKATRHSESFPADERHIREIVTLTRLSRVYVGSCVSSLSRRLGRTRSWAVALKTLVIVHRLLAEGDPAFEQELPRRRPGTSPRSSAPSPRTSTTASSAGCRAKQQGGGGAAPRGGGRPLHEEMYASPGNRFACGIAAFNGRQEDAADAEAQRTVALVARDPPTREMTVDQLLVKANQLHHLLDRFIACRPVGESLLLFLRGHAICLSELGPSYHACGFVTELPMTSVAGAAKANRVVGVSLYPLIKESVQLYCELTEVTATLIEQFAEMETADCERVHALFCGLAKQMEELETFYAWCKVACVCRQSDVPEVVEAVTQKKLELMDEFIRDRHAADSQQRLSPPDPEPMASPEPAPVEEDNDDMNATKALPAPEEPAAAAAQEESTAGKAEPDASLIVADDPVEEEADFLNLSADAMSGQEHGRQLELALFDGNAAPEGSVFQGSSADWETELVHSASALANQRAQLGGGLSMLVLDGMYNHAAAATNAQTTFSGSASSVALRPPPGPHMLALPAPPGGGSAVAGADPFAASALVPPPTYVQMSDMQTKRQLLTQEQQMWRQYGKNGMQQGALAMPNQNQQLLPHVGHNYAGYRTT

SEQ ID NO: 54328 - protein, 53 aa, Zea mays
  Coding DNA Sequence Number=SeqID_12549
MQNMKAKVDRRGLRGSRGEASRPMGRTVGEEMSAAVWSMGARYGAERHQPVWQ

SEQ ID NO: 54329 - protein, 614 aa, Zea mays
  Coding DNA Sequence Number=SeqID_12550
  Gene Ontology: Mol. function=nucleic acid binding; Cellular component= intracellular; Biological process=DNA integration
  Homolog annotation: Hit_ID=Q8H6I0; Match level="QueryCoverage=97%, HitCoverage=55%, E-value=1e-142, Identity=66%"; Hit description =Putative gag-pol polyprotein
MSGDHAKNEMVIGEKTATSNGKAPSRESTNRKKDGSPSRIRSHKSGEKKKKMKKVVYYETNSSSPSTSGSDAAFVTSKRQERKYSKIPLRYPHIPRHTPLLFVPLGKPSTFDGEDYSRWSDMMRYHLTSLHKSIWDVVEFGAQVPSVGEEDYDEDEVAQIEHFNSQATTILLTSLSREEYNKVQGLKSAKEIWDVLKTAHEGDEVTKITKQETIEGELGRFMLNQGEDPQAMYNRLKTLVNQVRNLGSSKWDDHEMVKVILRSLVFLNPTQVQLIRGDPRYKLMSPEEVIGKFVSFELMIKGSKKIIEQAASFTPEAQPVAFKATEEKKEESTSSRPPIDASKLDNEEMALIIKSFRQILKQRRGKDYKSRSKKDSDESSTDSSFDEDAANITVTKGLLFPNVGHKCLMAKDGRKKKVKSRSSTKYATSSDEDNSSDEEDNLLTLFANLNMQQKEKLNELISDIHEKDELLDTQEDFLIKENKKHVKVKNAYALEVEKCEKLSSELSTCHDVISSLRNENARLIAKVESSNVYASGGSSWIIDSGCTNHMTGEKKMFSSYEKNQDPQRAITFGDGNQGITVFRRSDDSVAFKGVLEGKITNPRDLKGILETGSK

SEQ ID NO: 54330 - protein, 102 aa, Zea mays
  Coding DNA Sequence Number=SeqID_12551
MPLPQRAQRPPLVMAGSVNAASAPYIYIYLPNLSPYYLDSGEADDERGGGARGGEVSHIELVTMSPRSRCIYLLLDFVLAPVTFLFFFPKFFDWWSSKLGRS

SEQ ID NO: 54331 - protein, 102 aa, Zea mays
  Coding DNA Sequence Number=SeqID_12552
MPLPQRAQWPPLVMAGSVNAASAPYIYIYLPNLSPYYLDSGEADDERGGGARGGEVSHIELVTMSPRSRCIYLLLDFVLAPVTFLFFFPKFFDWWSSKLGRS

SEQ ID NO: 54332 - protein, 267 aa, Zea mays
  Coding DNA Sequence Number=SeqID_12553
MARLLLSVVLLHWRGRTLFRLHARSLIRVANNTSSSHLLRAQTEWESRPPKSPSAERPFEGLRGVHLSASTVYDYIEHTHEMSHDVTNGDNDHDHNDSEPGGNPPHNSPDSPPGINKAHGIVSATTPDNTTPPSSDPKGDKRSCPPSPNKRAQEQPQEVAPNPFCRPKLIVAWPRSDDCLENYEPGRFMLTLGDLMEESWEVRKFYLWYMEAAKAGLHSFIIHVPHKYFSMMQAYVCKRLGENVHYLPLLRINERVIKGYDIPDDHE

SEQ ID NO: 54333 - protein, 137 aa, Zea mays
  Coding DNA Sequence Number=SeqID_12554
MVTTSLMVGRSKLGCSLCPALSFKDLHHPCWGGGRGEPGPAFAWAGDPLLPPASGVETILQLCGGGVPQPCGGRRTAAAVVGGRDPCGDLGYDGPSLVLASSFEVEILPLVPPSEAGPDSSEGGDDAEGAAAPSVDV

SEQ ID NO: 54334 - protein, 91 aa, Zea mays
  Coding DNA Sequence Number=SeqID_12555
MSEPWGRRSGVRRLPGLSPSPSPGLGEAELPMVPAAGPDCLSASLCQVAPQSERRRRRCLSVRPALQLYAHGGYQMRIRSLEGTLNYGPRQ

SEQ ID NO: 54335 - protein, 359 aa, Zea mays
  Coding DNA Sequence Number=SeqID_12556
FKKKLVSELKVAEDNKDWGLFIDSCFTHCQTPFDITWNSPISPRLGNKPSSRSFSASLLDAIYRSLDDGDGADVVVDVARGSVEEKAAAAATAQFWWTNKAAPKPCRQSSSTADRDRRRREAGVARPRHSGSGYASSSDSSAASYSSLSCSSASTVGIESTCRRHGPAPPRVSLSEESVATDTEEATPLPPKSKPKKKARPCFPVARIRPRASVPPPSSGPQPPSSPAKFACALKALFSSARLQRKPKAPAPARTTPPPKISQPPRMSTTSAAKAADAPQPSEPTTVRLHPEAEASVVRRRVEELVRGLEELEEDEEGSDASSDLFELESLRGAGADELPVYGTTSLVANCAIAQGPAR

SEQ ID NO: 54336 - protein, 56 aa, Zea mays
  Coding DNA Sequence Number=SeqID_12557
MEGSWDCATKSGARGGCRRQGQRRTVRHATVDAYDMFDIWEFKSQNRKLEAGLNLE

SEQ ID NO: 54337 - protein, 38 aa, Zea mays
  Coding DNA Sequence Number=SeqID_12558
MAAQWKGVRAFAAVAIGFAACLVGASGPTYGSGGMREQ

SEQ ID NO: 54338 - protein, 536 aa, Zea mays
  Coding DNA Sequence Number=SeqID_12559
  Gene Ontology: Mol. function=beta-N-acetylhexosaminidase activity; Cellular component=membrane; Biological process=carbohydrate metabolic process
  Homolog annotation: Hit_ID=Q5JLX3; Match level="QueryCoverage=76%, HitCoverage=83%, E-value=0.0, Identity=76%"; Hit description =Putative beta-N-acetylhexosaminidase
  Pfam annotation: Domain name=Glyco_hydro_20; Domain location=172-446; Score=317.0; E_value=3.4e-92; Accession=PF00728.12; Description =Glycosyl hydrolase family 20, catalytic domain
  Pfam annotation: Domain name=Glyco_hydro_20b; Domain location=41-170; Score=52.3; E_value=1.6e-12; Accession=PF02838.6; Description =Glycosyl hydrolase family 20, domain 2
  Pfam module annotation: Pfam domain module=Glyco_hydro_20::Glyco _hydro_20b; Domain location=172-446::41-170
MAPAAALALSLLLAFLAIGPCAAADSIDLWPMPQSVSHGTQKLYVKKDITMSMVGSTYSDEKSILKDAFQRMLDLITLNHVIDGIDPGSSVLTCVNVVVRTPEDELSFGADESYNLTVPTTGDPLYAQIQAQTVFGALQALQTFGQLCYFDFTSRLIELNSAPWIITDRPRFPYRGLLIDTARHYLPVKTIKGVIDAMAYSKLNVLHWHIVDEQSFPIEIPSYPKLWNGSYSYSERYTMSDAIDIVRYAEKRGVNVLAEIDVPGHARSWGIGYPALWPSESCREPLDVSKNFTFEVIDGILSGDFSKIFKFKFVHLGGDEVNTSCWTRTPHIEGWEETFNSFGDKLDPKTVVHNWLGEDVAPKVVAAGHRCIVSNQDKWYLDHLDASWEGFYMNEPLKGINDTKQQQLVIGGEVCMWGEEIDASDIQQTIWPRAAAAAGEAGWEPHGALRRFLRWGAWCGRAIVVEEVAESSAQMSWSYNSSLRRLRRSLAEVSYLTQVGGGFVESELCVRGVGVDVAEVSQRQGHGDSLQYCFNR

SEQ ID NO: 54339 - protein, 817 aa, Zea mays
  Coding DNA Sequence Number=SeqID_12560
  Gene Ontology: Mol. function=protein serine/threonine kinase activity; Cellular component=cell surface; Biological process =protein amino acid phosphorylation
  Homolog annotation: Hit_ID=Q8LQH1; Match level="QueryCoverage=96%, HitCoverage=95%, E-value=0.0, Identity=68%"; Hit description =Putative S-receptor kinase
  Pfam annotation: Domain name=B_lectin; Domain location=85-201; Score =137.3; E_value=4.1e-38; Accession=PF01453.15; Description=D-mannose binding lectin
  Pfam annotation: Domain name=PAN_1; Domain location=365-438; Score =10.0; E_value=0.016; Accession=PF00024.16; Description=PAN domain
  Pfam annotation: Domain name=PAN_2; Domain location=354-425; Score =92.0; E_value=1.8e-24; Accession=PF08276.2; Description=PAN-like domain
  Pfam annotation: Domain name=Pkinase; Domain location=512-782; Score =175.5; E_value=1.3e-49; Accession=PF00069.15; Description=Protein kinase domain
  Pfam annotation: Domain name=Pkinase_Tyr; Domain location=513-782; Score=109.5; E_value=1e-29; Accession=PF07714.7; Description=Protein tyrosine kinase
  Pfam annotation: Domain name=S_locus_glycop; Domain location=215-336; Score=107.7; E_value=3.4e-29; Accession=PF00954.11; Description=S -locus glycoprotein family
  Pfam module annotation: Pfam domain module=B_lectin::PAN_1::PAN _2::Pkinase::Pkinase_Tyr::S_locus_glycop; Domain location=85-201::365- 438::354-425::512-782::513-782::215-336
  Subcellular localization annotation: CTP_CleavageSite=4; ConfidenceScore=5.42e-01
MATRAGRLPTTPAPALLLLLAFPFLLQGVLPSRAGDTVAAGRPLSGGQSLVSKRGKFRLGFFRPGATDNSSQRWYLGIWYNQLSVHTTVWVANRGTPISDPESSQLSISKDGNMVVLDHSRSSTAVWSTNVTTGVSSTSTVGVIRDNGNLVLADASNTSAVLWQSFDHSGDTWLPGGKLGRNKRTGEVTRLVAWKGRDDPTPSLFALELDPRGSSQYLLNWNDSERYWTSGNWTGTAFAAVPEMTSTGASPVSDYTFGYVDGANESYFTYDVADESVVTRFQVDVTGQIQFLTWVAAAAQWVLFWSEPKRQCDVYANALPSCTCPRGFRERDLAEWMQDDHTAGCARNTALQPCGAGAAARDGQKRRRDDDRFYTMPDVRLPSDARSAAAASAHDCELACLRNCSCTAYSYSGGCSLWYGDLINLQDTTSAGSGTGGGSISIRLAASEFSSNGNTKKLVIGLVVAGSSFVAAVTAIVLATVLVLRNRRIKSLRTVQGSLVAFTYRDLQLVTNNFSEKLGGGAFGSVFKGVLPDATLVAVKKLEGVRQGEKQFRAEVSTIGTIQHVNLIRLLGFCSEGSRRLLVYEHMPSGSLDRHLFDRDQQPGVLSWDARYQIALGVARGLDYLHEKCRDCIIHCDIKPENILLDDAFVPRVADFGLAKLMGRDFSRVLTTMRGTVGYLAPEWIAGTAVTTKADVFSYGMMLFEIISGRRNVGQRADGTVDFFPSTAVNRLLDGDVRSAVDSQLGGNADVAEVERACKVACWCVQDAESLRPSMGMVVQVLEGLVDVNAPPVPRSLMVLADPSKYAVEFFSGLPST

SEQ ID NO: 54340 - protein, 121 aa, Zea mays
  Coding DNA Sequence Number=SeqID_12561
MEVDFGSVEGKELSNVTLDCACIHKTFLRTTNMEDGMDLLGGYGGCHEHEACELEVEAGARHRVGGILSGGSKVGVPWRSEVVGGGECGMHGEDEAQKWWRHPRCSLLGRRIKESMEASRG

SEQ ID NO: 54341 - protein, 62 aa, Zea mays
  Coding DNA Sequence Number=SeqID_12562
MRVLNIRIEEFKGELVVYRADVGKLVEDVHGGKKIYVVYRMSTMKNPLEMLKGQKTDMKLIE

SEQ ID NO: 54342 - protein, 82 aa, Zea mays
  Coding DNA Sequence Number=SeqID_12563
MKVCRQYMRRGIPVNKEYPFDLEINITLCRRLKELRKMARNRNDLGLNDNQNGQDANPPVRRVIPGTNDNLNGYGADPMSVG

SEQ ID NO: 54343 - protein, 112 aa, Zea mays
  Coding DNA Sequence Number=SeqID_12564
MMGDINRQIGTGIPSNNEDSPQREGKEQVKAIALRSVKVLSSPKNLAQEVNKGNTNAVQEADDKLELEEVAELVVEPEKDQAKEPAISKVLSRGVAKCEWWGEEALSSLNVQ

SEQ ID NO: 54344 - protein, 35 aa, Zea mays
  Coding DNA Sequence Number=SeqID_12565
MHWPVIIILCRGKMPNKVPFYAKLSISEKFPALTQ

SEQ ID NO: 54345 - protein, 48 aa, Zea mays
  Coding DNA Sequence Number=SeqID_12566
MLRRYRSDPTHIVPVEEIEGRIQGLVITNRSLSLCGNYCSSIEGNPQI

SEQ ID NO: 54346 - protein, 1231 aa, Zea mays
  Coding DNA Sequence Number=SeqID_12567
  Gene Ontology: Mol. function=nucleoside-triphosphatase activity; Cellular component=integral to membrane; Biological process=transport
  Homolog annotation: Hit_ID=Q76CU2; Match level="QueryCoverage=99%, HitCoverage=98%, E-value=0.0, Identity=61%"; Hit description =Pleiotropic drug resistance protein 1
  Pfam annotation: Domain name=ABC2_membrane; Domain location=333-546; Score=207.0; E_value=4.3e-59; Accession=PF01061.14; Description=ABC -2 type transporter
  Pfam annotation: Domain name=ABC2_membrane; Domain location=959-1173; Score=259.7; E_value=5.9e-75; Accession=PF01061.14; Description=ABC-2 type transporter
  Pfam annotation: Domain name=ABC_tran; Domain location=717-907; Score= 86.5; E_value=8.3e-23; Accession=PF00005.17; Description=ABC transporter
  Pfam annotation: Domain name=PDR_assoc; Domain location=551-615; Score=142.5; E_value=1.2e-39; Accession=PF08370.2; Description=Plant PDR ABC transporter associated
  Pfam module annotation: Pfam domain module=ABC2_membrane::ABC2 _membrane::ABC_tran::PDR_assoc; Domain location=333-546::959 -1173::717-907::551-615
MENVEAFRVGSARIGSSSIWRNNAMEAFSMSAREEDDEEDLKWAAIEKLPTYLRVRRGIFTEGEGQSREIDIKNLGFIERRNLLERLVRIAEDDNERFLLKLKQRIDRVGLDMPTIEVRFEHLNVEAEAYVGSRALPTIFNFSANILETAPTFSHPVFCLKGLLSYLHILPNRKKPLPILNDISGIIRPRRASKLGQDNLTIVIGWKAGQRFEREMTVRETLAFSARCQGVGPRYEMLKELSRREKEANIKPDPDIDIYMKAAALEGQEANVVTDYILKILGLEVCADTFVGDEMRRGISGGQKKRVTTVPFDKSKSHPAALTKDKYGVSKKELLKACVSREYLLMKRNLFVYVFKMIQLIFIGVITMTIFIRTEMHRDTITDGGIFMGALFFILIMIMFNGFAELAMTILKLPVFYKQRDLLFYPSWAYSLPALILKTPISILEVTVWVFMSYYVIGFDPDVGSFFKNYLVLLCLSQMASGLFRLMGGLGRNIIVANTCGSFALLTVLVMGGFILTRDDVKKWWKWGYWISPLMYAQNAIAVNEFLGKSWRHVPPNSTEPLGVLVMKSRGIFPEPHWYWIGVGALIGYCFLFNFLFTLALKYLDPFGKPQAVISKETLAERIASKTGENIELSSRGRDSSERRTGASSRSLSWKVTSVNEANQKRKRGMVLPFEPLSMSFDEIKYALDMPQEMKAQGISEERLELLKGVSGAFRPGVLTALMGVSGAGKTTLMDVLAGRKTGGYVEGTIKISGYPKKQETFARISGYCEQTDIHSPHVTVYESLVFSAWLRLPPEVNSETRMMFIEEVMELVELSSLRDALVGLPGVNGLSTEQRKRLTIAVELVANPSIIFMDEPTSGLDARAAAIVMRTVRNTVDTGRTVEINGIPKIKDGYNPATWMLEVTSGAQEEAIGVNFTNIYKNSELYRRNKALVKELSNPAPGSKDLYFQTRYSQSLLTQCIACLWKQYWSYWRNPPYTAVRFLFTTFIALMFGTIFWDLGSKRTRRQDVFNSMGSMYAAVLFIGFQNAASVQPVVAVERTVFYRERAAGMYSALPYAFGQVVIELPYILVQTVIYGIIVYAMIGFEWTSDKFFWYLFFMYFTFLYFTFYGMMTVAVTPDHNIAGIISSAFFALWNLFSGFIIPRTRIPVWWRWYYWVCPISWSLYGLIASQYGDVQDKFGSGETVQHFVRNYFDFREEFVGVVAIVVVGICVLFGFIFAFSIKAFNFQKR

SEQ ID NO: 54347 - protein, 33 aa, Zea mays
  Coding DNA Sequence Number=SeqID_12568
MGFPDFHQNSFILSQKGFFYDKVIMILIKLELG

SEQ ID NO: 54348 - protein, 70 aa, Zea mays
  Coding DNA Sequence Number=SeqID_12569
MDHFPANRVYVSAMSEDVSLLTWPRFPDLRGSEFYGGCKRGFIKGSGSNENGTWFGGLSNRGWQWEEETK

SEQ ID NO: 54349 - protein, 67 aa, Zea mays
  Coding DNA Sequence Number=SeqID_12570
MPQSPIATEKALPAKRGRGRADGIRVDLNKISAIIDWKVPKNVSEPHNRYLWTLKDQKIFNYPPFSP

SEQ ID NO: 54350 - protein, 219 aa, Zea mays
  Coding DNA Sequence Number=SeqID_12571
  Gene Ontology: Mol. function=protein binding; Cellular component =cytoskeleton; Biological process=pseudocleavage during syncytial blastoderm formation
  Homolog annotation: Hit_ID=Q6K908; Match level="QueryCoverage=94%, HitCoverage=48%, E-value=7e-82, Identity=69%"; Hit description =Putative arp3
  Pfam annotation: Domain name=Actin; Domain location=1-212; Score= -92.5; E_value=2e-09; Accession=PF00022.9; Description=Actin
MGNSHITMVSHPERGELLAPEDSLDISRKVKEVYCYTCSDIVKEFKKHDKKPDKYIKHWSAVKPKTGVPYTIDIGYERFLGPEIFFNPEIYSADFSTPLPELIDNCVQSAPIDTRRALYKNIVLSGGSTMFKDFHKRLQTDIKKIVDDRVAATNARHRVEVRPIEVNVVAHPIQSYAVWFGGSVAASNPEFFEFCHTKEEYEEHGASICRTSPVFKGMY

SEQ ID NO: 54351 - protein, 74 aa, Zea mays
  Coding DNA Sequence Number=SeqID_12572
MNTLCLFLLGTGGCVKATSAMICSATGCSLTRCSFFKVGTEVHDCPPDVDSILAIEVEPLDDKKERIYMNYSHL

SEQ ID NO: 54352 - protein, 57 aa, Zea mays
  Coding DNA Sequence Number=SeqID_12573
MAPPWRALRRRVLGRGGVGHAGAVGSIMDVDDQVTDDPGTQQVENTKQELVEGKLCP

SEQ ID NO: 54353 - protein, 875 aa, Zea mays
  Coding DNA Sequence Number=SeqID_12574
  Gene Ontology: Mol. function=RNA-directed DNA polymerase activity; Cellular component=mitochondrion; Biological process=RNA-dependent DNA replication
  Homolog annotation: Hit_ID=UPI00004C1731; Match level="QueryCoverage =84%, HitCoverage=72%, E-value=0.0, Identity=76%"; Hit description =UPI00004C1731 related cluster
  Pfam annotation: Domain name=RnaseH; Domain location=442-569; Score =8.6; E_value=9.1e-06; Accession=PF00075.14; Description=RNase H
  Pfam annotation: Domain name=rve; Domain location=571-746; Score =80.7; E_value=4.6e-21; Accession=PF00665.16; Description=Integrase core domain
  Pfam module annotation: Pfam domain module=RnaseH::rve; Domain location=442-569::571-746
MLKEPCPYHQGPVKHTLEECVMLRRHFHRAGPPAEGGRARDDDKKEDHQAGEFPEVRDCFMIYGGQAANASARHRKQERQEVCSVKVAAPVYLDWSDKPITFDQADHPDRVPSPGKYPLVVDPVIDNVRLTKVLMDGGSSLNIIYAETLGLLRVDLSSVRAGAAPFHGIIPGKRVQPLGQLDLPVCFGTPSNFRRETLTFEVVGFRGTYHTILGRSCYAKFMAVPNYTYLKLKMPGPNGVITVGPTYRHAFECDVECVEGLPLYRLLRKAECFTWTPEAEEALGNLKALLANAPILVPPAAGEALLIYVAATTQVVSATIVVERREEGHALPVQRPVYFVSEVLSETKIRYPQIQKLLYAVILTWRKLRHYFESHPVTVVSSFPLGEIIQCREALGRIAKWAVEIMGEAISFAPRKAIKSQVLADFVAEWVDTQLPTVPIQPELWTMFFDGSLMKTGAGACLLFISPLGKHLRYVLRLHFPASNNVAEYEALVNGLRIAIELGVRRLDARGDSQLVIDQVMKNSHCRDPKMEAYCDEVRRLEDKFYGLELNHIARRYNETADELAKIASGRTMVPPDVFSRDLHQPSVKTDDTPEPEKASAQSEKAPGGYTHLLVAIDKFSKWIEVRPLNSIRSEQAVAFFTNIIHRFGVSNSIITDNDTEFTGRKFLDFCEDHHIWVDWAAVAHPMTNGQVERANSMILQGLKPRIYNDLNKFGKRWMKELPSVVWSLRTTPSRATGFTSFFLAYGAEAILPTDLEHGSPRTRAYADQSNQANQEDSLDQLEEARDMALLHSVRYQQPLRRYHARGVRSRDLQVGDLVLRLRQDARGRHKLTPPWEGPFVIAKVLKPGTYKLANNQGEVYSNAWNIQQLRRFYP

SEQ ID NO: 54354 - protein, 1007 aa, Zea mays
  Coding DNA Sequence Number=SeqID_12575
  Gene Ontology: Mol. function=structural constituent of ribosome; Cellular component=intracellular; Biological process=translation
  Pfam annotation: Domain name=DUF1666; Domain location=756-1007; Score= 352.3; E_value=7.8e-103; Accession=PF07891.2; Description=Protein of unknown function (DUF1666)
MDAGAGVSAPTAAADGAYGLARIVAWCSSSPLFFWLLTVVLVAAIHIASGSRPSGSRTHGKEREKEEEEEEEEKARRDRFAAAEEREVSGRRDDRVLEMMRSFSFMKATEEDFMEGMTAYECNGRGVDAGFAHGLVAPEPFAPPPALMATSLSFKFHHQIPEIPTETTVVSREFTAAREEDGQERVEEKEPQIPLESLVPLQSADKQEHRREAEETEFLVDEQVEEQSREAAPPKIVATTHNYQFLTERDFRGFVRGPEAMTVRVQESFVPPSPPAAHQPEERRVVDVSSRTGRFLTERDFRPANDPDVCESVASSGKRTPSLQSKPASSPSVAYMGGAAVGGRTSFASEFSGFGDSDSESSASDGYSVKDLAVDSDSDWFLSEKDFPASARDSGNLKSYKAKVLKAIEALETAAAAKREPPYQDSATTLSPGSVRQDSPDTIPDGSPKFPEDMWSRSPSPDVEYKEDEEKVTREAEAQYDGDIEQRSTAEDEGGVDMSDDEHSSGGEKGESAPVYDLAPVADNCMDHSEKEIIALNDHSGVADEKSVPETPEQGFSLTDHRDGVAPDATNISETREDEEQDSAARQAYVSVAGKAKVYDEDGEDPEVRWKDLSAEEEDELESLWEHQDLIEQLKLELKKVRSIGLPTILEESETPKAPMEDLKPWRIDAKFLREDPMDELNKFYKSYRERMRKFDILCYQKMYAIDFLQLRGPQQSSNSLKSLSPTVASILSHNFRSSRRRSPEDPSERFLRELRYDLETVYVGQTCLSWEFLRWQYEQARDLPESDPYHSHQYNQVAGEFQQFQVVVQRFVEDESFKGPRLPNYINNRCVLRSLLQVPVIKEDSLKDRMEDQRKGNYVITSEELEDVMEEAMHILWEFIKADRVETTTTAASVLKGLSSAHVELQDPSDHDLMAHIHSTLQKKEKRLKDLLRTGNCIVKKFKKPKEDRSNQNLFFSQVDMKLVARVLRMPRITSEQLQWCKAKLDKIVLVDRKIHREASFLLFPC

SEQ ID NO: 54355 - protein, 42 aa, Zea mays
  Coding DNA Sequence Number=SeqID_12576
MMMHLFHAVTCIWLEFRTGLEKAGNHPLSARCSPFDHRSELS

SEQ ID NO: 54356 - protein, 168 aa, Zea mays
  Coding DNA Sequence Number=SeqID_12577
  Gene Ontology: Mol. function=solute:hydrogen antiporter activity; Cellular component=integral to membrane; Biological process =regulation of pH
  Homolog annotation: Hit_ID=Q5Z8T1; Match level="QueryCoverage=72%, HitCoverage=19%, E-value=4e-59, Identity=98%"; Hit description =Putative Potassium-efflux system protein
MPPVNSFVLMPLLDLFVLIHPFVVFLVRGCGDPESEFESLRRDWEVLCSDKLGLSLELGSFAAGVMISTTDLAQHTLEQIEPIRNLFAALFLASIGMLINVHFLWNHVDILLAAVILVITVKTFIVAIVVKGFGYSNKTSLLVGMSLAQIGEFAFVLLSRASSIHLIE

SEQ ID NO: 54357 - protein, 127 aa, Zea mays
  Coding DNA Sequence Number=SeqID_12578
MTKVDACRRWSSEFTGEGRSPRMTCERLQFSVNSTITLFHTIHAFVLNPKFPATVYHTGKRVSRVFEDLWKMKASNIYVVAISNICIMRTLRKSLFVRPYQFTWLMGKVCNLCRGLIKTGAIDRAHR

SEQ ID NO: 54358 - protein, 67 aa, Zea mays
  Coding DNA Sequence Number=SeqID_12579
MGSRVGITGVHRYPARLCASMFYHVAVSHREAATVDATELSRQYSLHSPTSTAPTQILEPPPLGPIN

SEQ ID NO: 54359 - protein, 163 aa, Zea mays
  Coding DNA Sequence Number=SeqID_12580
MKWWHQRLTEGLVLDLIWDGTQEVEVVHLHLGRFLLMGFRLRDGGDGVSGNGPERRRGQHVCERMGRRGPGLADGGSHGGASGAGVVSRDVCGGRVTRTGWELCEGGERAERKGGRWTRDGSGSVDGRFWRGRKSGERDFRRRRGAGQNRAPFVCVDVYNSIL

SEQ ID NO: 54360 - protein, 186 aa, Zea mays
  Coding DNA Sequence Number=SeqID_12581
  Gene Ontology: Mol. function=motor activity; Cellular component =myosin complex; Biological process=striated muscle contraction
  Homolog annotation: Hit_ID=Q9XFK9; Match level="QueryCoverage=73%, HitCoverage=8%, E-value=1e-48, Identity=76%"; Hit description=Myosin XI
QQLQSLLETLSATEPHYIRCVKPNNLLKPAIFENQNVLQQLRCGVSIYIVGGTIIGLPQGVMEAIRISCAGYPTRRTFYEFIDRFGILAPDVLSGSSDEVSAVRRLLDKIDLQGYQFLKKIRIAKKYAFYVKGPLAKLVRWSEYHFPIHEFNSPWERISGWVKKILSFVPHQITDLRSDPVVVILK

SEQ ID NO: 54361 - protein, 286 aa, Zea mays
  Coding DNA Sequence Number=SeqID_12582
MINPKGTNWQGPEAERTGTTQYPVIWTVRSESNGGGQCPEGLWLRAVPLLHLGGEITGAGAGVGHGGSNAAGVGQNCRGWLGEHTEGVLATRPRSERGERRRESSRRVGAVLVRNSACWERQSTAIGLSLVPMEVGALWANIGARDGVGLAGHRAGAASKRGRTPVKPNWLRATWSGISVCVHTGPRRFAGKAELTGRPHGAERGSGGAEKWFIVLTGRARVAEREKGEAPVSLAPPGFGSQNQVDGNGANHYNENRRWCPLHRRGWSVGRGRKVPDLEQGLGFPV

SEQ ID NO: 54362 - protein, 191 aa, Zea mays
  Coding DNA Sequence Number=SeqID_12583
MEVHVGSQMPRNNDIVETISVLPIEARRADPITLEVSGSGVGILMGVALSLGDLEPSALVPASPVASIGATTSRGVPIVLALGLPFFRANLQKQVDDLKAAISVVSLALTRRCSDAKEKCPRNQEELDQVTRFLDGTLERTIKDLGNDKVLRRSSKGIHNRKEIMSDSAMIQSRTLGPVCTKMDAHDAFGI

SEQ ID NO: 54363 - protein, 251 aa, Zea mays
  Coding DNA Sequence Number=SeqID_12584
  Gene Ontology: Mol. function=protein binding; Cellular component =protein complex; Biological process=ubiquitin-dependent protein catabolic process
  Homolog annotation: Hit_ID=O82143; Match level="QueryCoverage=86%, HitCoverage=55%, E-value=3e-71, Identity=61%"; Hit description=OsS5a
MICVDNSEWMRNGDYPPSRFAAQAHAFAVLSGAKTEANLESTVGLVAMAGKGVSVLVPPTNDFGKVLSGMNGLEIGGEANLTAAIQVAQFALKNRQNKQLRQRIIVFVGSPVIDEKNWLEVIGKNLKKNNVALDVVNFGESDNEKPEKLEALVAAVNSGGNSHIIHIPAGRDLSDALFSSPIILSEDRGSDSAAAARGASGFEFDVDPNVDPELALLMQSVSFVLDVQQLLEITHKKGLLRPPQLYLLVLN

SEQ ID NO: 54364 - protein, 508 aa, Zea mays
  Coding DNA Sequence Number=SeqID_12585
  Gene Ontology: Mol. function=structural constituent of ribosome; Cellular component=intracellular; Biological process=regulation of transcription
  Homolog annotation: Hit_ID=Q2QYQ2; Match level="QueryCoverage=91%, HitCoverage=96%, E-value=0.0, Identity=87%"; Hit description =Expressed protein
  Pfam annotation: Domain name=PGAP1; Domain location=208-397; Score= -91.9; E_value=0.066; Accession=PF07819.3; Description=PGAP1-like protein
MGVSLAGLSSLDNHTTNHEGITFNTGGAIYIFCGNKSSITKSIDSVDDSYSADGVEDSQLFLSVPALNQAASYLAQTASFLTQCLPVPGFVGLSEEGQELLTLPPASASGRLSVQTSSVEPSGTNSSLGQSDCGGNPSQENAGQMVPSHVFQNGASLFQGLVERARKTVRGSADDIGWLQRDQSLPTTEDGTARFLEILDSVRKNEHKLSDSLVYLLVPGLFSNHGPLYFVKTKAYFSKMGLACHIAKIHSESSVSKNAREIKEYIEEIYWGSRKRVLLLGHSKGGVDAAAALSLYWPQLKDKVAGLALAQSPYGGSPVASDILREGQLGDYVRLRKIMEILVSKVLKGDLQALEDLTYERRKEFLRRHPLPQDVPIVSFHTEASITPSVLTALSHVAHLELPIAGDGNSTRIPVVMPLSAAMAACSQLLVARYGEKSDGLVTRKDAEVPGSVAVRPERKLDYAWMVYSSLKEESGDQADTSQVCEALLTLLVEVAQKRRHEMAMKDE

SEQ ID NO: 54365 - protein, 198 aa, Zea mays
  Coding DNA Sequence Number=SeqID_12586
  Subcellular localization annotation: CTP_CleavageSite=31; ConfidenceScore=5.32e-01
MDPHAPLHIQQQTAKPKQSQARPGELSFEVRARRVSSSPGCGFRLAETATERRAGPRRVADGDGCQLRTTISTGGSNGGEAADPPSATANGWTNPFRRGRSRKPRGETAELQRAAGACTFGRLFSISRHFIVVAKFSHARENVALRVQSSTRASQCHLNAVRGYPQGKGGATTTWRPATPSHSHWVVAMDPNPNVSSQ

SEQ ID NO: 54366 - protein, 107 aa, Zea mays
  Coding DNA Sequence Number=SeqID_12587
MATHVVKDGGLAMAVGGQGTVGNILLMIEREMGTNRGDIANEIICSDGYPWRGGRRSGHGCRRAGHRRRQPTHSRTGDGCTPWRHRCRDHLQRWLPVAWRTAVWPWP

SEQ ID NO: 54367 - protein, 49 aa, Zea mays
  Coding DNA Sequence Number=SeqID_12588
MAIRGVEDGGLAKNGGLAMAAGGQGTVVDSLRTVEREMALLRMRGALPV

SEQ ID NO: 54368 - protein, 49 aa, Zea mays
  Coding DNA Sequence Number=SeqID_12589
MAMVARQCCRAKGHGNRAEQWPKFILNAIFLTPALQVCYIDQEQNPQEF

SEQ ID NO: 54369 - protein, 137 aa, Zea mays
  Coding DNA Sequence Number=SeqID_12590
  Gene Ontology: Mol. function=protein translocase activity; Cellular component=integral to membrane; Biological process=protein transport
  Homolog annotation: Hit_ID=Q9XFJ8; Match level="QueryCoverage=99%, HitCoverage=75%, E-value=2e-42, Identity=70%"; Hit description=THA4
  Pfam annotation: Domain name=MttA_Hcf106; Domain location=46-107; Score=54.3; E_value=3.9e-13; Accession=PF02416.7; Description =mttAHcf106 family
  Subcellular localization annotation: CTP_CleavageSite=19; ConfidenceScore=5.35e-01
MSSRASSFVGGSGGDLAAVAASVAARPRRAGSGGGGALGCKCLFGLGVPELAVIAGVAALVFGPKQLPEIGRSIGKTVKSFQQCDEWCGYRDAAKEFETELKKEPGEGGDQPPPATPTAVSGGEEKGLEASSSKESA

SEQ ID NO: 54370 - protein, 88 aa, Zea mays
  Coding DNA Sequence Number=SeqID_12591
  Homolog annotation: Hit_ID=Q75GJ9; Match level="QueryCoverage=60%, HitCoverage=67%, E-value=2e-16, Identity=75%"; Hit description =Expressed protein (With alternative splicing), 5'-partial
MTTSGSTVKLRAIRHRAKSGDKAKPLQPCLNTLTVLNEFAAVEPSLPCKRLADGSKRVQLPQFLKQQPSKDNKLIELSQTQCTVHLGS

SEQ ID NO: 54371 - protein, 151 aa, Zea mays
  Coding DNA Sequence Number=SeqID_12592
MAARYTLLGEDYAIDRLTSENQAMRLELHNMEIALQKFQDLFSSIGHEGMNSFSAISENQDVQDVNNEQHERVPATTQNVDHQLETDPGSMQVQSPVHFKSGAMPSPELVAANTEKADSLLEPNVDIGMGSLSPARPTDCLNMDLDTESQS

SEQ ID NO: 54372 - protein, 243 aa, Zea mays
  Coding DNA Sequence Number=SeqID_12593
  Gene Ontology: Mol. function=galactose oxidase activity; Biological process=cell wall catabolic process
  Homolog annotation: Hit_ID=Q10NU0; Match level="QueryCoverage=91%, HitCoverage=39%, E-value=9e-79, Identity=66%"; Hit description =Glyoxal oxidase, putative, expressed
  Pfam annotation: Domain name=DUF1929; Domain location=120-224; Score =69.5; E_value=1.1e-17; Accession=PF09118.1; Description=Domain of unknown function (DUF1929)
MGDMVLLPNGAEVAIINGAAADGTAGWESAKTSAYAPVVYRPDHSPGDRFEEQNAAGVARLYHSSAVLLRDGRLLVGGSNPHTYYNFSNVQFPTDLSLEAFSPEYLDASNDMLRPRILDPSPTGAPATVGYGATMVIRFLVPALARRRRGGRAGCLGDVSVTMVAPSFTTHSFAMNQRLLFLDVTKNVAVRGRADTFSASVTMPATAVLGPPGYYMLFVVRDHIWSTATAATSTGRTGTTYEA

SEQ ID NO: 54373 - protein, 86 aa, Zea mays
  Coding DNA Sequence Number=SeqID_12594
MGDHFPHAGSLGETSASVTICATTSIPAPAQPASSGITTRIEPFAEQPAPHSREAGRATVEDGATTLSCGAKARRDDERLPPPSLR

SEQ ID NO: 54374 - protein, 163 aa, Zea mays
  Coding DNA Sequence Number=SeqID_12595
  Gene Ontology: Mol. function=nucleic acid binding
  Homolog annotation: Hit_ID=Q338D7; Match level="QueryCoverage=71%, HitCoverage=27%, E-value=9e-33, Identity=57%"; Hit description =Calmodulin-binding family protein, putative, expressed
MISLIITMLIDYEKNKHIRDETRGFEMAKSSEFVHVAISTLAPLPAQATILLLKEADVVQAEPSDSRHGWKRQGEQVDLCAQYMQDSLHRPEEGRVPALKLPCRGSHVCCRKTGCGRWDSQEANGPKERSVDLTDVMLSPSEGEEDGDFSLRGSYSQLVSLRG

SEQ ID NO: 54375 - protein, 105 aa, Zea mays
  Coding DNA Sequence Number=SeqID_12596
MAPLHLPANTDQAHLLCRCARATPPTNHRHYLTKMGPQMRRLQGGHDVNGTAVARPRMDRVHTLESPHAVVDMMPPNGAPSSWGNARSGGPILHRQPVGTDEEAS

SEQ ID NO: 54376 - protein, 302 aa, Zea mays
  Coding DNA Sequence Number=SeqID_12597
  Gene Ontology: Mol. function=ATPase activity, coupled to transmembrane movement of ions, phosphorylative mechanism; Cellular component=integral to membrane; Biological process=phospholipid transport
  Homolog annotation: Hit_ID=Q9XIE6; Match level="QueryCoverage=41%, HitCoverage=10%, E-value=1e-54, Identity=80%"; Hit description =Putative phospholipid-transporting ATPase 3
MDMTKGYSGLLAVGSKFDGTTKHTKVVVGGGCGIQGKVGWLTAFEGWRLRRWVVVCRVSSSTSANTPSPSRSGLLCMNDCKPCSTPVDTQAKLSEDGVPPVVDATSYWSLTDALYAEAEYRDHQCTKHVEIDLHFVRERVAAGDVRVLSVPTTLQFVDIFTKGRTPTTVMVRESHVERMGSIQDVPYEILNVLEFNSTRKRQSVVCRFPNGRLVLYCKGADNVVYERLADGNHDMKKTSREHLEQFGSAGLRTLCLAYRDLSREQYESWNEKFVQAKSSLRDRDKKLDEVNGLPSFGYYYDD

SEQ ID NO: 54377 - protein, 101 aa, Zea mays
  Coding DNA Sequence Number=SeqID_12598
MGQQEEPTSSKPYAFACDEHKKMKGKKKAPSSSEEEEQEEEEEEEDDDDDDDDEDDQPSTSSSKDEDTVRCVGKVEDLLFNIDRKKAKKERMLCMRGEGPL

SEQ ID NO: 54378 - protein, 345 aa, Zea mays
  Coding DNA Sequence Number=SeqID_12599
  Gene Ontology: Mol. function=ATPase activity, coupled to transmembrane movement of ions, phosphorylative mechanism; Cellular component=integral to membrane; Biological process=phospholipid transport
  Homolog annotation: Hit_ID=Q9XIE6; Match level="QueryCoverage=96%, HitCoverage=31%, E-value=1e-132, Identity=63%"; Hit description =Putative phospholipid-transporting ATPase 3
MAGGGWVTSLVRKGAQKITLSIGDGANDVSMIQAAHVGIGISGQEGMQAVMASDFAIAQFRFLTDLLLVHGRWSYLRLCKVITYFFYKNLTFTLTQFWFTFQTGFSGQRFYDDWFQSLYNVIFTALPVIIVGLFDKDVSASLSKKYPQLYKEGIRNSFFKWRVIAVWGFFAFYQSIVFFYFTAAASQHGHGSSGKILGLWDVSTMAFTCVVENEYFVIYVLMSTFFFYMTILLVPIIALFGDFLYLSIQRWLFPYDYQIIQEQHKDEPHVYSRVQLPETSHLSPQEARSYMMSMLPRESSKHTGFAFDSPGYESFFASQQGVGVPHKPWDVARRASMKQQRAGKS

SEQ ID NO: 54379 - protein, 161 aa, Zea mays
  Coding DNA Sequence Number=SeqID_12600
MADRAGKVAAATDSAKAMKGEGDGAGPAGQGLALDLAGLVDADDRRGVKREALLCGSGEGRGPVDGAADPRAGQPKGRGKGATTRKRGGAGRGDQGSGGASAAMGKGGGSLGRRMPWPAGRGARWRPAKDATERESTSRSTAKHDVRAQPRGGVCAKGQGG

SEQ ID NO: 54380 - protein, 106 aa, Zea mays
  Coding DNA Sequence Number=SeqID_12601
  Gene Ontology: Mol. function=ATPase activity, coupled to transmembrane movement of ions, phosphorylative mechanism; Cellular component=membrane; Biological process=transport
  Homolog annotation: Hit_ID=Q9XIE6; Match level="QueryCoverage=57%, HitCoverage=5%, E-value=2e-23, Identity=82%"; Hit description =Putative phospholipid-transporting ATPase 3
MRALTGLKPGASVQEGVMEELPQAEKEVDGGCEDGNHGCSLRNTEYIVGVVIFTGHETKVMMNSMNVPSKRSTLEKKLDKLILALFATLFTMCVIGAIGRRIRLVG

SEQ ID NO: 54381 - protein, 51 aa, Zea mays
  Coding DNA Sequence Number=SeqID_12602
MLTNANYERSLVMKYGDDNFHEDRQAMEALLVAIPSEMMSVLTGKETTKNT

SEQ ID NO: 54382 - protein, 82 aa, Zea mays
  Coding DNA Sequence Number=SeqID_12603
MGRRETEREGGRQPKGDRRERWNPAAFMVMMAPPVDVVSPRPSLGEVEAPPRSRSSLSSKVEVESEPPGRTRRRPSADVKVA

SEQ ID NO: 54383 - protein, 39 aa, Zea mays
  Coding DNA Sequence Number=SeqID_12604
MRLHTLRDDVVLYPQRCLLLIKGSGMLQHIHLHSHNNAA

SEQ ID NO: 54384 - protein, 64 aa, Zea mays
  Coding DNA Sequence Number=SeqID_12605
MTRLSALGPHCNETKGARLLCVIDDWGPHVGARLQRQRSSGPCGEEMNWAANSVLAQNGPGVHM

SEQ ID NO: 54385 - protein, 96 aa, Zea mays
  Coding DNA Sequence Number=SeqID_12606
MVNTDDHSLPAIERRRDMATMSGGSTAFPPTLANNYGAHGRRFGTQAPRMVTRPLGVDPRPPYNFRRWRMDGRARRRNPLPKKIARWWYGSGLAHG

SEQ ID NO: 54386 - protein, 39 aa, Zea mays
  Coding DNA Sequence Number=SeqID_12607
MEKKIPNFLDWRSGSNCAHKDNRVAHKLRKCPQKRKLPE

SEQ ID NO: 54387 - protein, 280 aa, Zea mays
  Coding DNA Sequence Number=SeqID_12608
MTREIARATRTNDVCGQHDDMREQRATAGVDEGSQGKTVSPLRQTTTTWRKHDSQLDSEKAKALVFNGVRAGDSPHVRDATARRIEGNDAAGGVIGCTGRGARRGRGATPWGLDALRRWPELGKNGREERIGRDRGGGFRFLCAHERAGAGSSGVNFFEEGTYERWAQHIEQGPVSRSETRSGAAAAGRCPRVAAGARDSTAWWAKAQRAAGPRRQAVGARGGPRHALGWGRGAMGRGTRKGRGGPGKAGYREVELGRACGFARGCAVHRVEFEYGYEDG

SEQ ID NO: 54388 - protein, 53 aa, Zea mays
  Coding DNA Sequence Number=SeqID_12609
MVLVTPVGSQGDSGVAQRAPGLMGCDDTGGMKKVFGKLGVVIQDENMSRKRTF

SEQ ID NO: 54389 - protein, 494 aa, Zea mays
  Coding DNA Sequence Number=SeqID_12610
  Gene Ontology: Mol. function=acetylglucosaminyltransferase activity; Cellular component=membrane; Biological process=isopeptide cross -linking via N6-(L-isoglutamyl)-L-lysine
  Homolog annotation: Hit_ID=Q2QLJ7; Match level="QueryCoverage=83%, HitCoverage=84%, E-value=1e-123, Identity=55%"; Hit description=BGGP Beta-1-3-galactosyl-O-glycosyl-glycoprotein, putative, expressed
  Pfam annotation: Domain name=Branch; Domain location=93-373; Score =316.5; E_value=4.6e-92; Accession=PF02485.11; Description=Core-2I -Branching enzyme
  Subcellular localization annotation: CTP_CleavageSite=76; ConfidenceScore=5.49e-01
MLEAKPPSPGSGAAGAAAHIHGHRRWAAPLLASVLLSSLLITASLFFSSSRALLLSFSPLPSAASAEPLFVEAKLRQQMRAEERPTRGAVPRIAYLISGSAGDGAALRRTLRALYHPVNTYVVHLDLEAPAAERAELASAIHADPVYARFRNVKVVTRANLVTYRGPTMVANTLHAAAILLREGGNWDWFINLSASDYPLVTQDGLGHSLDDTSGAGDLKFACSVCLQVFAKNAILYAGLDMPIGEWGLLPLWILLLVHDLLHVLSELPRQLNFIEHTSDIGWKEYQRAKPVIIDPGLYSLQKSDVFWITEKRSVPTAFKLFTGSAWMMLTHQFIEYCIWGWDNLPRTVLMYYANFLSSPEGYFHTVICNVPEFRNTTVNHDLHFISWDNPPKQHPHYLTLADFDGMVNSNAPFARKFGREDPVLDKIDQELLARRPDGFVPGGWTDLLNTTEKGKPFTVERVQDLRPGPGVDRLKKLVTGLLTQEGFDDKHCL

SEQ ID NO: 54390 - protein, 143 aa, Zea mays
  Coding DNA Sequence Number=SeqID_12611
MALNLTSVRGEKPYAHEVAWIRGGLPTMARNCGVAGPQSPTGRARTPPVRPPEVPRPKSETSSVLITWVDGSGKEVGWTTAAAGLFSVAWDARELCGRTEGGVATYLCIHRRKSEGENRSAWDAEFGGGRVYRASGNGGLVRY

SEQ ID NO: 54391 - protein, 76 aa, Zea mays
  Coding DNA Sequence Number=SeqID_12612
MEASVMAPIFSLRDFGMGIVPRIFPEGKGILVRASSHDFFLRAEVAFCAIYAQVKKKENGVEADLLEFQDFDEFED

SEQ ID NO: 54392 - protein, 157 aa, Zea mays
  Coding DNA Sequence Number=SeqID_12613
  Gene Ontology: Mol. function=nucleic acid binding; Cellular component= intracellular; Biological process=negative regulation of progression through cell cycle
  Homolog annotation: Hit_ID=Q10SE5; Match level="QueryCoverage=89%, HitCoverage=36%, E-value=2e-63, Identity=84%"; Hit description =D111/G-patch domain-containing protein, putative, expressed
  Pfam annotation: Domain name=G-patch; Domain location=15-59; Score =62.0; E_value=1.9e-15; Accession=PF01585.13; Description=G-patch domain
MAAPEAPACYVGIARQSAAFRLMKQMGWEEGEGLGKDKQGIKGHVRVKNKQDTLGVGVDSPHNKWVYDTTQFDNILKKLKVQSANPVQEEVAAVESDSPDITPKKDKSAKHEVTKVTRPQGRYKKRERGKSVNSYSATDLQGILTTGGFCGLLGGSG

SEQ ID NO: 54393 - protein, 55 aa, Zea mays
  Coding DNA Sequence Number=SeqID_12614
MALAGRPKRMRTREGPQGQPDSDTGSGQYSPDSDTQTGVSEAVPPKYSPYTPLPP

SEQ ID NO: 54394 - protein, 286 aa, Zea mays
  Coding DNA Sequence Number=SeqID_12615
  Gene Ontology: Mol. function=structural constituent of ribosome; Cellular component=ribonucleoprotein complex; Biological process =translation
  Homolog annotation: Hit_ID=Q9ZST0; Match level="QueryCoverage=74%, HitCoverage=75%, E-value=2e-83, Identity=74%"; Hit description=50S ribosomal protein L5, chloroplast precursor
  Pfam annotation: Domain name=Ribosomal_L5_C; Domain location=162-256; Score=120.9; E_value=3.6e-33; Accession=PF00673.11; Description =ribosomal L5P family C-terminus
  Subcellular localization annotation: CTP_CleavageSite=44; ConfidenceScore=5.79e-01
MAAAAVTLPSSGTPFAVATTASSSSARRCLLLPSAAPRRALRVVASAATEAPPKPTQPPTSPSGIVLVDPSEAQKVHRLKAVYDQKVVPLITEEFGYTNVHQVLDRRPCSSSPRKGPPFLLVARLICWRGRILTFDESCGCGPVKTKARKSVASFKIREGNTIGIAVTLRGRIMYNFLDRLINLGLPRTMDFLGVNPNSFDGHGNYSLGLRDQGVFPEIPYEVGGKKNGMDVSIVTSAKTDNEAFRLLVLLGMPFSENIKTDVVIRKKRLKRHHFLSKGKGKGGRR

SEQ ID NO: 54395 - protein, 259 aa, Zea mays
  Coding DNA Sequence Number=SeqID_12616
MKARRPYGIRLDRRYGTAGVLGVGRMGKKEDAKDCRSYSLVVRTEKVLDWSQSYKGLEQPHLLSASLLFDVGMVVLVSPARTLSAAAVVPNVRVVVLDLPIPSRHDVAGAKPDTATPPASAFGGEGGLHVSHLPLPPHDERLHQSLCIFQDLQKRLGKQNALTTVAAALPSPASTSAKAPDPAPAPAPKSGLPPLSEDEHWNLYKWILEEERKIKPRNATEKKIVEENSLGCFACLPQPLDFYPHHCSFACLPSLSLSE

SEQ ID NO: 54396 - protein, 675 aa, Zea mays
  Coding DNA Sequence Number=SeqID_12617
  Gene Ontology: Mol. function=protein binding; Cellular component =nucleus; Biological process=negative regulation of ethylene mediated signaling pathway
  Homolog annotation: Hit_ID=Q2RBJ7; Match level="QueryCoverage=96%, HitCoverage=95%, E-value=0.0, Identity=64%"; Hit description=Leucine Rich Repeat family protein, expressed
  Pfam annotation: Domain name=LRR_1; Domain location=199-221; Score =8.0; E_value=9.3; Accession=PF00560.23; Description=Leucine Rich Repeat
  Pfam annotation: Domain name=LRR_1; Domain location=225-247; Score =11.8; E_value=1.8; Accession=PF00560.23; Description=Leucine Rich Repeat
  Pfam annotation: Domain name=LRR_1; Domain location=249-272; Score =2.3; E_value=1e+02; Accession=PF00560.23; Description=Leucine Rich Repeat
  Pfam annotation: Domain name=LRR_1; Domain location=276-299; Score =6.7; E_value=16; Accession=PF00560.23; Description=Leucine Rich Repeat
  Pfam annotation: Domain name=LRR_1; Domain location=302-325; Score =10.4; E_value=3.2; Accession=PF00560.23; Description=Leucine Rich Repeat
  Pfam annotation: Domain name=LRR_1; Domain location=352-374; Score =3.4; E_value=65; Accession=PF00560.23; Description=Leucine Rich Repeat
  Pfam annotation: Domain name=LRR_1; Domain location=378-401; Score =7.2; E_value=13; Accession=PF00560.23; Description=Leucine Rich Repeat
  Pfam annotation: Domain name=LRR_1; Domain location=430-452; Score =5.8; E_value=24; Accession=PF00560.23; Description=Leucine Rich Repeat
  Pfam annotation: Domain name=LRR_1; Domain location=480-504; Score =4.3; E_value=44; Accession=PF00560.23; Description=Leucine Rich Repeat
  Pfam annotation: Domain name=LRR_1; Domain location=506-529; Score =5.8; E_value=24; Accession=PF00560.23; Description=Leucine Rich Repeat
  Pfam annotation: Domain name=LRR_1; Domain location=531-553; Score =5.6; E_value=25; Accession=PF00560.23; Description=Leucine Rich Repeat
  Pfam annotation: Domain name=LRR_1; Domain location=583-605; Score =8.8; E_value=6.3; Accession=PF00560.23; Description=Leucine Rich Repeat
  Pfam module annotation: Pfam domain module=LRR_1::LRR_1::LRR_1::LRR _1::LRR_1::LRR_1::LRR_1::LRR_1::LRR_1::LRR_1::LRR_1::LRR_1; Domain
  Pfam module annotation: Domain location=480-504::506-529::531 -553::583-605
MTAQQHRHPKRRCVALSLSPSLARIPGAPTPPLDSLADELLFLVLDRVAQADPRALKSFALASRACHAAESSHRRTLRPLRADLLPAALARYPTATRLDLTLCARVPDAALASAAVSGSSSALRAVDLSCSRGFSAAGVSELAVACPGLVDLDLSNGVDLGDAAAAEVARARALRRLSLARWKPLTDMGLGCVAVGCTELRELSLKWCLGLTDLGIQLLALKCRKLTSLDLSYTMITKASLPPIMKLPSLQELTLVGCIAIDDDALGSLERECSKSLQVLHMSQCQNITGVGVSSILKSVPNLLELELSYCCPVTPSMVRSFQKLAKLQTLKLEGSKFMADGLKAIGTSCASLRELSLSKSSGVTDTELSFAVSRLKNLLKLDITCCRNITDVSLAAITSSCSSLISMRMESCSRVSSGALQLIGKHCSRLEELDLTDSDLDDEGLKALARCSELSSLKIGICLKISDEGLTHIGRSCPKLREIDLYRCGGLSDDGIIQIAQSCPMLESINLSYCTEITDRSLISLSKCSKLNTLEIRGCPRVSSIGLSETAMGCRLLSKLDIKKCFGINDAGMLYLSQFSHSLRQINLSYCSVTDIGLLSLSCISGLQNMTIVHVAGITPNGLAATLMVCGGLTKVKLHEAFRSMMLPHMIKNVEARGCVFQWIDKPFKYIVYD

SEQ ID NO: 54397 - protein, 149 aa, Zea mays
  Coding DNA Sequence Number=SeqID_12618
MPRGRSRPAKRPQARGGLSQGSPATKKEESSSSIKSHRRGDKKKKMKKVVYYETNSSSPSASSSESSTTSKRHERKKYSVKGSHSANKKIKFWIQQRSKEATEGTSGLEAPDYPVYTGQCPVRHRTVSGAPEDSNLNSPPSGFSQAGAL

SEQ ID NO: 54398 - protein, 75 aa, Zea mays
  Coding DNA Sequence Number=SeqID_12619
MANGMGTVGGVLRGRALRTPGQTEVLLHARAGISGVVVGERSDGGVQAPARHDGELMGLEEEKQDNFGRGYGWVL

SEQ ID NO: 54399 - protein, 95 aa, Zea mays
  Coding DNA Sequence Number=SeqID_12620
MARGSSGSAAGSMRRSTQESAKPIGRTGAAGQRREAAPAREDASGDLLGFLPTLVNTEKMESDQRNSASTEFYDERIRAKIARLLRFCRGRRAVC

SEQ ID NO: 54400 - protein, 149 aa, Zea mays
  Coding DNA Sequence Number=SeqID_12621
MGKSKKGGSSSHHSGDKRKREPTPPSEDFGDSEYSEEEFSSGFEGSPVPASPPASSDNSDDSQGITAEVWTYIRAVERAGLEGSDESEVSLDEEDSSDSSKEGSDSDDGGEGDGGDGGDSDGDGDDSRGDDGNGGGNGKGGSGSGKASG

SEQ ID NO: 54401 - protein, 239 aa, Zea mays
  Coding DNA Sequence Number=SeqID_12622
  Gene Ontology: Cellular component=integral to membrane; Biological process=protein transport
  Homolog annotation: Hit_ID=Q8H5X5; Match level="QueryCoverage=100%, HitCoverage=70%, E-value=1e-95, Identity=73%"; Hit description =Putative secretory carrier membrane protein
  Pfam annotation: Domain name=SCAMP; Domain location=136-239; Score =123.0; E_value=8.4e-34; Accession=PF04144.4; Description=SCAMP family
MAGRYDGNPFEEEDVNPFSQQTRGKAGGQSNFGGGAFYMPNPQNVPPTSNSRLSPLPPEPADFSATVDIPLDSSKDLKKREKELQAREAELNKREKELKRREEAAARAHTPARSFNANQGLIAVLKQVYCAGIVIEEKNWPPFMPLIHHDIINEIPSHLQRMQYVAFASFLGLVCCLFWNVIAVTTAWIKGEGVKIWLLAIIYFISGVPGAYVLWYRPLYNAMRTDSALKFGLFFLLYL

SEQ ID NO: 54402 - protein, 374 aa, Zea mays
  Coding DNA Sequence Number=SeqID_12623
  Gene Ontology: Mol. function=protein serine/threonine kinase activity; Cellular component=spindle pole body; Biological process =protein amino acid phosphorylation
  Homolog annotation: Hit_ID=Q7XKA8; Match level="QueryCoverage=85%, HitCoverage=86%, E-value=1e-156, Identity=85%"; Hit description =Serine/threonine-protein kinase SAPK5
  Pfam annotation: Domain name=Pkinase; Domain location=4-260; Score =306.6; E_value=4.6e-89; Accession=PF00069.15; Description=Protein kinase domain
  Pfam annotation: Domain name=Pkinase_Tyr; Domain location=4-264; Score=22.2; E_value=7.9e-14; Accession=PF07714.7; Description =Protein tyrosine kinase
  Pfam module annotation: Pfam domain module=Pkinase::Pkinase_Tyr; Domain location=4-260::4-264
MDKYEPVREIGAGNFGVAKLMRNKDTRELVAMKFIERGNRIDENVFREIVNHRSLRHPNIIRFKEVVLTPTHLAIVMEYAAGGELFERICDAGRFHEDEARYFFQQLVCGVSFCHAMNICHRDLKLENTLLDGSPAPRLKICDFGYSKSSVLHSRPKSTVGTPAYIAPEVLSRREYDGKHADVWSCGVTLYVMLVGAYPFEDPKDPKNFRKTIQRIMSVQYKIPEYVHVSHNCRHLLSRIFVQNPYKRITMSEIKTHPWYLKNLPRELKEEAQAAYYYSRQGDSSSSSSNNATAAPAYSSQSVEEILRIVQEAQTVPKPPSRPDEAEQQEEEDDHDDDDDYDRTVRQHRRKENIIIRVAIVVVVIVGFTCILRV

SEQ ID NO: 54403 - protein, 105 aa, Zea mays
  Coding DNA Sequence Number=SeqID_12624
  Gene Ontology: Mol. function=transferase activity, transferring nitrogenous groups; Biological process=biosynthetic process
  Homolog annotation: Hit_ID=Q9AUT8; Match level="QueryCoverage=96%, HitCoverage=31%, E-value=4e-22, Identity=48%"; Hit description =Putative 8-amino-7-oxononanoate synthase
MGQWDALVDAALARLEARSLLRATRPIALAAPTAAPRTFDGPGPWDHAAVEIRLDRDTLHQWLAEGNDYMGLSSHPAVREAAVKVCRQCCALGCGHYLIYQLTLT

SEQ ID NO: 54404 - protein, 483 aa, Zea mays
  Coding DNA Sequence Number=SeqID_12625
  Gene Ontology: Mol. function=DNA binding; Cellular component=nucleus; Biological process=regulation of transcription, DNA-dependent
  Homolog annotation: Hit_ID=Q8S976; Match level="QueryCoverage=66%, HitCoverage=51%, E-value=5e-56, Identity=38%"; Hit description=Auxin response factor 10
  Pfam annotation: Domain name=Auxin_resp; Domain location=258-334; Score=34.9; E_value=5.1e-08; Accession=PF06507.4; Description=Auxin response factor
  Pfam annotation: Domain name=B3; Domain location=114-219; Score=66.9; E_value=6.4e-17; Accession=PF02362.12; Description=B3 DNA binding domain
  Pfam module annotation: Pfam domain module=Auxin_resp::B3; Domain location=258-334::114-219
MEPQPPLPLANGHGNSIVDRDVWLACAAPLSRLPTVGDDVYYFPDGHAEQCPAHLPAPLPAPHFFPCTVTDISLGADDKTDEVFAKISLRPGLAAASRPDPGSSNSPPREPLSYSIKELSQSDANGGGSFCVPRYCGDHVWPKVDFEADPPMQNLVMHDTTGKQWEFRHVYRAKQPRHVLTTGWSKFVNAKLLVAGDIIVFMRRPNGDLIVGLRRMPRYAGTLHRPGTGGDAQDPDQPPPPPPRNALARVPPKDVMEAARLAAEGRPFTVTYYPRKAAGEFVVPRNEVEGVLDTLWEPGSHVLMQFAEAEDTRRTMWADGHVKAIHQKIWRALEIGFVQVNVCAVASIYVYHIDLIDWDVASSAISAQLGRFVNAWQVQRIAYPSICGGLGDLCYPLPLMESESQVMAMILEQMPPRTSASPPNNPPRPGPGQKVNTIMLFGATIHVVQSDTDDDGYEQLNRDPPPNAAGGGDDMDHDSAENI

SEQ ID NO: 54405 - protein, 69 aa, Zea mays
  Coding DNA Sequence Number=SeqID_12626
  Subcellular localization annotation: CTP_CleavageSite=30; ConfidenceScore=5.35e-01
MSSERQETDRGGQSTRANRNQGVATSTTVLQSSFGSRKRRQDTLPVVSTIELPTKNVAGLVPFDTRWRP

SEQ ID NO: 54406 - protein, 243 aa, Zea mays
  Coding DNA Sequence Number=SeqID_12627
  Gene Ontology: Mol. function=DNA binding; Cellular component=nucleus; Biological process=DNA integration
  Homolog annotation: Hit_ID=O24587; Match level="QueryCoverage=95%, HitCoverage=21%, E-value=3e-94, Identity=75%"; Hit description=Pol
  Pfam annotation: Domain name=rve; Domain location=139-243; Score =31.4; E_value=3.1e-06; Accession=PF00665.16; Description=Integrase core domain
MVRPNPLVVGRSLGMVALVESEKCNKAATGMSVVVIVSHEVLRSVGSLAFKGVSNKKFYLVDFTKENDDLDACLLAKTNMGWLWHRHLALVGMKNLHKLLKGEHVLGLTNVCSEKDRPCAACQAGKHVGTTHPSKNMMTKSRPLELPHMDLFGPIAYLSIGGSKYGLVVVDDYSRFTWVFFLQDKSETQETLKRFLIRAQNEFELKVKKIRSDNGSKFKNLQVEEYLEEEGIKHEFSAPYTPQ

SEQ ID NO: 54407 - protein, 1387 aa, Zea mays
  Coding DNA Sequence Number=SeqID_12628
  Gene Ontology: Mol. function=RNA-directed DNA polymerase activity; Cellular component=mitochondrion; Biological process=RNA-dependent DNA replication
  Homolog annotation: Hit_ID=Q8S463; Match level="QueryCoverage=95%, HitCoverage=78%, E-value=0.0, Identity=84%"; Hit description =Putative prpol
  Pfam annotation: Domain name=RVT_1; Domain location=336-544; Score =21.6; E_value=3.8e-06; Accession=PF00078.17; Description=Reverse transcriptase (RNA-dependent
  Pfam annotation: Domain name=RnaseH; Domain location=774-901; Score =2.8; E_value=3.1e-05; Accession=PF00075.14; Description=RNase H
  Pfam annotation: Domain name=rve; Domain location=1099-1258; Score =125.7; E_value=1.3e-34; Accession=PF00665.16; Description=Integrase core domain
  Pfam module annotation: Pfam domain module=RVT_1::RnaseH::rve; Domain location=336-544::774-901::1099-1258
MPEPSTTEGRRIQGELKNLLEGAATRRAESTASRRQGYPSEPHAATFRFMREASVYTGHTRNTAPAALGHLGNEHHRRDRRAHLDERPGESLRDYIRRFSKQRTELPNITDSDVIGAFLAGTTCRDLVSKLGRKTPTRASELMDIATKFASGQEAVEAIFRKDKQPQGHPSEEAPEASAPRGAKKKGKKKSQSKRDAADVDLVAATEYKNPRKPPGGANLFDKMLKEPCPYHQGPVKHTLEECVMLRRHFHRAGPPAEGGRARDDDKNEDHQAGEFPEVRDCFMIYSGHAANASARHRKQERREVCSMKVAAPVYLDWSDKPITFDQADHPDHVPSPGKYPLVVDPVVGNVRLTKVLMDGGSCLNIIYAETLKLLRVDLSSVRAGAAPFHGIIPGKRVQPLGRLDLPVCFGTPSNFRRETLTFEVVGVPRNLPCRYHQIRMKESDQLATSFITPFGMYCYVTMPIGLRNAGATYQRCMNHVFGEHIGRIVEAYVDDIVVKTRKASALLSDLEATFRCLKAKGVKLNPEKCVFGVPRGMLLGFIVSERGIEANPEKIAAITSMGPIKDLKGVQRVMGCLAALSRFISRLGERGLPLYRLLRKVECFAWTPEAEEALGNLKALLTKAPVLVPPADGEALLLYVAATTQVVSAAIVVERQEEGHALPVQRPVYFVSEVLSETKIRYPQVQKLLYAVILTRRKLRHYFESHPVTMVSSFPLGEIIQCREASGRIAKWAVEIMGETISFAPRKAIKSQVLADFVAEWVDTQLPTAPIQPELKTMFFDGSLMKTGAGAGLLFISPLGKHLRYVLRLHFPASNNVAEYEALVNGLRIAIELGVRRLDARGDSQLVINQVMKNSHCRDPKMEAYCDEVRRLEDKFFCLELNHIARRFNETVDELAKIASGRTTVPPDVFSRDLHRPSVKIDDAPEPEAPSARPEAPSARPEVPSAQPEVPSAPEGEALGVEEEQNGATPDRDWQAPYLQYLHRGELPLDQVEARRVARRAKSFVLLGDEEELYHRSPLGILQRCISIAEGRELLQEIHSGACGHHAAPRALVGNAFRQGFYWPTAVVDATRIVRTCEGCQFYAKQTHLPAQALQTIPITWPFAVWGLDLVGPLQKAPGGYTHLLVAIDKFSKWIEVRPLNSIRSEQAVAFFTNIIHRFGVPNSIITDNGTQFTGKKFLDFCEDHHIRVDWAAVAHPMSNGQVERANGMILQGLKPRIYNDLNKFGKRWMKELPSVVWSLRTTPSRATGFTPFFLVYGAEAILPTDLEYGSPRTRAYTDQSNQASREESLDQLEEARDRALLHSARYQQSLRHYHARGVRSRDLQVGDLVLRLRQDARGRHKLTPPWEGPFVIAKVLKPGTYKLANNQGEIFGNAWNIKQLRRFYP

SEQ ID NO: 54408 - protein, 68 aa, Zea mays
  Coding DNA Sequence Number=SeqID_12629
MENAYISNTKKEEDMMDLNMEPPEEEIINEIDLNMEPVSGLFDLNMEPVAEANYDGLEQKLYATKYMV

SEQ ID NO: 54409 - protein, 108 aa, Zea mays
  Coding DNA Sequence Number=SeqID_12630
MAHQMWHFCVYPLSIRAQVTGNGAVGTRRPPRYGCRKRSFHATAVQLEDQHAGKEDLRAMTVGAELPHRGGTGSLGHVIRVRVRVLEPAVEAAFVAGEEARGKAYDDD

SEQ ID NO: 54410 - protein, 59 aa, Zea mays
  Coding DNA Sequence Number=SeqID_12631
MSLSAGEATDSSSDSDEAASCHPRLFTAVLEIANMWDVLDCYEYDIANSGNNPAERLAH

SEQ ID NO: 54411 - protein, 94 aa, Zea mays
  Coding DNA Sequence Number=SeqID_12632
MASPRRAVGRALRSSRAEIGGGSEFITPSIRRGTNELGNGGQGDRICNSGGLAAARWVAPSCVNAGGRRGLEGRLILLGRLRLEAKITLRFIKI

SEQ ID NO: 54412 - protein, 116 aa, Zea mays
  Coding DNA Sequence Number=SeqID_12633
  Homolog annotation: Hit_ID=Q6QP51; Match level="QueryCoverage=51%, HitCoverage=30%, E-value=4e-16, Identity=76%"; Hit description =Putative growth-regulating factor 1
MPRLLDCGTGATTRGSSACDPTVPTGCNDHGPVSRGRKRDGWDRERGYFGKGSFSTKEAGSEPITDQRFEGLLLGRVRQPPLSTRASSSLLIMGSKAGPSEGFDSRPRALGLRAHY

SEQ ID NO: 54413 - protein, 188 aa, Zea mays
  Coding DNA Sequence Number=SeqID_12634
MSVGRAGGRFAADAALSAHAHENRGRREGTLAVWRRTEAPPSRSMIKAYTAGQEVVIPSMNAIPVRHVQVHNVHFCMIHGWTMVVSLPVVECSLPISLPSSLVPMGNVESSATVPMEVELAAPPPPPPTVAAVHRRRSPTSPEPVVAGTIAARHGQPPRAVDALRGHIIFTGHCPNGVATTPSSSERA

SEQ ID NO: 54414 - protein, 520 aa, Zea mays
  Coding DNA Sequence Number=SeqID_12635
  Homolog annotation: Hit_ID=Q7XIE1; Match level="QueryCoverage=39%, HitCoverage=44%, E-value=1e-51, Identity=52%"; Hit description =Putative alpha 3 glucosyltransferase
  Pfam annotation: Domain name=Alg6_Alg8; Domain location=38-429; Score= -183.2; E_value=5.6e-07; Accession=PF03155.6; Description=ALG6, ALG8 glycosyltransferase family
MAKPRKTCTSAPDPPVAAVRLLWHPPAPAVPIVVLVSLAALRIRVLVSVGPYSGQGAAPKFGDYDAQRHWMELTLHLTPADWYRNTSDNDLVYWGLDYSPLSAYQSLLHGRIINASLPEVVALRSSRGYESMESYAPSPVDFFLLVAWKIEVADAVDGVVIRSVGVLPSCFVYNYISLGLTLEAIAGVLSRNELIAAALFTLAIKQFASQVRCALRKIMGVERFARAPAGRALALPELELKFSHRGDTYRKTVTFWWDIKGSGSVDIYDTFDMIKEPGELIVSPKVPVVQDADVKGADMMEVETAPVHNAKIVPSEESVVSLGVAEGKACAAADLSSLIASEEAGSQNDIDNDRPKTSLCHADSMKIKVSDELPVKQWTYCDHMSNLQSSFTSANNDIAKEMNEVLFKSLPADTSALDLSASSDLLSQRKIDLIGKERLGVRKTRLRLKEQILTMKFKAYRHLWKEDVRLLSERLKSNKRIDQNNRTSQIGSQRQCFSNHSRLAMPGQYYFHFISKFVLN

SEQ ID NO: 54415 - protein, 188 aa, Zea mays
  Coding DNA Sequence Number=SeqID_12636
  Homolog annotation: Hit_ID=Q9S7C6; Match level="QueryCoverage=47%, HitCoverage=87%, E-value=2e-34, Identity=75%"; Hit description=Ae3 protein precursor
MATSVKRSHSCRCQVLFLLALVLLAFVSASPTPISGKKSKTTVVVGGGNEAIVDEDNDIFNGCHYNNQNPHYSSALFCCSKDKLCWASLPDPPVVWVVVEPAADAPATAEVLRGTDIMYRHLAFKPEDNFTTADTEAHVQRNAALAHVEKHRLAGVLHFADASGVYDVGFFDQIRQIDARLINCHTRL

SEQ ID NO: 54416 - protein, 359 aa, Zea mays
  Coding DNA Sequence Number=SeqID_12637
  Gene Ontology: Mol. function=protein serine/threonine kinase activity
  Homolog annotation: Hit_ID=Q337P5; Match level="QueryCoverage=61%, HitCoverage=29%, E-value=3e-44, Identity=44%"; Hit description =Pleckstriny domain-containing protein, putative, expressed
  Pfam annotation: Domain name=DUF1336; Domain location=34-245; Score =318.5; E_value=1.2e-92; Accession=PF07059.3; Description=Protein of unknown function (DUF1336)
MASSNGEAEQQWIENIKSGGTVPCLAPENCPNGWATPPGDSFMVRGPEYLTNKVKIPGGEYLLKPLGFDWIKGPAKICEILKDSNHRVRKAIDDEVSRSNQPFVWAFNLQLPKDNFSAIFYFVSLEAIPEGSLMDQFLKGDDAFRNSRLKLIANIVKGPWIVRTAVGEQAICILGRALSCKYVQGSNFIEVDVDIGSSIVANAIVHLAFGYITTLTVDLAFLIESQTEPELPERLIGAVRFSELNPGSAGLFERRSEEHQESTQSRPVGFWQGFSQLLNNQGNTREPSPNLQNTNGTLRKEEANEDAKWTLLNQMAVASASFCYIFETCQNKGFLLFDEALSCEIMIQTPTIVSGTIYQ

SEQ ID NO: 54417 - protein, 269 aa, Zea mays
  Coding DNA Sequence Number=SeqID_12638
MDHVKDGVDGMIKYVANEPSVGLYFVQQHARASMPLLLDVKVHRLALLRFLPFAHVELCFGGLGGDLSGKLVEKTREVTLHTEDMEDSICAVRSMADFGLPLADDMIKDINRSLQIMSKTQPKRGLIQNPSWGFQSRKSSGTWDELGSTNGSSSRNYLSSMFNTAKQKASGLRWPQPNFATKDDTSENSASSSALESPQAGGQGASTPDTEKDELPISSRLSEGTAANRSLPATGVSETVEAYNKFKEEQELKLREWLRDSEEAVNDKD

SEQ ID NO: 54418 - protein, 464 aa, Zea mays
  Coding DNA Sequence Number=SeqID_12639
  Gene Ontology: Mol. function=carboxylic ester hydrolase activity; Cellular component=mitochondrion; Biological process=lipid metabolic process
  Homolog annotation: Hit_ID=Q1XBG1; Match level="QueryCoverage=76%, HitCoverage=84%, E-value=1e-106, Identity=53%"; Hit description =Lipase
  Pfam annotation: Domain name=Abhydro_lipase; Domain location=96-160; Score=43.7; E_value=6.1e-10; Accession=PF04083.6; Description=ab -hydrolase associated lipase region
  Pfam annotation: Domain name=Abhydrolase_1; Domain location=174-454; Score=21.7; E_value=0.00016; Accession=PF00561.10; Description =alphabeta hydrolase fold
  Pfam module annotation: Pfam domain module=Abhydro_lipase::Abhydrolase _1; Domain location=96-160::174-454
MVTGGSCGHMVAGLEVPQTTLALTHHVVDVSSCSDERVNRPRRRHLSSGSLIFTGDDDARRKKAQQQRCGKPAGGSAQLGSSSNGSAAGSAGGTRGGQQRHVPVQAGAVRVTTADGYILSLQRIPGGRGRGSGQSAAGSKIPVLLQHGLLMDGVTWLMSSPDESLGYILADGGYDVWIANTRGTVYSRGHTTLSSSDPAYWDWSWDELASNDLSAVVQYVYAQSGQQRMHYVGHSLGTLIAFAALSQRQQLGMLRSAGLLSPIAYLDKVTSPLALAGADVFLAEAMYWLGLDEFDPTGEPVHKLLTDICSQPGIDCYSLMSVFTGDNCCLDNSSVQVFLAHEPQASATKNMVHLAQMIRRGTLAKYDYGNAADNTKHYGQATPPAYDLSAIPDDFPLFLGYGGRDTLSDPQDVSHLLQVLKSHHGDKLTVQYVDDYAHADFVMAANARERVYAPLMAFFKLQDK

SEQ ID NO: 54419 - protein, 119 aa, Zea mays
  Coding DNA Sequence Number=SeqID_12640
  Subcellular localization annotation: CTP_CleavageSite=3; ConfidenceScore=5.41e-01
MVNGSTAVTPNFGKEFVPPPGWTEPPIRPRRCHHRVRAPSSATVSSASLSAARDTPSQSLAAVAPLSLCSSTVASRLQRFPSRLVPEPLVPRRGRPSRLRRVLAAGPSGATVPMPTLGR

SEQ ID NO: 54420 - protein, 147 aa, Zea mays
  Coding DNA Sequence Number=SeqID_12641
MRVKNYKKGFMKSCRQSRCMKCGHSRFVEATREQQERFRGELRQQQMTFVQQQSKYMVAYNAQTQQAKNMSVLFILNTTQQQPFVFPQFQPPMPQWYYMLRHHLRCVDKYLYSNVGLHAQTPNETDDFVNNFFTFEGSGHNSNDPYM

SEQ ID NO: 54421 - protein, 541 aa, Zea mays
  Coding DNA Sequence Number=SeqID_12642
  Homolog annotation: Hit_ID=Q688L0; Match level="QueryCoverage=33%, HitCoverage=62%, E-value=1e-17, Identity=33%"; Hit description =Unknow protein
  Pfam annotation: Domain name=DUF247; Domain location=61-524; Score =249.6; E_value=6.5e-72; Accession=PF03140.6; Description=Plant protein of unknown function
MGVDEDNEAITRANKEISAEPTPLDQDSESTEQAEDVVDLTELKEKVIGAVPFPPQRLDGWMQQWPTIYVVPGDLAAGKTDPYAPATVCFGPLFGPARRVTDGMAKLERYKLCCLRKLIVGRSPSPAGTGTRPAEPAVWKPEVHEPMLRSCVDAMTRLLPRIRASYSIASSMDTIAGDENTVREVKMLLYPNPEVAAVMGSTLAENMLLDGCFILHRLLKMASRAAGKRYDDDDDDWTQVFGRRGVWALVTRDLLLLHNQIPLFVIKALLKQLKGPADIEDDDVLVDGGLQLFSSLHPRRRLQPSPDDSLRLRLRDAHHLLHLFYLSITNIPTQSSASASPDKKLPPELTQWVPCAKELEDAGVRFRARKDGTATGFLDIRFSAVGVLEIPPLQLYDYSEPLFRNLIAFEQTYPDTPGHVTAYAIFMDCLVKTSDDMRLLHSRGILLNHMSGDREAATGFFSGICAGAHASADRNYLAPLMDEVVRYQSGRWPQWRAALLRDYFGNPWAVIAFVAAAIVLALTMLQTFYTLYAYYQPPKQS

SEQ ID NO: 54422 - protein, 191 aa, Zea mays
  Coding DNA Sequence Number=SeqID_12643
  Gene Ontology: Mol. function=nucleic acid binding; Cellular component= intracellular; Biological process=translation
  Homolog annotation: Hit_ID=Q3LRV2; Match level="QueryCoverage=72%, HitCoverage=69%, E-value=3e-54, Identity=68%"; Hit description=Gag
MVTGGDKPTSPAKATSHGKAPSKESGNKKKEGSPSCIKTHKSGEKKKKMKKVVYYETDSSSPSTSGSDAASVTSKRHERKKFSKPPVFEGEDYSMWSDKMRHHLTSLHASIWDIIEFGAQVPSVGDEDYDSDEVAQIRHFDSQATTILLASLSREEYNKVQGLKSAKEIWDVLKTAHEGDELTKITKRETI

SEQ ID NO: 54423 - protein, 667 aa, Zea mays
  Coding DNA Sequence Number=SeqID_12644
  Gene Ontology: Cellular component=nuclear chromosome; Biological process=chromosome organization and biogenesis (sensu Eukaryota)
  Homolog annotation: Hit_ID=Q9AXN6; Match level="QueryCoverage=74%, HitCoverage=95%, E-value=3e-94, Identity=43%"; Hit description=RIX4
  Pfam annotation: Domain name=Rad21_Rec8; Domain location=607-661; Score=77.8; E_value=3.3e-20; Accession=PF04824.7; Description =Conserved region of Rad21  Rec8 like protein
  Pfam annotation: Domain name=Rad21_Rec8_N; Domain location=1-111; Score=178.4; E_value=1.8e-50; Accession=PF04825.4; Description=N terminus of Rad21  Rec8 like protein
  Pfam module annotation: Pfam domain module=Rad21_Rec8::Rad21_Rec8_N; Domain location=607-661::1-111
MFYSHTILARKSPLGTVWIAAHLERKIKKPQIDGIDIPTYAESIMFPEVPIALRLSGHLLLGLVRIYSWKVQYLFQDCNRMLTTMRTSFASVQVDLPIDADCAPFESITLPSTLNLDALNLDDAISLMDTPDNHQKTLDQITLPGCQSRAIRTSPPFHDGFGANNDPNEEAPIDRPIGNSPVNSNIANLTDGALDPPEKMREAPHEFPHLKLTESILGNDDPMDLDHDSSPFVQNKAITPPVIDETTSAGRQVPGRSISNLRAPNTFDAFADDAPLNFDIQLPEFRLEPSPRPVQENKDNRRPKAQVSNRNRKRGMKFDYKIVLSNEKQLLLAVSIVCVKGPLVELVSCCMRKQIDGAELDELICKRRKLPQTALDVWRFSRTNRQGSFLLEPLLHGTCSDLQETYERNFPCVSGLDAECSNVAGVANDDPDASLERQLSPNVPRTAELSYHELTPTSPGNAEAQPEPPLPTLKSPGAAGAVPDDDMLPELPRFSPIDVPSSIRGNDTPYKTPGGTPSWLGGSAVSEIPSSDGNYSLPGQSTRDSDNMSFLFPINEDDEHPEIPGLMSTPGGVSSVATGTTGLGSMSARTRAVALFFKDHASSPSDDQPGKFSLNKILEGKTRKQAARMFFETTVLKSYNYIDVQQEDPYGAIEILVKPLLSAAKLT

SEQ ID NO: 54424 - protein, 169 aa, Zea mays
  Coding DNA Sequence Number=SeqID_12645
  Gene Ontology: Mol. function=protein binding; Cellular component =nucleus; Biological process=ubiquitin cycle
  Homolog annotation: Hit_ID=Q7XEG3; Match level="QueryCoverage=83%, HitCoverage=33%, E-value=4e-29, Identity=49%"; Hit description =BTB/POZ domain containing protein
MASTSETASHVSEGKDHRPEDGAGVSPFRKRKLQSSGYLVNDSLTVECTITVLRDLDAPDREQPLPVPPPSDLHQHLGELLQSSDGADVTFHVSEESFTTHKIFLAARSPVFKVEFFGGMKEALLLWRSETWRLLCSGSCFTSSIPTWPQSSMVTRSLRRRRPSLSTYW

SEQ ID NO: 54425 - protein, 404 aa, Zea mays
  Coding DNA Sequence Number=SeqID_12646
  Gene Ontology: Mol. function=transcription factor activity; Cellular component=nucleus; Biological process=intracellular signaling cascade
  Homolog annotation: Hit_ID=Q336Q9; Match level="QueryCoverage=98%, HitCoverage=68%, E-value=1e-127, Identity=58%"; Hit description =Expressed protein
  Subcellular localization annotation: CTP_CleavageSite=49; ConfidenceScore=5.15e-01
LSSKCDNKLFRIKFSTLHMQRYSFLEAYSKPIRCISRSRTVRPLGPTKRASSATANEIDMLSNGQGFVSTDKVNSRGHSVCLHTPMFPKIEGGMVEVVEAPKIASQNKNARKVVVSKEAQNVIGTDSSTSNYDSFDSGSSWSGSEGDDGIETFSDAVVFRYCLDSTYDRSKFLRGASLTVNKDDLVKLADRVSLYSGCSHHRNQILMSKRLFREGADTWNMISKNNERALWSSAIPEIITKFTNIVHSVRRGLSEQDLEVLRGIAGCGEDIGRDEFDRLWCWLYLVVVSLSRERIKKLWDCTAPRWIEGLITTEEAENALRSSRELLKEAGTFVLRFPITRSWPHPDAGSLVVNYIGSDSSIHHRLLSLDSSDASAEKLQDLLLQEPELSQLGRVDRVSITIRR

SEQ ID NO: 54426 - protein, 740 aa, Zea mays
  Coding DNA Sequence Number=SeqID_12647
  Gene Ontology: Mol. function=RNA-directed DNA polymerase activity; Cellular component=mitochondrion; Biological process=RNA-dependent DNA replication
  Homolog annotation: Hit_ID=Q9FJR9; Match level="QueryCoverage=85%, HitCoverage=85%, E-value=0.0, Identity=65%"; Hit description =Similarity to maturase-related protein
  Pfam annotation: Domain name=Intron_maturas2; Domain location=493 -627; Score=16.2; E_value=6.3e-07; Accession=PF01348.12; Description =Type II intron maturase
  Pfam annotation: Domain name=RVT_1; Domain location=158-468; Score= -33.9; E_value=0.0077; Accession=PF00078.17; Description=Reverse transcriptase (RNA-dependent
  Pfam module annotation: Pfam domain module=Intron_maturas2::RVT_1; Domain location=493-627::158-468
MQPPRRALVTSLLRLRSFSSIAYPHPYPPAPLRRHQFVADPTTSTNRGIVGGIGGVGSGNGNLLDPTQLLRDDPVAITASLWVSSFRAAASTSSSCTPTPPQPLTPFLSRLELWVLAYQKAYADETGSYLPRSSIPASTLASLLTLRNAVLDGRFRFGNRLTPILQSPRAANAPDPATLSKRKLRALLTTPGPSPFQDRVVQELLLLLLEPVYEARFSPKSFAFRPGRSPHAAIRTIRRSFAPYLWYIKGDLSPLLHSPDPALVVGALIRDVRDKKVVDLIRSALLTSVVTASDDAAVKKKKTKRKYQKKKVLPEGEPKPDPYWLQTFFGFAPEEAQTQPDWGHCGVLSPLLANVCLDEFDKWMEERIKEFYKPSKSDVVGGDDGIEQGNTSWPEFVPTTGPDKTRKVDYIRYGGHFLIGVRGPRADVAVLRKQLVEFCDQRFRIKLDNESLPIEHITKGVMFLDHVLCRRVVYPTLRYTATGGKIISEKGVGTLLSVTASLKQCIKQFRKLEFLKGDREPDPQPCFRMFHATQSHTNSQMNKLLLTMAEWYRYADNRKKVVNFCSYIIRGSLAKLYAAKYKLRSRAKVYKIASRNLSRPLKDKKGQSPEYHNLLRMGLVDSIDGLQYTRMSMVPDPDYTPLPFGWRPDHEKILLEYIKLTDQQTLKEQRNCTREDGLITPQDNISMLVWGYKKNAVLLPSKVSDAQGSTEDLGSDTDELNEKELGNEGNQSFQKLAEMS

SEQ ID NO: 54427 - protein, 387 aa, Zea mays
  Coding DNA Sequence Number=SeqID_12648
  Gene Ontology: Mol. function=methyltransferase activity; Biological process=tRNA modification
  Homolog annotation: Hit_ID=Q2JRH1; Match level="QueryCoverage=55%, HitCoverage=78%, E-value=2e-29, Identity=41%"; Hit description=TRNA (Guanine-N(7)-)-methyltransferase
  Pfam annotation: Domain name=Methyltransf_4; Domain location=81-308; Score=87.8; E_value=3.3e-23; Accession=PF02390.8; Description =Putative methyltransferase
MAWTAAGTVCWRLLRLPSVRCPLSSRARCSAAQSLDAVDKEYADLNLRPLYPNVCRHPSSLRPYPRCYSNLTTDSSMYAEGPSHAHTEPTGPPEWKEVFDDPLLPLMVDIGCGSGRFLIWHAKNSGKSQNYLGLEIRQKNFVLYKCPSKPFKCAFELHPLVERAQFWVNELELIYFMFANATMSFEKIISSYPGPLSLVSILCPDPHFKKRHHKRRVLQQPLVDSIINNLCLGGQVFIQSDVLEVAVDMRERFDGYSGILAHVNYVDQDLQCDNEGWLLDNPMGIRTEREIHAELEGATIYRRVYQKVSPQSVPTPSRSPRRSYDSAIAFEKIKVSNPIVEMDGEIPSLIFPFLDLDIKYYDLGILHREAIDDKVTVKFESPLHLLA

SEQ ID NO: 54428 - protein, 318 aa, Zea mays
  Coding DNA Sequence Number=SeqID_12649
  Gene Ontology: Mol. function=structural molecule activity; Cellular component=endoplasmic reticulum; Biological process=ER to Golgi vesicle-mediated transport
  Homolog annotation: Hit_ID=Q6Z382; Match level="QueryCoverage=53%, HitCoverage=19%, E-value=9e-78, Identity=87%"; Hit description =Putative coatomer protein gamma 2-subunit
  Pfam annotation: Domain name=Gamma-COP; Domain location=181-318; Score=-22.1; E_value=2.5e-10; Accession=PF08752.1; Description =Coatomer gamma subunit appendage domain
MSVSRCVVEEMDVTIREEVFSGHVNFSIHLNKKHNQDKQTMDKAKKNRVFYISSSCKNVVRARSRFKLLPLLADVKREGDAERRGRRRGDHVSDMGVRVQLADLEPGITHDVRVVGFVGDYHHVFYQGNVHTAYLLEPSDVPFDISSVPKETKSQPLAEKKSTGKKSAGPASAVSDPVSTVDASYEKLLSSIPEFADFGKLFKSSAPVELTEAETEYSVNVVKHIFDGHVVLQYNCTNTIPEQLLEQVIVFVDASEADEFLEVASKPLESLPYDSPGQTFVAFEKPEGVIATGKFSNIPKFIVKEVTIGSWRSNFMRC

SEQ ID NO: 54429 - protein, 247 aa, Zea mays
  Coding DNA Sequence Number=SeqID_12650
  Gene Ontology: Mol. function=transcription factor activity; Cellular component=nucleus; Biological process=intracellular signaling cascade
  Homolog annotation: Hit_ID=Q336Q9; Match level="QueryCoverage=48%, HitCoverage=25%, E-value=1e-41, Identity=60%"; Hit description =Expressed protein
MAAPESECGGSDGYRDLRGVRVDLDTGAAGADGGGGFAVSFWLYLSVSARPSSVILHQITAGDDTKLPFLALGEGNKLLLFPLMRLHREAPAPASSYPWTDTTNLSSTSVCPLEKWFHIGCEVTENVMCLHVDGFLTAEAPLCSLFDEPDRQDDSNQISLVGNDGKLEGYIYNIEVSYVLGAIKEQYTKNPPFKLSIDYSCSDGIEEGDDGIWSIVGGKVVASLVYADDGTVVAKSRDDSEPPLLIT

SEQ ID NO: 54430 - protein, 139 aa, Zea mays
  Coding DNA Sequence Number=SeqID_12651
  Gene Ontology: Mol. function=unfolded protein binding; Cellular component=chaperonin-containing T-complex; Biological process =cellular protein metabolic process
  Homolog annotation: Hit_ID=Q1SBD4; Match level="QueryCoverage=81%, HitCoverage=21%, E-value=8e-42, Identity=79%"; Hit description =Protein kinase; GroEL-like chaperone, ATPase
MSNHEQKGALQHMSTRAICSDKFRADLMNIAMTTLSSKILSQDKEYFAELAVDAVLRLKGCTNLEAIQILKKPGGSLKDSFLDEGFILDKKIGIGQPKRIENAKILVANTAMDTDLRLWGHVSGWIQCLRLQIRLARHL

SEQ ID NO: 54431 - protein, 187 aa, Zea mays
  Coding DNA Sequence Number=SeqID_12652
MPSLSSLLSGSNTASAELPLIPCKLCNGVVIERVSKQPETTSRKFYRCRAKKTDGFVSGDRRLELLMIALNDHGKAVESLTNSIREMKKKLSNLELVMEELDNVKNLMKAAMVEIEENKKSTAAALKLMENELQKLKGLFAVRLSAVCAWPPVRLAGGRLSAVRLYALRRLAAWRLVAIADGDWGTS

SEQ ID NO: 54432 - protein, 215 aa, Zea mays
  Coding DNA Sequence Number=SeqID_12653
MGLLLSVESDGQMLVLGGPTGEGRVTFMRYSVAFLQSVGFQGPMLIFGRTRGFHVDFLEDPWSVVRVTFRSLQCCVLNASVMFHNPCHFLESTVGLLLSVESDGRMLVLGGPTGERRSHVDFWQDPQSEARVTFRSLQCCVLNTSVMFHVPCHFLESTVALLLSVESDLRMLILGGPTGEGRVTFMRYSVGLLLSVVFGTMLLRSFKVLSFRVPC

SEQ ID NO: 54433 - protein, 757 aa, Zea mays
  Coding DNA Sequence Number=SeqID_12654
  Pfam annotation: Domain name=Peptidase_C48; Domain location=513-695; Score=35.6; E_value=1.7e-07; Accession=PF02902.9; Description=Ulp1 protease family, C-terminal catalytic domain
  Subcellular localization annotation: CTP_CleavageSite=29; ConfidenceScore=5.15e-01
MAMGMEVQLVGAVGTPMTGRSNGYPRSHSSSMKRATNWPGKIWRRGDRMDGRQERAKKSWRLGEKMVALGAMGTEVRMVAAVENEATATSRLIVVVRGHGAEHLPEKSRLIRLKKGTASPILMSKVTWCRSAGVKKKANMPQGKSKKNVVKEKAKKIKKNAESRAKVHENTDQIEINIREGVSIWITKAAVQKCFEFPPGTDKKLPIDPTTKTFDSLYRVLSVSEKKINVKKKKMKENMKEKQVEEEKIEMNMEEKKQNLVEDEGSQQEESEEEDGEDGEIGEEEGEDGAIGDAKVGGDGDKESAKRGGIKVAVRRNVLTPLNINLMLQNINNDEILKLLVKRNEDTDGTEPNLDIDLIVRCFFAVSSVAEFGKDKKKLISGCTTVLMVVFLDHLVENPLDPLTIPRINLYTSDFIADLIMVPKDSPGPEKKRRKFKNSEDTCYHEDSEMVPSPGRASPVVASVQSHKNFVDHADLEIVPSHENSVDLHSVYMAHVLERSRQSIVVDILDYNIPESTFADCLLPTGHMHTDVFYLQCQLLSKDWKDKVILSWKATQELIHQDIGVKELDKELTAEVMNKVDLIFIPIIHAGHWSLVILSTAKQETYILDSYPRHSGVAKDVLTQLQKYLDNKHNFDMSNYTDHVPPVQHQKNNYDCGFHVLLYIEEFMKEKMYKINKKMVLKFRKQLCMNLLYHPLNRINLVEFRKKLGITLKRKLPGILDLTIEGERSESEAAVIIEIENRDDKTLEDEHISVEKE

SEQ ID NO: 54434 - protein, 211 aa, Zea mays
  Coding DNA Sequence Number=SeqID_12655
  Homolog annotation: Hit_ID=Q9SK61; Match level="QueryCoverage=58%, HitCoverage=36%, E-value=2e-51, Identity=72%"; Hit description =Expressed protein
MEDFYREIYAVDGITGIKFPDHYPVSRLLGCVEVVGCLRSEELVCWEHVPESVRLEGLTDFCWLCENPQKLVVPFEMRGYQGVYNLERRIYDGAVRGLLPVQGPLPVKFPLPDPRDPFSLKPGSLTFAASKPTLQKSESVAAAIAGARAAATQFSKKDRKAAASSEIGTEEQSWGSHGAMRIYRTRIGLQFSRALKRIPKIQILSLGEALD

SEQ ID NO: 54435 - protein, 121 aa, Zea mays
  Coding DNA Sequence Number=SeqID_12656
  Gene Ontology: Mol. function=nucleic acid binding; Cellular component= intracellular; Biological process=translation
  Homolog annotation: Hit_ID=Q3LRV2; Match level="QueryCoverage=69%, HitCoverage=36%, E-value=1e-34, Identity=82%"; Hit description=Gag
MTKVDALPKVVELRTLEVGTNVVTLLRTFGRGRPPRWDIVEFGAQAPQVGDEDYDSDEPAQIRHFNSQATSIFLASLCREEYNKVQGLKNAKEIWDVIKTAHEWDEVTKITKCETIEGELG

SEQ ID NO: 54436 - protein, 312 aa, Zea mays
  Coding DNA Sequence Number=SeqID_12657
  Gene Ontology: Mol. function=protein binding; Cellular component =cytoskeleton; Biological process=regulation of transcription from RNA polymerase II promoter
  Homolog annotation: Hit_ID=Q9FKT0; Match level="QueryCoverage=91%, HitCoverage=70%, E-value=1e-110, Identity=59%"; Hit description =Similarity to actin
  Pfam annotation: Domain name=Actin; Domain location=1-286; Score= -67.7; E_value=1e-10; Accession=PF00022.9; Description=Actin
MDGGSGYCKYGWSKYAAPSGRCATFLEFGNIEAPMYARLRHFFSTIYTRMQIKPSTQPVIVVLPLCHSDDTESARASRKQYKETLYSVLFDMNVPAVCAVDQAVLSLYASKRTSGIVVHIGFNTTSVVPIFQGRVMYEIGVETVGQGALKLTGFLKELMQRRNISCESLYTVRTIKEKLCYVAADYEAELRKDTQASCEIDGTVGDDSWYKTVILAGGSSCLPGLPERLEKELHQLLPPYMSEGIRVLPPSFGTDSAWFGAKMISNVSTFTEAWCAKKKQFRQKTGRSGTLFANSWLLAKAQLSRFNFKWND

SEQ ID NO: 54437 - protein, 192 aa, Zea mays
  Coding DNA Sequence Number=SeqID_12658
  Homolog annotation: Hit_ID=Q9FGA1; Match level="QueryCoverage=46%, HitCoverage=59%, E-value=1e-13, Identity=45%"; Hit description =Arabidopsis thaliana genomic DNA, chromosome 5, P1 clone:MPF21
MASSLARLGAALPRAAARALPPGRWAAAVLGIGASRRAERCQVHSDIKVAPTSDVKDDSKSETRRIKMLYDGDCPLCMRELKQKVTIILIPLQLNFHVISCLCRLKVRILYCGQRDEYEKVMGKIHAILSDGTVITDVEAFRKLYEEVGLDWVYAVRLSPATSSIYILYIRPLQSSLKDSISYIYFLFNNVL

SEQ ID NO: 54438 - protein, 251 aa, Zea mays
  Coding DNA Sequence Number=SeqID_12659
  Gene Ontology: Mol. function=ATP-dependent helicase activity; Cellular component=intracellular
  Homolog annotation: Hit_ID=Q10CV6; Match level="QueryCoverage=77%, HitCoverage=16%, E-value=5e-82, Identity=78%"; Hit description =Helicase associated domain family protein, expressed
  Pfam annotation: Domain name=dsrm; Domain location=112-174; Score =44.7; E_value=3.2e-10; Accession=PF00035.15; Description=Double -stranded RNA binding motif
MADGALWLLAVMFQAGHLKMLDGYIDFFMDPSLSECYLQLKEELDKLIQQKLEDPNFDIHKEGKYILFAVQELAAGDLCEGRFVFGRETSRARLRSPEDDGKSNLIKDGMNPKSLLHTLLMRAGHTPPRYKTKHLKTNEFRAVVEFKGMQFVGKPKRNKQLAERDAAIEALGWLTQTSGVNAIEALERDATDQGILLCEEGVDFVERSARLGHARIAERGRRGHPVHWIWAWMLAWIWCAEVVAGRGISQR

SEQ ID NO: 54439 - protein, 364 aa, Zea mays
  Coding DNA Sequence Number=SeqID_12660
  Homolog annotation: Hit_ID=Q6QP51; Match level="QueryCoverage=49%, HitCoverage=75%, E-value=4e-14, Identity=39%"; Hit description =Putative growth-regulating factor 1
  Pfam annotation: Domain name=Extensin_2; Domain location=12-308; Score=-108.9; E_value=0.0045; Accession=PF04554.4; Description =Extensin-like region
MTASKKVCHVIPFRILFLFLSLSLTTGTGKGGYSERDPSPPRKRARSPPTDQRFEGWPLGRVRQPPQSTRALRPLLVRGSKANPSEGFDSRLRPLGLHAHYWSKVRRLAPRKGSTAASGHSEPPTRRPLLIRELGLTLDAGRRTPPRPDPRARTQPRPRMTDSTSPDPRARTQPRPQTTDSASPDPRARTQPRPRTTDSASPDPRARTQPRPRTTDSASPDPRARTQPRPRTADSASPDPRPPGHPWPRPWPPPAQPPAAPWPQPRLASLGRALAGPGRAQPHPRPALAAPSAAPGPWPPASRPCPLRIRGVVRFAVVPSMGLGVCGSLCQGDNEIDGSDYDYGIGEDEAVEGDFQEFQDYDEF

SEQ ID NO: 54440 - protein, 342 aa, Zea mays
  Coding DNA Sequence Number=SeqID_12661
  Gene Ontology: Mol. function=nucleotide binding; Cellular component =membrane; Biological process=defense response
  Homolog annotation: Hit_ID=Q9SX38; Match level="QueryCoverage=96%, HitCoverage=39%, E-value=3e-71, Identity=42%"; Hit description =Putative disease resistance protein At1g50180
  Pfam annotation: Domain name=NB-ARC; Domain location=147-342; Score =1.2; E_value=2.3e-10; Accession=PF00931.13; Description=NB-ARC domain
MDFSAVSSALKAIGELTQEVTSLWGVDDQVESLASELRWMQSFLKVADARKVDHEVIRTSVVEIRELAYDAEDVIEMFAFKVASKRKGGFSNCIKRCACFLKEGCLLHQIKSEIEKITAKIKELARQLQMYDVSKFEVDGERPSSSTVRLEARRPYPHVMDDNIVGLDDDVKKLVTVLLNEQSECRVVSICGMGGLGKTTLAKKIYHHSQVVGHFKHLVWVYVSENCQKRKVWEDIRSDLPSLSEEDRKMNDEKLANTLSSFFEENKCLVILDDVWNIEAWDSLKPAFSTRETKSKILLTSRKKEIVAHADKNGFLYELQELDYNQSWELFQKIAFSQTNSP

SEQ ID NO: 54441 - protein, 585 aa, Zea mays
  Coding DNA Sequence Number=SeqID_12662
  Gene Ontology: Mol. function=nucleic acid binding; Cellular component= intracellular; Biological process=DNA integration
  Homolog annotation: Hit_ID=Q1S4N1; Match level="QueryCoverage=99%, HitCoverage=43%, E-value=0.0, Identity=58%"; Hit description =Peptidase S8 and S53, subtilisin, kexin, sedolisin; Integrase, catalytic region; Zinc ...
  Homolog annotation: Hit description=finger, CCHC-type; Peptidase aspartic, catalytic
  Pfam annotation: Domain name=zf-CCHC; Domain location=258-275; Score =0.8; E_value=0.74; Accession=PF00098.13; Description=Zinc knuckle
  Pfam annotation: Domain name=zf-CCHC; Domain location=279-296; Score =11.4; E_value=0.013; Accession=PF00098.13; Description=Zinc knuckle
  Pfam module annotation: Pfam domain module=zf-CCHC::zf-CCHC; Domain location=258-275::279-296
MEGGSSFSVVAPPVFDGDNYQMWAVRMETYLEALDLWEPVEEDYEVPPLPANPTVAQIKAQKEKKTRKSKAKACLFAAVSQMIFTRIMSLKSAKEIWDYLKAEYEGDERIRGMKVLNLIRDFELQKMKESESVKEYSDRLLSISNKVRLLGSELNDSRIVEKLLVTVPEKFEATNTILENTKDLSKISLAELLNALQAQEQRRSMRQEGVIEGALPVKHQDNNRYKKKKNFKNQSTSGEKLSGNYQKSKRGGVKKSYPPCHHCEKKGHPPFKCWKRPDAKCSKCNQLGHEAVICKVKGQVQEVDAQVVDQEEEEDHLFVVTCFSSRESSESWLIDSGCINHMTYGKELFEELRNTEVKRVRIGNGEYLEVKGKGTIAITSYEGTKFISDVLFVPKIDQNLLSVGQLLDKGYKVLFENKQCLIRDANGRDLFNVKMKGKSFALSPMEKEQMTFKSRVSATETWHKKLGHFHHRGLLQMQSKKLVEGLTDIDDDLPHCRACKFGKQHRQTFPKQAWRASKKLQLVHTDLCGPQRTPSLNGNLYYIAFIDDLTRMCWIFLLKQKSEVAGVFWKFKARVENESGCMIQI

SEQ ID NO: 54442 - protein, 168 aa, Zea mays
  Coding DNA Sequence Number=SeqID_12663
MEGPAKQIALPLKRRSRVQVAMGWWQVRRDSGSGRGQESADLALSGGQGSKTLDLINMTNIRELEIRGAFNIEDFYTEELGRIDPRHLTHLLSSCNSIFKLSLDVEVSYLKMLEFHEEAFIGKEMFCCGQAFANLESALRSLTIWRCGKWVKESCLLFSDWRYKNADS

SEQ ID NO: 54443 - protein, 57 aa, Zea mays
  Coding DNA Sequence Number=SeqID_12664
MMVAKSMVKLESFKSKERGVCERNNEDRDLNALEQIEGATVSGKGIGDEIIKVIDNI

SEQ ID NO: 54444 - protein, 150 aa, Zea mays
  Coding DNA Sequence Number=SeqID_12665
MEQNKPSVPWSEGSNGYFAQRSTAKAEESEEQCATLRVESGPPVRGAPDSEQCLSGCRLKTKPPTVDCFNTPKRLGNVAGAPDSVRYAHRQQPNPNGCLVVEGYKYPQPPPLQPSKHSTHCIQYKSNRLHSKTQIKVIDPLKVPNSTLAH

SEQ ID NO: 54445 - protein, 326 aa, Zea mays
  Coding DNA Sequence Number=SeqID_12666
  Gene Ontology: Mol. function=protein binding; Cellular component =spliceosome; Biological process=mRNA processing
  Homolog annotation: Hit_ID=UPI0000DA43ED; Match level="QueryCoverage =35%, HitCoverage=97%, E-value=2e-11, Identity=32%"; Hit description =PREDICTED: similar to keratinocytes proline-rich protein
MQSACNRAKWAHPFDSDAPSMEAQAHTSCNRRAGCYVRATAPPLAPLPCLLDCGTSTATRGNSAYDPTVPARRIGHGPVSRGRRRDGRCGKKWAGSNGGGRRAEAAVTLSAKLMRSERRFAFAIMTASKKGPRKGDTSKGILLREGNGPRAPLLIRGSKAGPSEGFNNRLRALGLRAHYWSEVRGAAPRKGSTAASGHSGSAPTTDQGFVGWPTKAKSGLRRHRKLRFARPQGSDSGSAPEDDKLRFARPQGSDSGSAPEDDELRFARPQGSDSGSAPEDDELRFARPQGSDSGSAPEDDELRFARPHGSDSGSAPEDDELRFARP

SEQ ID NO: 54446 - protein, 456 aa, Zea mays
  Coding DNA Sequence Number=SeqID_12667
  Gene Ontology: Mol. function=cysteine-type endopeptidase activity; Biological process=proteolysis
  Homolog annotation: Hit_ID=Q6J270; Match level="QueryCoverage=42%, HitCoverage=65%, E-value=5e-52, Identity=48%"; Hit description =Putative cysteine protease
  Pfam annotation: Domain name=Peptidase_C1; Domain location=125-311; Score=298.4; E_value=1.4e-86; Accession=PF00112.13; Description =Papain family cysteine protease
MASSFKRSLPCVLLLLLLLLLAVFHHGCSSARAHRRAGDMEGSMSTDDSSMIERFQRWKAAYNKSYATVAEERRRFREFMAMYTAPAPAQLPADESVITTRAGPVDAVGGAPSQLPVYVNLSASAPASVDWRASGAVTPVKNQGRCGSCWAFSTVAVVEGIYQIRTGKLVSLSEQELVDCDTLDDGCDGGISYRALRWIASNGGITTEADYPYTGTTDACNRAKLSHNAAGGDNFQHYKKGVYNGPCGTNLNHGVTVVGYGQEAAGGDRYWIVKNSWGQGWGDGGYIRMKKDVAGKPEGLCGIAIRPSYPLINSGGGALVENAGEGVSCFLGRRISDPRLSLKPAEAGARAWVRPIGGGQGSVTQVLAWGLAGWGAAVSAPDRAALTGGGPLVGDLEKGKGGGLAQLPSGAGRQRLREGGRRIGAGRLPGGAQPSELPSSSDRVCMGMGRAPTTLW

SEQ ID NO: 54447 - protein, 546 aa, Zea mays
  Coding DNA Sequence Number=SeqID_12668
  Gene Ontology: Mol. function=nucleic acid binding; Cellular component= intracellular; Biological process=DNA integration
  Homolog annotation: Hit_ID=Q7XBC6; Match level="QueryCoverage=99%, HitCoverage=59%, E-value=1e-160, Identity=77%"; Hit description =Putative copia-type pol polyprotein
  Pfam annotation: Domain name=rve; Domain location=394-545; Score =120.5; E_value=4.6e-33; Accession=PF00665.16; Description=Integrase core domain
  Pfam annotation: Domain name=zf-CCHC; Domain location=332-349; Score =30.5; E_value=5.9e-06; Accession=PF00098.13; Description=Zinc knuckle
  Pfam module annotation: Pfam domain module=rve::zf-CCHC; Domain location=394-545::332-349
MSGDHAKKKMETGEKPTTSYGSTSSEESRTKRREKKKSSSNKGKEKKSSSHHKEKKEKSSSHKPHRKGDKHKRMRKVVYYETDTSSTSTSDSDAPSVTSKRQERKKYRDENYDEDEVAQIEHFNSQATTILLASLSKEEYNKVQGLKNAKEIWDVLKTAHEGDELTKITKRETIEGELGRFRLQKGEEPQHMYNRLKTLVNQVRNLGSKKWDDHEVVNVILRSLIFLNPTQVQLIRGNPRYTKMTPEEVIGHFVSFECMIEGSRKINELGDTSEAQPVAFKATEEKKEESTPSRQPIDASKLDDEEMALVIKSFRQILKQRRGKDYKSRSKKVCYKCGKPGHFIAKCPISSDSDRGDDKKGRRKEKKRYYKKKGGDAHVCREWDSDESSSDCSDDEDAANIAVTKGLLFPNVGHKCLMAKDGKKKKEKSQTQETLKGFLRRAQNEFGLRIKKIRSDNGTEFKNSQIEGFLEEEGIKHEFSSPYTPQQNGVVERKNRTLLDMARTMLDEYKTPDRFWAEAVNTACYAINRLYLHRILKKTSYELLTG

SEQ ID NO: 54448 - protein, 77 aa, Zea mays
  Coding DNA Sequence Number=SeqID_12669
  Gene Ontology: Mol. function=cysteine-type endopeptidase activity; Cellular component=cellular_component; Biological process=proteolysis
  Homolog annotation: Hit_ID=O81085; Match level="QueryCoverage=76%, HitCoverage=17%, E-value=1e-14, Identity=56%"; Hit description =Cysteine proteinase precursor, AN11
MDGFTRSEASLANAVAGQPVAVSIEAGGDNFQHYKKGVYNGPCGTNLKHGVTVVGYGQEAAGGDRSEGLTARFQELR

SEQ ID NO: 54449 - protein, 136 aa, Zea mays
  Coding DNA Sequence Number=SeqID_12670
MGKSNKRKREPTPPSEDFGDSEYSEEEFSSESEGTLAPVSPPASSDDSDDSQGLAAEVWTYIRVVERSGIAGSDESEYSSNEEDSSEEDGGGEDDDDDDGDGGDKGGNGGSKGSDGGSSRGGNGGSSSKGSNRSSG

SEQ ID NO: 54450 - protein, 310 aa, Zea mays
  Coding DNA Sequence Number=SeqID_12671
  Gene Ontology: Mol. function=transferase activity; Cellular component= endoplasmic reticulum; Biological process=biosynthetic process
  Homolog annotation: Hit_ID=Q10QW6; Match level="QueryCoverage=97%, HitCoverage=83%, E-value=1e-140, Identity=68%"; Hit description =Glycosyl transferase, group 1 family protein, expressed
MAEVTERRKRAAVVVLGDIGRSPRMQYHSLSLANQASMEVDIVANGEKVQLTGISKISGALALLLKAAVQFILLVWFLCFKIPRPYVFVVQNPPSVPTLAAVKLASWLRGAKFIVDWHKFGYTLLGLSHGRSHIIVKIYFWFEKYFGQMADGAFCVTKAMQHELAQNWGIRLGNSICSAMGNAKCISVEEVWEDMSITVFATLGEDDSTDEEQLWIDIKNGKQFVYPRLLFIVTGKGPDRKKYEVQIKRLKLRRVALRTMWLASEDYPLLLGSADLGVSLHTSSSGLDLPMKVVDMFGCGLPVCAAPFSW

SEQ ID NO: 54451 - protein, 176 aa, Zea mays
  Coding DNA Sequence Number=SeqID_12672
  Homolog annotation: Hit_ID=Q2R2Z6; Match level="QueryCoverage=85%, HitCoverage=35%, E-value=2e-64, Identity=78%"; Hit description =Membrane associated salt-inducible protein, putative, expressed
  Pfam annotation: Domain name=DUF860; Domain location=13-175; Score= -54.6; E_value=8.2e-10; Accession=PF05898.4; Description=Plant specific of unknown function (DUF860)
MTRGRSVKDRSKKKRVHALEVATERWKVLSKVLAVVDALKKEDEHVTPLKRLEILRPQLGLVKPHKVAHFVRRSPHLFEVCRDSRGVMWAGLSPQAEALVEEEARLLEDHSPVAVQYVTRMLMMSVDRRLPVDKIAHFRRDMGLPHDFRTRWVHMFPEHFRLVRLEDDFEEKLIIM

SEQ ID NO: 54452 - protein, 79 aa, Zea mays
  Coding DNA Sequence Number=SeqID_12673
MNVVPALQISQPTHPSILYSPFPVYAYSDGCHHHVPHLRLHTATRPDSLEGPNNGGAAGNFRNLWVMGDGTEDPPLLIL

SEQ ID NO: 54453 - protein, 147 aa, Zea mays
  Coding DNA Sequence Number=SeqID_12674
  Subcellular localization annotation: CTP_CleavageSite=32; ConfidenceScore=5.44e-01
MARPSARVPARAAASGSRKGEPPLRQNFPRKRFSTKTTFVPFDCINGGILKTTRETLNGKADRAKQLLRLRDTDTLLVTFRERNELPPHRKGYKITSSKRLTGDHCTSSDNDLRLKRLDSSSDCLRANATVKRPSYQSPIRGARTNH

SEQ ID NO: 54454 - protein, 251 aa, Zea mays
  Coding DNA Sequence Number=SeqID_12675
  Gene Ontology: Mol. function=RNA-directed DNA polymerase activity; Cellular component=mitochondrion; Biological process=RNA-dependent DNA replication
  Homolog annotation: Hit_ID=Q8S463; Match level="QueryCoverage=99%, HitCoverage=13%, E-value=1e-121, Identity=89%"; Hit description =Putative prpol
MGCLAALSCFISHLGERGLPLYRLLRKTERFTWTSEAEEALGNLKVLLTSAPIMVPPAVGEALLIYVAATTQVVSVAIVVERREEGHALPIQRPVYFISEVLSETKIRYPQIQKLLYAVILTRRKLRHYFESHPVTVVSSFPLGEIIQCREASGRIAKWAVEIMSETISFAPQKAIKSQVLADFVAEWVDTQLPAALIQPELWTMFFDGSLMKTGVGVGLLFISPLGKHPPLRAVPPFPGIQQRDRVRGSG

SEQ ID NO: 54455 - protein, 266 aa, Zea mays
  Coding DNA Sequence Number=SeqID_12676
  Gene Ontology: Mol. function=protein dimerization activity; Cellular component=nucleus; Biological process=regulation of transcription, DNA-dependent
  Homolog annotation: Hit_ID=Q7XE06; Match level="QueryCoverage=84%, HitCoverage=32%, E-value=2e-85, Identity=64%"; Hit description=HAT family dimerisation domain containing protein
  Pfam annotation: Domain name=zf-BED; Domain location=43-88; Score =45.2; E_value=2.2e-10; Accession=PF02892.5; Description=BED zinc finger
MAVGRVRGGSPRFLDPMGAGTEDTIEIEDDVTIGSKRKPKLKSWVWEEFDRLQINGIWKAKCKWCKKYLGGETRNGTSHLSGHLEICPDRSVRKGLKQSSLKLTANPHDGIVTLEKYTFDQDVARKELALMIIVHEYPLAMVDHVGFRKFCATLQPLFKVVSRNTIRKDILDMYEVQKKSMVKYFRSLSSRVAVTTDMWTANHQRKGYMAVTAHFLDDDWKLRSFLIRFIYVPAPHTADVITDVLHEVLLDWRIERNLSTITLDKL

SEQ ID NO: 54456 - protein, 61 aa, Zea mays
  Coding DNA Sequence Number=SeqID_12677
MASYDNTPRGHKVFNLWLSTNQELELYPFPKKETKLMESKVSILSQGIDIFLKWYGYHVKN

SEQ ID NO: 54457 - protein, 166 aa, Zea mays
  Coding DNA Sequence Number=SeqID_12678
MTNDGVTTRLQKEMGLLQHELSQLDNKLEAKLEMKSLILRSFVMISKGKSEWWSKLKQIFEAEGVDDSAKVVKIRPYRYPSVQKNEMRDWSRRCMILVLSRIVTTLLLHLLSWQLNQLTVKDKFLILVIEELLDELGQAACVSKLDLRPGYHQTRLWEGDIHKTAF

SEQ ID NO: 54458 - protein, 167 aa, Zea mays
  Coding DNA Sequence Number=SeqID_12679
  Subcellular localization annotation: CTP_CleavageSite=61; ConfidenceScore=5.49e-01
MANPSRSIRPSLGGHCHGSGAVSSVIFVATLVTSGGYQPQFVPQMSSLGFGNGVSYQSELVSQVPSSDFGRNENGLFSPSHFPNNDANPSVSSFTPAVHHVPFGDNRLTLPHGFGPQHSNHVGYDNGGLPMSHLGNQISTLRSYDQRPSVGPQMPWSTKPRAYVSHV

SEQ ID NO: 54459 - protein, 180 aa, Zea mays
  Coding DNA Sequence Number=SeqID_12680
  Gene Ontology: Mol. function=thiosulfate sulfurtransferase activity; Cellular component=mitochondrion; Biological process=sulfate transport
  Homolog annotation: Hit_ID=Q94C43; Match level="QueryCoverage=66%, HitCoverage=46%, E-value=5e-25, Identity=40%"; Hit description =Thiosulfate transferase
  Subcellular localization annotation: CTP_CleavageSite=37; ConfidenceScore=5.76e-01
MKRPRSSPVAPTGRSAPRWTAARSTSASATTTTAATSFQYFSGVSPFTFTMLSRYTNHKVAHIPGALFFDLDGIVDQTTDPKYRYTDDFPRIAVIHTSFYKSHLPHMLPSEEAFATAISELDIKNQDKVIVYDGKGFFSAPHVWWAIERVYNGEQINTVSFQTEFQPNLFWALEKASDFF

SEQ ID NO: 54460 - protein, 136 aa, Zea mays
  Coding DNA Sequence Number=SeqID_12681
  Homolog annotation: Hit_ID=Q2QPX6; Match level="QueryCoverage=37%, HitCoverage=78%, E-value=3e-21, Identity=94%"; Hit description =Ribosome associated membrane protein RAMP4 containing protein, expressed
  Pfam annotation: Domain name=RAMP4; Domain location=51-117; Score =95.2; E_value=2e-25; Accession=PF06624.2; Description=Ribosome associated membrane protein RAMP4
MELLRAFRLSRSGAQTWSGAGLHRYLAFQVQIQGGGIITDPCEHEWMQTVETTSRRLADRKTAKFQKNITRRGSVPETTVKKGNDYPVGPLVLGFFIFVVIGSSSGHQKLLRTVKRSVFEPAFIKFIGGKNHSKST

SEQ ID NO: 54461 - protein, 308 aa, Zea mays
  Coding DNA Sequence Number=SeqID_12682
  Gene Ontology: Mol. function=protein dimerization activity; Cellular component=nucleus
  Homolog annotation: Hit_ID=Q2QNH1; Match level="QueryCoverage=99%, HitCoverage=49%, E-value=2e-99, Identity=68%"; Hit description=HAT family dimerisation domain containing protein, expressed
MAPRKHPSGSKKRKRKKEVEEFIESQRGAMDKFVRTNTRTSSNEDQPNLAIVVVAEQPDTNEELEDHDPTLEENVDINTNEKCKSSLGHDGFGDWRHTSERLKEHEASMEHITSMSSWNELRVRLRKTETIDKEFQHQIAKEKERIRQVLLRIIDVVKFLGKRTLAFRGSSEQLYNDQNGNFLACLEMIAEFDVVMQDHLRRTQNNDIQYHYLSHKIQNELISLLASDITKSIIKIVKEAKYFSVILDCTPDVSHQEQMSLLVRCVNMSSGKVEEYFLGFMKVDDTSGEGLFNSLLDSIESFGLNIAE

SEQ ID NO: 54462 - protein, 63 aa, Zea mays
  Coding DNA Sequence Number=SeqID_12683
MEDELDVGKKAAIRRTRGRCYSSDLGRHFLAFSAWIQTWVTVAKIFPTQYSTSLIKGSQPFAN

SEQ ID NO: 54463 - protein, 177 aa, Zea mays
  Coding DNA Sequence Number=SeqID_12684
MPPTPTPPKDKKIKNYSEMMLSALAIPLYEYLSQSLQLVLNISYTSNDIQQQENGQGGATVHAADAAEAVLGLGRMEACIVANRCLASDAMAVGEQTEPPGTDTERSRRPGGLLESWARPRGSPWRRPAASRSGRSRGGGEPGGAGAAGGGFWSKQGAEREGCASTLSADLGATESE

SEQ ID NO: 54464 - protein, 186 aa, Zea mays
  Coding DNA Sequence Number=SeqID_12685
MESAITLYLQGHYHPTDQAEAKRFVFQVKTEIWTEKSSLSWSPFLCCRGAGNQQKLPFPSSLHSPLLFFRCSASHRIASPRRQRNSSPGRDLFHPPLSLRRFAPPSRGLPRMLPASHPLLYACVFRDTHLVAELDHAHSHSQSTATSADPVASDAPSPAPDDDLPALAAALVAAARAHALTHTARR

SEQ ID NO: 54465 - protein, 660 aa, Zea mays
  Coding DNA Sequence Number=SeqID_12686
  Gene Ontology: Mol. function=catalytic activity; Cellular component =peroxisome; Biological process=metabolic process
  Homolog annotation: Hit_ID=Q84K86; Match level="QueryCoverage=87%, HitCoverage=99%, E-value=1e-154, Identity=51%"; Hit description=4 -coumarate:CoA ligase-like
  Pfam annotation: Domain name=AMP-binding; Domain location=140-557; Score=356.3; E_value=5e-104; Accession=PF00501.18; Description=AMP -binding enzyme
  Subcellular localization annotation: CTP_CleavageSite=54; ConfidenceScore=5.83e-01
MSMTQPSSTRSKAMTQPILTCTPPFLTPRKNCVATTNMPSPSSRGPMPRPPVVSSNANAAPFLQLHTHNHHHQQQLRMGDAAIAAVHLHESEEEHIFRSRFPPVAVPDDVTVPEFVLADAEAYADKTALVEAAPGGRSYTYGELVRDVARFARALRSIGVRRGHVVVVALPNLAVYPVVSLGIMSAGAVFSGVNPRAVAAEIKKQVEDSEARLVVADAVAYDKVKDAGVPVIGIGDVARLPGAIGWDELLAMADRAGAPVVALEPAQQSDLCALPYSSGTTGVSKGVMLSHRNLVSSLCSSMFAVGQELVGQVVTLGLMPFFHIYGITGICCATLRHKGTVVVMDRFDLRAFLGALLTHRVMFAPVVPPVMLAMVKSPVADEFDLSGLALRSVMTAAAPLAPDLLAAFERKFPGVQVEEAYGLTEHSCITLTHASGGGEDVGSAVQVAKKKSVGFILPNLEVKFVDPDTGRSLPKNTPGEICVRSQAVMQGYYRKKEETERTIDAAGWLHTGDVGYIDDDGDVFIVDRIKELIKYKGFQVAPAELEAILLSHPVRRGRRRLRVSDRADRGMQLEIVRVCSCGSSCMLPDEEAGEVPASCVVRRRGAPESEADMMAYVAGRVASYKKLRLLRFVDAIPKSVSGKILRRQLRDEFVKKTAAA

SEQ ID NO: 54466 - protein, 532 aa, Zea mays
  Coding DNA Sequence Number=SeqID_12687
  Gene Ontology: Mol. function=protein serine/threonine kinase activity; Cellular component=cytoplasm; Biological process=protein amino acid phosphorylation
  Homolog annotation: Hit_ID=Q9M728; Match level="QueryCoverage=72%, HitCoverage=82%, E-value=1e-152, Identity=71%"; Hit description =Viroid symptom modulation protein
  Pfam annotation: Domain name=Pkinase; Domain location=144-477; Score =236.8; E_value=4.8e-68; Accession=PF00069.15; Description=Protein kinase domain
  Pfam annotation: Domain name=Pkinase_Tyr; Domain location=144-477; Score=-26.1; E_value=7.2e-11; Accession=PF07714.7; Description =Protein tyrosine kinase
  Pfam module annotation: Pfam domain module=Pkinase::Pkinase_Tyr; Domain location=144-477::144-477
  Subcellular localization annotation: CTP_CleavageSite=40; ConfidenceScore=5.01e-01
MEGVLERWKTKIFVGGSLSAARGRGTTQVAFSWLGGGVMESSSKSSYSKLSAANDKMDSDAAGSHESARSNGLSVDAADKAPAAGGAGRADKTSDASTGSSDDSLVDSSGGTGRHTKRHTGSDRRWEAIRSASAGGSPLSLVHFRLLKRLGYGDIGSVYLVELRGTGTFFAMKVMDKEALISRNKLVRAHTERQILGLLDHPFLPTLYTHFETDKFYCLVMEYCCGGNLHSLRQKQPNRHFTEQAARFYASEVLLALEYLHMLGIVYRDLKPENVLVRDGGHIMLSDFDLSLRCSVSPMLVRSSSVHAAANNGVVHADGASQQGQGCIQSPSAFFPRIVLPKKSRKTSRSDSSIKDGSILEFNAEPTDARSTSFVGTHEYLAPEIVRGEGHGSAVDWWTFGIFLYELLHGTTPFKGDSNRATLCNVVDQPLRFPDAAPPVPVSTVARDLIRGLLVKDPQKRIATRRGAAEIKQHPFFDGVNWALVRDAHPPSVPDPADLGRFASKEKPAAAVATAHRAPAAKPKTGNFVQYF

SEQ ID NO: 54467 - protein, 108 aa, Zea mays
  Coding DNA Sequence Number=SeqID_12688
MEESTTHGRDWNSTSPAIYVLRWRLLNLAAVPRPNETLAPYVHDPSSLDWMNEGREGLYPCGHAPPQEAAGRELAADFDVTVMVSSRVQVRCEIRVEEGFLDAGTHGQ

SEQ ID NO: 54468 - protein, 134 aa, Zea mays
  Coding DNA Sequence Number=SeqID_12689
  Gene Ontology: Mol. function=transferase activity, transferring hexosyl groups; Biological process=metabolic process
  Homolog annotation: Hit_ID=Q10L51; Match level="QueryCoverage=57%, HitCoverage=15%, E-value=1e-20, Identity=64%"; Hit description =Flavonol-3-O-glycoside-7-O-glucosyltransferase 1, putative
MDLNCLKLYERVIWFLLLVPSDDGSGYMGRHEARHDTMATAMLARRDAEDSGSGTKAAHFVFVPLREQGHLIPAVDTALLLATHGALCTIVGDPYTAALVRQTIEAAQAAGLAVRLAEFPLDYAESGLPEGADR

SEQ ID NO: 54469 - protein, 144 aa, Zea mays
  Coding DNA Sequence Number=SeqID_12690
MDATGARRRPRNRRWPWNRRRTTTVLHGCARSAREGHNGVSWGALLIEGGERVGAASERRSGAWGEWPGNARRGRVHGGVRGREVREGEEADKWGLRASEGEYANRRSALIERTHQAERGSECARRNLRRQVGPTGQREGESAD

SEQ ID NO: 54470 - protein, 108 aa, Zea mays
  Coding DNA Sequence Number=SeqID_12691
MEESTTHGRDWNSTSPAIYVLRWRLLNLAAVPRPNETLAPYVHDPSSLDWMNEGREGLYPCGHAPPQEATGRELAADFDVTVTVSSRVQVRCEIRVEEGFLDAGTHGQ

SEQ ID NO: 54471 - protein, 107 aa, Zea mays
  Coding DNA Sequence Number=SeqID_12692
MEESTTHGRDWNSTSPAIYVLRWRLLNLAAVPRPNETLAPYVHDPSSLDWMNEGREGLYPCGHAPPQEAAGRELAADFDVTVMVSSRVQVRCEIRVEEGFLDAGTHG

SEQ ID NO: 54472 - protein, 106 aa, Zea mays
  Coding DNA Sequence Number=SeqID_12693
  Subcellular localization annotation: CTP_CleavageSite=74; ConfidenceScore=5.73e-01
MAPAQRAPPRPRALLCPRRRPSRPCSPVRVRLPAPACPARAVTAPARPRARPSVCAAPTCARLVRGACVRPCARAARVMRAVPWHGSPCLRLPLDDPVYPPIFYAR

SEQ ID NO: 54473 - protein, 74 aa, Zea mays
  Coding DNA Sequence Number=SeqID_12694
  Subcellular localization annotation: CTP_CleavageSite=30; ConfidenceScore=5.24e-01
MALRVSPVSHGAAAAPLPPLARRRMARGVVVAMASTINRDYHPVLKSNSTRRRKRDYRPVYIRDYHPVLTLHSF

SEQ ID NO: 54474 - protein, 111 aa, Zea mays
  Coding DNA Sequence Number=SeqID_12695
MASMFRPPLGTEIPIGTGRKDTGCDHGERGKVCYSVMPMPYFRTDGSRGSDSSASRARDIHRQSACRACSEYATVGLGKKLLVGGTQPSVKPEERSRLTEGKVISGQAGMN

SEQ ID NO: 54475 - protein, 61 aa, Zea mays
  Coding DNA Sequence Number=SeqID_12696
MDAIFVVRGGGRLVVKRDRELDPDEEEAAMRFISHGMGFLRYRACKMCLQAVVSVITQLTS

SEQ ID NO: 54476 - protein, 146 aa, Zea mays
  Coding DNA Sequence Number=SeqID_12697
MVHTLQATRMNTTCIPPPQQAPLYTVVVEEDHKEMHHLVGGNGLIVEDSSEEVLDTLTLSLALHATPIAQAPAPRGDDPDDEGDDEGDGEDNQDNNDNNNNEPDRDGGFDGMWPIAEHYTLMFKMGHLPNLLQNVLHKLGIYVYSL

SEQ ID NO: 54477 - protein, 226 aa, Zea mays
  Coding DNA Sequence Number=SeqID_12698
MSVSINICKGIKRFAGRGHKSLDDFSNPNDDDDLMPPPKDKHRITFDDLLRPALTSMKSKDQMIECFDCVFGSVFFALVLNGEVAMLGWLEWRWLGVFIAPTTIPAIAIDGHTGQSGGAPDAALFTVRQHSRPLGEVNRCSIGAPDSPMAHRPVWQAIARKGFHNMLKMSIDELESRSLIKWLMDKLNPNDMTIRPGSSKELKITKEIVRLILGLPSAGGGKPFMD

SEQ ID NO: 54478 - protein, 93 aa, Zea mays
  Coding DNA Sequence Number=SeqID_12699
MNSMVKGAYMDNGTSVHEFARKFSEMLDHIRENVAKELPLGYFEKKSVSRSCLSTSGLHLEDESTLGSRLTTWNKLLGALDELPHDSSSPYQA

SEQ ID NO: 54479 - protein, 41 aa, Zea mays
  Coding DNA Sequence Number=SeqID_12700
MASWCLTALHYLTALAVDLVGPPHVESASSAIVTQLHASTS

SEQ ID NO: 54480 - protein, 204 aa, Zea mays
  Coding DNA Sequence Number=SeqID_12701
  Gene Ontology: Mol. function=motor activity; Cellular component =myosin complex; Biological process=signal transduction
  Homolog annotation: Hit_ID=Q6UAL2; Match level="QueryCoverage=72%, HitCoverage=8%, E-value=1e-43, Identity=72%"; Hit description=Myosin heavy chain class XI E2 protein
  Pfam annotation: Domain name=IQ; Domain location=116-136; Score=22.3; E_value=0.0018; Accession=PF00612.17; Description=IQ calmodulin -binding motif
  Pfam annotation: Domain name=IQ; Domain location=139-159; Score=13.2; E_value=0.97; Accession=PF00612.17; Description=IQ calmodulin-binding motif
  Pfam annotation: Domain name=IQ; Domain location=68-88; Score=17.4; E_ value=0.051; Accession=PF00612.17; Description=IQ calmodulin-binding motif
  Pfam annotation: Domain name=IQ; Domain location=91-111; Score=12.7; E_value=1.4; Accession=PF00612.17; Description=IQ calmodulin-binding motif
  Pfam module annotation: Pfam domain module=IQ::IQ::IQ::IQ; Domain location=116-136::139-159::68-88::91-111
MEPKSNMPDKFIFLPSDFYNWNTIVIRYCAGASLAGDVDGEDLIGKTKVFLRAGQMAELAARRAEILANAARLIQRRIKTHLMRKEFIKLRKASVQSQKFWRARLAKKIFEYMKRDVASIRIQKHVRAHSARKAYLQVYESATAIQTGLRAMAARNEHRFRRETRASIIIQLSRKNIMNSSLNHRLGGANTELMLLTNSNRKLL

SEQ ID NO: 54481 - protein, 558 aa, Zea mays
  Coding DNA Sequence Number=SeqID_12702
  Gene Ontology: Mol. function=RNA binding; Cellular component =cytoplasm; Biological process=mRNA catabolic process, nonsense -mediated decay
  Homolog annotation: Hit_ID=Q6H470; Match level="QueryCoverage=99%, HitCoverage=51%, E-value=0.0, Identity=67%"; Hit description =Putative hUPF2
  Pfam annotation: Domain name=MIF4G; Domain location=84-289; Score =141.8; E_value=1.8e-39; Accession=PF02854.9; Description=MIF4G domain
  Pfam annotation: Domain name=Upf2; Domain location=342-490; Score =30.2; E_value=7e-07; Accession=PF04050.5; Description=Up-frameshift suppressor 2
  Pfam module annotation: Pfam domain module=MIF4G::Upf2; Domain location=84-289::342-490
MAPPALVFSCLKSCLDDFSHHNIDVACNLLETCGRFLYRSPETTIRMANMLEILMRLKNVKNLDPRHSTLVENAYYLCKPPERSARISKVRPPLHQILTNQVLNMFCANYAKLPWAECQQYLLKCFLKVHKGKYSQVHLIALLTASLSRYHDDFAVAVVDEVLEEIRVGLELNDYGMQQRRLAHMRFLGELYSYKHIDSSVVFDTLYLIIVFGHGTPEQDVLDPPEDCFRIRLIITLLQTCGHYFSKGSSKRKLDKFLLHFQRYIISKGPLPLDIEFDIQDLFGELRPNMSRYLSIEELVAALVELEENERSAPVEKVENERHSDNESHKRQARDAGPSVNGGSAANGIEENGKDHEIADSESYSDSGSIDGREDEDILSEDKSNDGSDNEGDDEDDGIPVGSDEDENVEVHQKTRGPQKSESGEETVDEEGGNAGGSSKVRVKVLMKKGHKQQTRQMLIPADSSIVRSTKQQEAAELEEKQSIKRRILEYNEREEEELNGASQMGNWGQGATNTSSIRSGGRGSWDGSARGGGRQRHHIAGSEWFLSQFWSEKMSLS

SEQ ID NO: 54482 - protein, 270 aa, Zea mays
  Coding DNA Sequence Number=SeqID_12703
  Gene Ontology: Mol. function=peptidase activity
  Homolog annotation: Hit_ID=Q6Z5N1; Match level="QueryCoverage=58%, HitCoverage=24%, E-value=2e-29, Identity=53%"; Hit description =Putative potyviral helper component protease-interacting protein 2
MENRGGAKMQIPYLRRGLLDKNQSSEHEDATRASTTLHHGSAYIRDPSASALPFSPASSRPHPIRAAPATLTPLPSSRISPFPRPTPSRISPFPRRVTHADLSIPIARALESDDLPAFVHAVSDARPTDKSPLRRHALRALALVAASHPRDAVAPLVPRILAAALRRVRDQDSSVRAALVDTARAAAAASASASASAALRPLTDALLHEQDQCAQRVAAERTLVGGSRVRDDMDEGGRLPTHPRRPQRRRSFPNPQPPATVSLFRSSGGC

SEQ ID NO: 54483 - protein, 213 aa, Zea mays
  Coding DNA Sequence Number=SeqID_12704
  Gene Ontology: Mol. function=two-component response regulator activity; Cellular component=voltage-gated potassium channel complex; Biological process=two-component signal transduction system (phosphorelay)
  Homolog annotation: Hit_ID=Q6H468; Match level="QueryCoverage=55%, HitCoverage=80%, E-value=9e-45, Identity=80%"; Hit description =Putative response regulator
  Pfam annotation: Domain name=Response_reg; Domain location=75-189; Score=92.8; E_value=1e-24; Accession=PF00072.14; Description =Response regulator receiver domain
MTSRVLSSLRKQDNVSRIHAAPTAVLLHGSRHFSDGHHRPKAGQDGGSSESTGESKLQMASVGGAVAGGVGAPTPHVLAVDDSSVDRAIIAAILRSSRFRVTAVESGKRALELLGTEPNVSMIITDYCMPEMTGYELLKKVKESSKLKQIPVVIMSSENVSTRIRRCLEEGAEDFLVKPVRASDVSRVFSRVLRGSRDGRRGKRKSYRGSRCL

SEQ ID NO: 54484 - protein, 692 aa, Zea mays
  Coding DNA Sequence Number=SeqID_12705
  Gene Ontology: Mol. function=RNA-directed DNA polymerase activity; Cellular component=intracellular; Biological process=RNA-dependent DNA replication
  Homolog annotation: Hit_ID=UPI00004C1733; Match level="QueryCoverage =98%, HitCoverage=49%, E-value=0.0, Identity=88%"; Hit description =UPI00004C1733 related cluster
  Pfam annotation: Domain name=RnaseH; Domain location=312-439; Score =2.3; E_value=3.6e-05; Accession=PF00075.14; Description=RNase H
  Pfam annotation: Domain name=rve; Domain location=545-692; Score =90.8; E_value=4.1e-24; Accession=PF00665.16; Description=Integrase core domain
  Pfam module annotation: Pfam domain module=RnaseH::rve; Domain location=312-439::545-692
MSFGLRNAGATYQRCMNHVFGEHIGRTVEAYVDDIVVKTRKASDLLSDLEVTFRCLKAKGVRLNPEKCVFGVPRGMLLGFIVSERGIEANPEKIAAITNMGPIKDLKGVQRVTRCLAALSRFISRLGERGLPLYRLLRKAECFTWTPEAEEALGNLKALLTNAPILVPPAAGEALLIYVAATTQVVSAAIVVERREEGHALPVQRPVYFISEVLSETKIRYPQIQKLLYTVILTRRKLRHYFESHPVTVVSSFPLGEIIQCREASGRIAKWAVEIMGETISFAPRKAIKSQVLADFVAEWVDTQLSTAPIQSELWTMFFDGSLMKTGAGAGLLFISPLGKHLRYVLRIHFPASNNVAEYEALVNGLCIAIELGVRRLNARGDSQLVIDQVMKNSHCRDPKMEAYCDEVRRLEDKFYGLELNHIARRYNKTADELAKIASGRTMVPLNVFFRDLHQPSVKTDDTPEPEKASAQPEAPSAQPKAPSAQPEAPSAPDAPRALVGNAFRQGFYWPTAVADATRIVRTCEGCQFYAKQTHLPTQALQTILITWSFAVWGLDLVGPLQKAPGGYTHLLVAIDKFSKWIEVRPLNNIRSEQAVAFFTNIIHRFGVPNSIITDNGTQFTGRKFLDFCEDHHIQVDWAAVAHPMTNGQVERANGMILQGLKPRIYNDLNKFGRRWMKELPSVVWSLRTTPS

SEQ ID NO: 54485 - protein, 479 aa, Zea mays
  Coding DNA Sequence Number=SeqID_12706
  Gene Ontology: Mol. function=RNA binding; Cellular component =cytoplasm; Biological process=mRNA catabolic process, nonsense -mediated decay
  Homolog annotation: Hit_ID=Q6H470; Match level="QueryCoverage=98%, HitCoverage=41%, E-value=0.0, Identity=80%"; Hit description =Putative hUPF2
  Pfam annotation: Domain name=MIF4G; Domain location=20-224; Score =21.3; E_value=0.0012; Accession=PF02854.9; Description=MIF4G domain
MGDDELLNDANYLRTLDSSIKRNTTVIKKLKTINDEQKDGLMDELKSVNLSKFVSEAVSYICEAKLRSADIQAAVQVCSLLHQRYKDFSPCLIQGLLKVFFPGKSVDDLDADKNSRAMKKRSTLKLLIELYFVGIVEDASIFVNIIKDLTSAEHLKDREGTQTNLSLLSTFARQGKFFLGLQPHGQEAYDEFFKELNVTAEQKKFFKKALNSYYDTVAELLQSEHVSLRLMEAENAKVLSAKGELSDENTASYEKLRKSFDQLLRGVSSLAESLDMQPPVMPDDGNTTRVTTRTDALPSSGKDSSALEPIWDDEDTKAFYESLPDLRAFVPAVLLGEVEPKSNEQHAKGREQSSESTSEQETELHDDFQTSATEHQLEVKLDGGVKESDDKDKEKGKDGEKEKSKEKDLDKKNDREKEKGRAMDGASLDNILQRLPGCVSRDLIDQLTDFTGTVALLFSFGCDTINLYERCSKYASVYA

SEQ ID NO: 54486 - protein, 140 aa, Zea mays
  Coding DNA Sequence Number=SeqID_12707
MSTIAKENETKSESDEWTHELNEAWAVRIKGHSGTGKTYRMVAPSTSLWAMSASLGSAASSFVPSERASTIIANRGSFLTISGPPLAEKPNQEGMQRHHKPPLVKMNERHHEARWRLGDDLMLEKPQILFVKKTPCDVGI

SEQ ID NO: 54487 - protein, 724 aa, Zea mays
  Coding DNA Sequence Number=SeqID_12708
  Gene Ontology: Mol. function=RNA-directed DNA polymerase activity; Cellular component=mitochondrion; Biological process=RNA-dependent DNA replication
  Homolog annotation: Hit_ID=UPI00004C1731; Match level="QueryCoverage =99%, HitCoverage=60%, E-value=0.0, Identity=76%"; Hit description =UPI00004C1731 related cluster
  Pfam annotation: Domain name=RnaseH; Domain location=289-416; Score =5.2; E_value=1.9e-05; Accession=PF00075.14; Description=RNase H
  Pfam annotation: Domain name=rve; Domain location=488-660; Score =94.6; E_value=2.9e-25; Accession=PF00665.16; Description=Integrase core domain
  Pfam module annotation: Pfam domain module=RnaseH::rve; Domain location=289-416::488-660
MPDIPRDVAEHSLDIRAGARPVRQPLRRFDEEKRRVIGEEIHKLMAAGFIKEVFHPEWLANPVLVRKKGGNGGWYHQIRMKESDQLATSFITPFGMYCYVTMPFGLRNAGATYQRKSECFAWTPEAEEALGNLKALLTKAPILVPPADGEALLVYVAATTQVVSAAIVVERQEEGHALPVQRLVYFVSEVLSETKIRYPQVQKLLYAVILTRRKLRHYFESHPVTVVSSFPLGEIIQCREASGRIAKWAVEIMGETISFAPRKAIKSQVLADFVAEWVDTQLPMAPIQPELWTMFFDGSLMKTGAGAGLLFISPLEKHLHYVLRLHFPASNNVAEYEALVNGLRIAIELGVRRLDARGDSQLVIDQVMKNSHCRDPKMEAYCDEVRRLEDKFYGLELNHIARRYNETTDELAKIASGRTTVPPDVFSRDLHQPSIKIDDTPEPEAPSAQPEAPSARPEAPSVQPEVPSAPEVPSAPEGKALHVEEEQSGATPDRNWQTPYLQYLRRGELPLDQAEARRKAPGGYTHLLVAIDKFSKWIEVRPLNSIRFEQAVAFFTNIIHRFGVPNSIITDNGTQFTGRKFLDFCEDHHIRVDWAAVAHPMSNGQVERANDMILQGLKPRIYNDLNKFGKRWMKELPSVIWSLRTTPSRAMGFTPFFLVYGAEAILPTDLEYGSPRTRAYNDQSNQASREESLDQLEEARDKALLHSARYQQSLRRYHARGVRP

SEQ ID NO: 54488 - protein, 51 aa, Zea mays
  Coding DNA Sequence Number=SeqID_12709
MNGIFGITYEQLQEIPRTFGDEAWSQQYVSSLLLSHTPTGQEQNSCYVVKM

SEQ ID NO: 54489 - protein, 143 aa, Zea mays
  Coding DNA Sequence Number=SeqID_12710
  Gene Ontology: Mol. function=acetyl-CoA C-acyltransferase activity; Cellular component=glyoxysome; Biological process=fatty acid biosynthetic process
  Homolog annotation: Hit_ID=Q08375; Match level="QueryCoverage=92%, HitCoverage=29%, E-value=2e-49, Identity=72%"; Hit description =Acetyl-CoA acyltransferase
  Pfam annotation: Domain name=Thiolase_C; Domain location=35-142; Score=151.6; E_value=2e-42; Accession=PF02803.8; Description =Thiolase, C-terminal domain
  Subcellular localization annotation: CTP_CleavageSite=42; ConfidenceScore=5.25e-01
MAALFAGFPGNSSQVSDGAGAVLLMKRSVALKKGLPILGVFRSFAAVGVDPADMGVGPAVAIPAAVKFAGLEIGDIDLFELNEFVYCCNKLGLDRSKVNVNGGAIALGHPLDATGARCMATLLNEMKRQGIDCRFGVVTMCID

SEQ ID NO: 54490 - protein, 167 aa, Zea mays
  Coding DNA Sequence Number=SeqID_12711
METLSAEDQQEFEKHKEQLIKQARVKFLANFKVDKNHKVETGKNTCDSSATSWQNQTQSLYGMPMDTYPGQPQPPAQIRAPTTKVIVGEGFCRMAHRTVRWATGHCPPLLHWHIGQSGATPDSPVNYGGAAPRIPEDGKFGVGFSGAPDTVRWHTGQSGAPDQGTLR

SEQ ID NO: 54491 - protein, 172 aa, Zea mays
  Coding DNA Sequence Number=SeqID_12712
  Gene Ontology: Mol. function=transferase activity, transferring glycosyl groups; Cellular component=mitochondrion; Biological process=biosynthetic process
  Homolog annotation: Hit_ID=Q6ER83; Match level="QueryCoverage=56%, HitCoverage=11%, E-value=2e-33, Identity=74%"; Hit description =Putative digalactosyldiacylglycerol synthase
  Pfam annotation: Domain name=Ribosomal_S21e; Domain location=107-172; Score=119.4; E_value=1.1e-32; Accession=PF01249.9; Description =Ribosomal protein S21e
MGKFVICAEHPSNEFFMSFLKCLTYKTSEEFVARVKEAMDREPQPLTPEQRYNLSWETATERFMEYLDLEKVLNNEAAQPEQGRKRKNKRTSQPNLSSVFRAHLREIKNEEGKTVDLYVPRKCLATNRIITAKDHASVQINIGHLDANGLYDGDADSLLDRSWQKKKAEIKQ

SEQ ID NO: 54492 - protein, 117 aa, Zea mays
  Coding DNA Sequence Number=SeqID_12713
  Gene Ontology: Biological process=biosynthetic process
  Homolog annotation: Hit_ID=Q2RAB0; Match level="QueryCoverage=52%, HitCoverage=10%, E-value=3e-10, Identity=48%"; Hit description =Digalactosyldiacylglycerol synthase 1, putative, expressed
  Subcellular localization annotation: CTP_CleavageSite=47; ConfidenceScore=5.04e-01
MTEALKSVRNPVTQKKIRVSPSTSSGEVPVVDSASTLIPREAASGIVGSLRNSPDSGRTVHFAIHLTLNIFVGYKVFKNQSISDVMCTTTVDALTMGKFVIYAEHPSNEFLRSLSGT

SEQ ID NO: 54493 - protein, 239 aa, Zea mays
  Coding DNA Sequence Number=SeqID_12714
  Gene Ontology: Mol. function=transferase activity; Biological process= biosynthetic process
  Homolog annotation: Hit_ID=Q69LA5; Match level="QueryCoverage=95%, HitCoverage=53%, E-value=1e-109, Identity=80%"; Hit description =Putative sulfolipid synthase
  Pfam annotation: Domain name=Glycos_transf_1; Domain location=18-181; Score=58.5; E_value=2.2e-14; Accession=PF00534.10; Description =Glycosyl transferases group 1
LTLVPSVAIGRDLQAARVTAANKIRLWNKGVDSESFHPRFRNMEMRSRLTVMDRLPGARIAFIGDGPFRAELEQMFSGMPVVFTGTLQGEELSQAYASGDVFVMPSESETLGFVVLEAMSSGVPVVGARAGGIPDIIPEDQEGRTSFLYTPGDVDDCVGKIKRLLSSEELREAMGRAARKEMEKFDWRAATRKIRNEQYSAAIWFWRKKRAQVLRPLQWVLRLLRRTMPGAADAAAKQS

SEQ ID NO: 54494 - protein, 144 aa, Zea mays
  Coding DNA Sequence Number=SeqID_12715
MRQKYSNFSLCADGGGARAVRPRKESQSQYAAGCLLVLELEQSSAAAPTQGAERRTPGAVDGGAAAEQWSPADGGGRRGGGLWQAAAEQCRRSRSRVRRLAGEVVGGSAVGRLGGLRLCALPVAAWLPAGCGQRTELPEGGRKD

SEQ ID NO: 54495 - protein, 223 aa, Zea mays
  Coding DNA Sequence Number=SeqID_12716
MTVGLGVELDAVMENMVHGLIEGHENTPDKGAAAYGGRVEGKGVSKAGAAGATWQHREGLLDRGAKRWRGRCKDAGEGVNSRMRMVAEQRDQAHGRRDDGAVTEESPRKVLGTQEGPTGEEGDRGRATQGRPTGGRPRKEDATPLVGASWVRRKDPPERWAAGAGHTGEAGRRQATQEMSTGDGGDRSEGSTRTAGSDGADRRRACTTGADPAGQGAGARGRQ

SEQ ID NO: 54496 - protein, 149 aa, Zea mays
  Coding DNA Sequence Number=SeqID_12717
  Subcellular localization annotation: CTP_CleavageSite=42; ConfidenceScore=5.39e-01
MAAPAPSPSPGGDVTSSPGPTSGRGPGSGASALHGSGEGDPSADAASVAARCPIGPPVRADAARHMATMAVGATPGHGVGGRGPWAKAAGTTVPAPVWVRRPHSHAADGASFALEQHRSLEIIKELCPSANNVSAVEAREAIQNPSPFP

SEQ ID NO: 54497 - protein, 276 aa, Zea mays
  Coding DNA Sequence Number=SeqID_12718
  Subcellular localization annotation: CTP_CleavageSite=57; ConfidenceScore=5.86e-01
SEGVHSLTVPPPARASSSPRTNLAARASLRPRRVFLPAHQSRRAPATPRASSSPRTNLAARASLHLRRVFLPAHQSPRAPILRLRLALREWKAPFRDPPRPPPPSSGSPRSNSMKGAIPCPRPSPAIQGCHVPILAPPHFLPPHSLPTRDKRGMRGVGKRGVLPSSVPIQRCGMEPKLSSVGVRDLRRVVFPTPVLVVDLRRVVIPTPVLVVPLDARRDLHRVIIPTPVPIDPCRHPPSCDRIWEQQGTTGVGPATSSSRPYCSQPPSSPSSSQAQ

SEQ ID NO: 54498 - protein, 73 aa, Zea mays
  Coding DNA Sequence Number=SeqID_12719
  Gene Ontology: Mol. function=DNA binding; Cellular component=nucleus; Biological process=regulation of transcription, DNA-dependent
  Homolog annotation: Hit_ID=Q0PJC5; Match level="QueryCoverage=67%, HitCoverage=29%, E-value=3e-18, Identity=84%"; Hit description=MYB transcription factor MYB114
  Pfam annotation: Domain name=Myb_DNA-binding; Domain location=24-65; Score=19.1; E_value=0.016; Accession=PF00249.21; Description=Myb -like DNA-binding domain
MEVNSSGEETVVKVRKPYTITKQRERWTEAEHKRFLEALKLYGRAWQRIEVSLHYCIIDKVQGNVDLKPKSLV

SEQ ID NO: 54499 - protein, 248 aa, Zea mays
  Coding DNA Sequence Number=SeqID_12720
MDPQTPALFRVTLTIILNETPTDAEMVVSQQHHLALCINLNYSRSRLQFRGCWRACSQDFWGRSARNPQEKIVAQISRGARRDRDPHRPQPLSPLLPRPAQRTAYSAPSCGHRSEQQSTSDSKSREPSHSSSSSSTHPACSLPFRSPARSPGNRSTEKLVVVAAAEREAGGHRASEVDEGARRRQTEVASGSISTGLLSAERTAVVICSSWYVMGNFTGLSVFLVRRESLILVPGGLLLPFDWKNWIL

SEQ ID NO: 54500 - protein, 133 aa, Zea mays
  Coding DNA Sequence Number=SeqID_12721
MINRGLIMVITGDISDLGDGAFSMRLAIRDLGAPFSTPATRRKAPLWSALQKRDPNWKTSPTTKLKTMLKMTTMELSGVDVAPPTWRSYGGVPHNAFGRTAITITALWFVQGTTEHNELYMFESSRGVIPYAL

SEQ ID NO: 54501 - protein, 67 aa, Zea mays
  Coding DNA Sequence Number=SeqID_12722
MEEQIDASSRQGSKRDRYIRSEGNLLLNDSKQHVADAPEPDAAGEESWDFESSSTMPRYYRKCSRPC

SEQ ID NO: 54502 - protein, 628 aa, Zea mays
  Coding DNA Sequence Number=SeqID_12723
  Gene Ontology: Mol. function=binding; Cellular component=thylakoid; Biological process=photosynthesis
  Homolog annotation: Hit_ID=Q5ZDK5; Match level="QueryCoverage=97%, HitCoverage=98%, E-value=0.0, Identity=58%"; Hit description =Tetratricopeptide repeat protein 2-like
  Pfam annotation: Domain name=TPR_1; Domain location=203-236; Score =27.6; E_value=4.3e-05; Accession=PF00515.18; Description =Tetratricopeptide repeat
  Pfam annotation: Domain name=TPR_1; Domain location=237-270; Score =21.4; E_value=0.0032; Accession=PF00515.18; Description =Tetratricopeptide repeat
  Pfam annotation: Domain name=TPR_1; Domain location=271-304; Score =6.9; E_value=0.79; Accession=PF00515.18; Description=Tetratricopeptid e repeat
  Pfam annotation: Domain name=TPR_1; Domain location=398-431; Score =18.8; E_value=0.019; Accession=PF00515.18; Description =Tetratricopeptide repeat
  Pfam annotation: Domain name=TPR_1; Domain location=444-477; Score =2.9; E_value=2.4; Accession=PF00515.18; Description=Tetratricopeptide repeat
  Pfam annotation: Domain name=TPR_1; Domain location=478-511; Score =38.0; E_value=3.4e-08; Accession=PF00515.18; Description =Tetratricopeptide repeat
  Pfam annotation: Domain name=TPR_1; Domain location=512-545; Score =11.9; E_value=0.21; Accession=PF00515.18; Description=Tetratricopepti de repeat
  Pfam annotation: Domain name=TPR_2; Domain location=203-236; Score =26.9; E_value=7e-05; Accession=PF07719.7; Description=Tetratricopepti de repeat
  Pfam annotation: Domain name=TPR_2; Domain location=237-270; Score =24.9; E_value=0.00028; Accession=PF07719.7; Description =Tetratricopeptide repeat
  Pfam annotation: Domain name=TPR_2; Domain location=271-304; Score =13.7; E_value=0.69; Accession=PF07719.7; Description=Tetratricopeptid e repeat
  Pfam annotation: Domain name=TPR_2; Domain location=349-382; Score =6.9; E_value=5.2; Accession=PF07719.7; Description=Tetratricopeptide repeat
  Pfam annotation: Domain name=TPR_2; Domain location=398-431; Score =28.4; E_value=2.5e-05; Accession=PF07719.7; Description =Tetratricopeptide repeat
  Pfam annotation: Domain name=TPR_2; Domain location=444-477; Score =8.2; E_value=3.6; Accession=PF07719.7; Description=Tetratricopeptide repeat
  Pfam annotation: Domain name=TPR_2; Domain location=478-511; Score =25.1; E_value=0.00024; Accession=PF07719.7; Description =Tetratricopeptide repeat
  Pfam annotation: Domain name=TPR_2; Domain location=512-545; Score =16.9; E_value=0.076; Accession=PF07719.7; Description=Tetratricopepti de repeat
  Pfam annotation: Domain name=TPR_4; Domain location=237-262; Score =18.9; E_value=0.019; Accession=PF07721.5; Description=Tetratricopepti de repeat
  Pfam annotation: Domain name=TPR_4; Domain location=271-296; Score =4.3; E_value=12; Accession=PF07721.5; Description=Tetratricopeptide repeat
  Pfam annotation: Domain name=TPR_4; Domain location=349-374; Score =6.1; E_value=7.1; Accession=PF07721.5; Description=Tetratricopeptide repeat
  Pfam annotation: Domain name=TPR_4; Domain location=398-423; Score =19.0; E_value=0.017; Accession=PF07721.5; Description=Tetratricopepti de repeat
  Pfam annotation: Domain name=Thioredoxin; Domain location=544-622; Score=-22.8; E_value=0.012; Accession=PF00085.10; Description =Thioredoxin
  Pfam module annotation: Pfam domain module=TPR_1::TPR_1::TPR_1::TPR _1::TPR_1::TPR_1::TPR_1::TPR_2::TPR_2::TPR_2::TPR_2::TPR_2::TPR _2::TPR_2::TPR_2::TPR_4::TPR_4::TPR_4::TPR_4::Thioredoxin; Domain
  Pfam module annotation: Domain location=237-270::271-304::398 -431::444-477::478-511::512-545::203-236::237-270::271-304::349 -382::398-431::444-477::478-511::512-545::237-262::271-296::349 -374::398-423::544-622
MSEADRIRHRTAALVLHDDEVRDKPDAKANVFADLGSPVSPLRARASVATSSSSSSGSAKSPAPSNAGMAGGRSHSGELVGECNPPRLMAHRRSGSGQLIFSGGSSRGSGGGGGDRGSTASSPILNALPSGNICPSGRVPATAAPPPPRSRPDVLGSGTGHYGHGSIMRGAGMAPARSSIDSSSFLGHSSRSPASFPASSGSLQEVTRLGNEWYKKGKYGEALRHYERAVALCPESAACRGNRAAALIGLGRLADALRECEEAVRLDPASGRGHSRVAGICLRLGMIDKARRHFTQAGHLQQSDPTDWQKLQEVEVHLGRCTDARKIGDWKSTLREADAAIAAGADSSQLLLALRSEALLHLHKLEEAESTLASFLKLDSALPSSLTAAELSGMLAESYVHIVRAQIDMALGRFDAAVAAAEKARDLDPGNAEIGMVLNNVRLVAKAREQGNDLFKAAKFSDASMAYGEGLKYDPSNSVLHCNRAACWSKLEKWEKAVDDCNEALRIQPSYTKALLRRAASYAKLERWVDCVRDYEALRKELPSDKEVAEALFHAQISLKATRGEDVSNMKFGGEVNIDSSPMVAKAENVRIVPTFKIYKGGVKVKEMICPSLHVLRYSVRHYSVSSS

SEQ ID NO: 54503 - protein, 118 aa, Zea mays
  Coding DNA Sequence Number=SeqID_12724
MTSANHLQQVGTEARDPSYGYGCDERNLFEQMNKRREQHGGLPPGGEEEAGLLWIEGSMCGLRRRHSGISEAGRVEHRQPDHLYRGIRNHTRYRLILVGVSTQRKAHASAKHHGRVTL

SEQ ID NO: 54504 - protein, 81 aa, Zea mays
  Coding DNA Sequence Number=SeqID_12725
MAEPGQGWEVTVLAFHRELRITYSPPLGALNNIDDPTCSFIVTLNQDLEGRGWGTLGKGHRSMKVNPYGKLSNGEGNGGPR

SEQ ID NO: 54505 - protein, 141 aa, Zea mays
  Coding DNA Sequence Number=SeqID_12726
MPIKKPSYAVQCNARVRVYGHGDGGVVEVVVVKLNSSPVNHAAKETPGGKVANSTKRLRGTNAKEVALSADEQSPNPASPTPSPCMGHQAPATSPPGGPWKCMDYVYRMCTHQDPFNMLNYDDSNWICEYCNVDLYAAEEL

SEQ ID NO: 54506 - protein, 101 aa, Zea mays
  Coding DNA Sequence Number=SeqID_12727
MVQDSKKRKKKVTTRQSKVPKDAPKAKVVAEIEELPPLGVEEAKIREVIALIAQRVMPLESLLESEDEDFRLRFDYNEKENSFKILKKDFIDSRTEVQAMR

SEQ ID NO: 54507 - protein, 307 aa, Zea mays
  Coding DNA Sequence Number=SeqID_12728
  Subcellular localization annotation: CTP_CleavageSite=40; ConfidenceScore=5.27e-01
MASLGVRAAAAARLPSLRPRRDGSRVLTGLRVGTGHYGVRLALSSSTSASPREFKVAGLPVDDSSLGPGDEYEFGLYTPKLLAVTGDDYVSNPRMPDEDEFDHFYRVVAKKTDMLLSCHLPKPLAVSEEEKAVQEKFKEMANECIDLLVDAMRRIPAEKRRPLFSVFGELYPVFESVRWTAEGGCAKWWMALQIMEKLEIVRKMVSSACGGTPLDRGTVFARKVDLTGVDGQALAGHGLGSNLSVEDVHGFMLFTMNIICLHACCFLILGETNTGGDLRAAPQRLQQRQVGHRWHGLCFHSLLAIVT

SEQ ID NO: 54508 - protein, 68 aa, Zea mays
  Coding DNA Sequence Number=SeqID_12729
MAASGQATLAGHKPPCRLAACRLATPGRRDADLPRWPAVGHHAGGPQRAAATPTGHACAGAAPTPGEL

SEQ ID NO: 54509 - protein, 252 aa, Zea mays
  Coding DNA Sequence Number=SeqID_12730
  Subcellular localization annotation: CTP_CleavageSite=44; ConfidenceScore=5.28e-01
MASLVVRAAGAAAAAARLPSLRPRRNGSGVLSGLRVGTGHYGARLALASSTASHKEFKIACLTVDDSSLGPGDEYFGLYTPKLLAVTEDDYESDPRMPGEDEFDHFYRVLAKKTDNLLSCYIPMPLALSEEEKAVQKEFKLIASGCIDLLVGAMRRTPAEKRRPLFLVFGELYPVFEFVRWTAEAGCAKWWMALQIIEKLEIVRKMVSSAFGGAPVDRSMVFARKVDLTGVDGEALAGHGLGSNLSVEDAFL

SEQ ID NO: 54510 - protein, 173 aa, Zea mays
  Coding DNA Sequence Number=SeqID_12731
MTACNLRLWEYSRDNPGDSGQMGDGSRSRLVHKPQYLTTADGLADGATSESELAAADAATEARLEWRRTGKRGCAGLQAVTGWRRVGKRGASGAQGCAGLEARRKVQVCACAVGRSDGLAARREARGWRRAKKLRVCTVGEKRNFRYASDTYPEVSEEYPYLIRYLTPDPSAH

SEQ ID NO: 54511 - protein, 97 aa, Zea mays
  Coding DNA Sequence Number=SeqID_12732
MEPKARNQLLVGAIDLRQDYWQIKSRARPSRSVYEASQIHDFRFGTTRLPWPTPAGTRRRVTPGACVRACAMDICGGLVVVDTLGLVPSGAETVMHA

SEQ ID NO: 54512 - protein, 82 aa, Zea mays
  Coding DNA Sequence Number=SeqID_12733
MGDDDDHNEGLRAGPTASWRLNVRDFHMPERPKEPPFVARVFLRSHVILDYIVNSKIIPPERKRSPWQTNHDDITATNKSGA

SEQ ID NO: 54513 - protein, 127 aa, Zea mays
  Coding DNA Sequence Number=SeqID_12734
MNPRDWQTSSECSLRLAVERTKGNRADHLTFVGVEGRRRLRAKGTSCSQQKQTYKSCTSPTRRPTKKLFVNDVDKKDGGADCAAAKARLISSYKITGIDSSEQISDILRGIEGRVILLWSCLLPHVQ

SEQ ID NO: 54514 - protein, 145 aa, Zea mays
  Coding DNA Sequence Number=SeqID_12735
  Homolog annotation: Hit_ID=Q5N9B7; Match level="QueryCoverage=28%, HitCoverage=13%, E-value=2e-07, Identity=66%"; Hit description =Putative MYB transcription factor
MPRAAAGEAAILGIRDITSIVKVRGRQGRGVAADVVIGEVDGGDVVDAGVALVLDARVEADDVLLCMARNSEPDDLCVSNYMPYEPVKQIIPYLITCIEENKGLLSASSLDMPRARRSWGYYDCPGLIFEVTAIFTSSATDVYNL

SEQ ID NO: 54515 - protein, 69 aa, Zea mays
  Coding DNA Sequence Number=SeqID_12736
MYGSQVVMMMMILVMTMVMMARLRHTARKSDSPFLPSRLTERPLRHPVTGQSSHMEKLHNRLHEEQERR

SEQ ID NO: 54516 - protein, 221 aa, Zea mays
  Coding DNA Sequence Number=SeqID_12737
MTWWCSVEGARRDGELEFDGDGTDYRTEIAQIDDARLDLASTTGELGWARRLEQAATGAAPRHARRESKQGQCAATMEKIRAGLRKLEGEQENPGWGITVCCATMETSKGSRAPQGRSWGLGTWLEEARRAEEAPAPGRKTRMALGAVRAEASQTRGASREQARRATQRKIKLRSTELELRTGARRREGRDAGQEQGGNSGAGSRAQEEQRPSSVSCAQGS

SEQ ID NO: 54517 - protein, 389 aa, Zea mays
  Coding DNA Sequence Number=SeqID_12738
  Homolog annotation: Hit_ID=Q10LG3; Match level="QueryCoverage=19%, HitCoverage=26%, E-value=5e-25, Identity=69%"; Hit description=Zinc finger, C3HC4 type family protein, expressed
  Pfam annotation: Domain name=RRM_1; Domain location=90-162; Score =45.3; E_value=2e-10; Accession=PF00076.12; Description=RNA recognition motif. (a.k.a. RRM, RBD, or
MAIAENKRLQVDKVAYGARKLLHVVAVETQGVVAALHRETLQGTGLDKEQMRQDSVADNCHRQLNKILVVWDQNNIIVRSSCWDLGMVELVLQDVGKSKSIDNKTLYDTFCAFGNILSCKIDRNSLGEPREYGFVQFEMDESAQSAFDKLNGMLLNDKKVTSRPFVRKQDWENVWNSIKFPSSILPGKMSGQWLIGHLLASENGQLLISVLQSLGNPIIGERFWQLYSLTIQLAHLFLDANEEYTYGSFSFIGLDTNTLYEMVCPYCDFGLVAELDDANALMSHFEGTNPDFHHDPRFGIMEAISVVMQHGMAGMNKEVHVTGKPKFFSELEMEFEIKRRDNPPMSLEALLETIICLSVHSFFVMVWDSGGIDVMYRLEGKPIFKKGEC

SEQ ID NO: 54518 - protein, 177 aa, Zea mays
  Coding DNA Sequence Number=SeqID_12739
  Subcellular localization annotation: CTP_CleavageSite=10; ConfidenceScore=5.23e-01
MNRSRATINRAEPKPSFPFSFASAQRPTTRLDLQHHRRNADERTRRRDCPSPTPRLDLRTEPRGPAWRGKLRPSPIWTIVTPGPSNFSSRCFSAMAAATPRGLSSPSLQPLGMSLDYLHRDYTNVIHMSIVNRSTVAPSGGDLAGLLRRRSTAAPPCSSSGWGKLSGVIDLGTDGPD

SEQ ID NO: 54519 - protein, 54 aa, Zea mays
  Coding DNA Sequence Number=SeqID_12740
MARIPSLSPDALPLPHPEVQTAQASGVIAAHYTAQIEMYKSSSYVKTEGIEERE

SEQ ID NO: 54520 - protein, 113 aa, Zea mays
  Coding DNA Sequence Number=SeqID_12741
MVNKTFKKMAMIKWELRKNRTRRRHHIQESAPPINEIIRIEDALKDLDWLTGDSKAFKDGSPPHRWLHKDKADDGDATVDKTELGYQSPKKVLKDILTGDSDSGDDGCHKKLY

SEQ ID NO: 54521 - protein, 379 aa, Zea mays
  Coding DNA Sequence Number=SeqID_12742
  Homolog annotation: Hit_ID=Q1SR88; Match level="QueryCoverage=21%, HitCoverage=18%, E-value=2e-07, Identity=34%"; Hit description=IMP dehydrogenase/GMP reductase
  Pfam annotation: Domain name=DUF674; Domain location=1-374; Score =7.4; E_value=1.8e-20; Accession=PF05056.3; Description=Protein of unknown function (DUF674)
MAKPEGPTIGVKLFVDKEKKKVLFAESDKEFVDVLFSFLTMPLGTIVRLLDKQSQMGCLDQLYKSVEDLNLEYFQTSACKAMLLKPLNAASGHCCRLKINVDGSFPRVVYVCKDTSCSALSDNAFSSFPGTVCKCGKVMEFVGRCPKYDGDTETAAAACSEDGVFVIGCLKFIVTDDLQVAPASTSLMMSFFEKFGVLDPAVLEQQVLQFSSEKIKCLLKRLLTSKQPLTDHYFEALVPQDDASLEALVQNLHPKQENEDQEMPGNQKIRVLQTKDNSALLYDEVGVDFVDSLFGLLSIPLGSAIKLYCQCSAKGCLGNAYRSIDGSVKEFVREECQSLLLDPKVMELQRAVLVLSRNILSSVLLHPKKTKKLHHYRRM

SEQ ID NO: 54522 - protein, 458 aa, Zea mays
  Coding DNA Sequence Number=SeqID_12743
  Homolog annotation: Hit_ID=Q1SR88; Match level="QueryCoverage=18%, HitCoverage=18%, E-value=2e-07, Identity=34%"; Hit description=IMP dehydrogenase/GMP reductase
  Pfam annotation: Domain name=DUF674; Domain location=1-422; Score =105.1; E_value=2e-28; Accession=PF05056.3; Description=Protein of unknown function (DUF674)
MAKPEGPTIGVKLFVDKEKKKVLFAESDKEFVDVLFSFLTMPLGTIVRLLDKQSQMGCLDQLYKSVEDLNLEYFQTSACKAMLLKPLNAASGHCRRLKINVDGSVPRVVYVCKDTSCSALSDNAFSSFPGTVCKCGKVMESIGQCPKYDGDTETAAAAACSEDGVFVKGCLKFIVTHDLQVAPATTSLMMSLFEKFGVLDPAVLEQQVLQFSSEKQPLTDHYFEAPVPQDDASLEALVQNLHPKQESEDQEMPGNLKIRVLQTKDDSALLYAEVGVDFVDSLFSLLSIPLGSAIKLYGQCSAKGCLGNVYRSIDGSVQEFVREECQSLLLDPKLPPFFGCCASKILQCGNMVKSIKLCEANPKQKGGCEKGEVYVSRKANFLVTDDLRVLPLSLASTVKIVSDSKIQTSNLVVKEITLTKSKVMELQRAVLLLSRNILSSVLLHPKKNKKLHHYHRMY

SEQ ID NO: 54523 - protein, 77 aa, Zea mays
  Coding DNA Sequence Number=SeqID_12744
MGVAAREDRRRGRKRIRAAKQLGLHAAVRLASTLDRAAEDDQVEETGLVTGGPLSAGYGKTAKHVVGRARVTFPFHH

SEQ ID NO: 54524 - protein, 321 aa, Zea mays
  Coding DNA Sequence Number=SeqID_12745
  Gene Ontology: Mol. function=protein serine/threonine kinase activity; Cellular component=chloroplast; Biological process=protein amino acid phosphorylation
  Homolog annotation: Hit_ID=Q5VRF2; Match level="QueryCoverage=71%, HitCoverage=56%, E-value=1e-111, Identity=85%"; Hit description =Putative serine/threonine protein kinase
  Pfam annotation: Domain name=Pkinase; Domain location=121-320; Score=- 11.2; E_value=6.8e-08; Accession=PF00069.15; Description=Protein kinase domain
  Pfam annotation: Domain name=Pkinase_Tyr; Domain location=121-301; Score=-29.9; E_value=1.2e-10; Accession=PF07714.7; Description =Protein tyrosine kinase
  Pfam module annotation: Pfam domain module=Pkinase::Pkinase_Tyr; Domain location=121-320::121-301
MVMRSQLHLTVLLAAVMLSYCLKVTPPQMINLDSTIKHNHDTSSQLDRFDPVLKAGNDYAKNFIFSVAVETRYLNASIRELGDHFQTKRDGENGVDASIEKRTPKLLQFTFQELKSATLNFRPGNILGEGGFGYVFNGWIEPNSTAPAKPGTGVTVAVKSLKPDALQGHREWVLHHKHLVKLIGYCIEDDQRLLVYEFMARGSLENHLFRRALPLPWSNRMKIVLGAAKGVAFLHGGPKPVIYRDFKTSNVLLDVEYNAKLSDFSLAKAGPQGDKTHVYTRVVGTYGYAAPEYVMTDAFFLGPSPMGNNGDDQRLGLSRGS

SEQ ID NO: 54525 - protein, 105 aa, Zea mays
  Coding DNA Sequence Number=SeqID_12746
  Subcellular localization annotation: CTP_CleavageSite=21; ConfidenceScore=5.32e-01
MRWPAPWRPRPGPVRLGRTPRALAAFGRTLAACLGRALATPRLRALAARPRPRAPAVPPVVPSRTPSPAASCLARLHGSRALSTCSVLSRVRCSRAAFDPRLNPF

SEQ ID NO: 54526 - protein, 539 aa, Zea mays
  Coding DNA Sequence Number=SeqID_12747
  Gene Ontology: Mol. function=ATP-dependent helicase activity; Cellular component=ribonucleoprotein complex; Biological process =mRNA catabolic process, nonsense-mediated decay
  Homolog annotation: Hit_ID=Q6Z785; Match level="QueryCoverage=97%, HitCoverage=98%, E-value=0.0, Identity=76%"; Hit description =Putative DEAD box
  Pfam annotation: Domain name=DEAD; Domain location=161-333; Score =208.4; E_value=1.7e-59; Accession=PF00270.19; Description=DEADDEAH box helicase
  Pfam annotation: Domain name=Fz; Domain location=152-245; Score= -43.1; E_value=0.048; Accession=PF01392.12; Description=Fz domain
  Pfam annotation: Domain name=Helicase_C; Domain location=403-479; Score=80.9; E_value=4.1e-21; Accession=PF00271.21; Description =Helicase conserved C-terminal domain
  Pfam annotation: Domain name=ResIII; Domain location=157-328; Score= -26.1; E_value=0.0071; Accession=PF04851.6; Description=Type III restriction enzyme, res subunit
  Pfam annotation: Domain name=zf-HIT; Domain location=40-69; Score =34.3; E_value=4.4e-07; Accession=PF04438.6; Description=HIT zinc finger
  Pfam module annotation: Pfam domain module=DEAD::Fz::Helicase _C::ResIII::zf-HIT; Domain location=161-333::152-245::403-479::157 -328::40-69
MEQGENQSADSFVVSSSDNNELEDLPVKERCFEQREALPGEPRCVVCGRYGEYICDQTDDDICSVECKTILLSRIVAKTKPAVKAAKRVNLPLGDESFCIKDINFPNILTLADSRISSLRSKLDICVKGDAVPDPIMCFSACGLPEKLVHNLETAGYCMPTPVQMQVIPASMSNRSLLVSADTGSGKTASFLIPIIAHCSRLRSQECTGNQGPLAIVLAPTRELCLQVEEQAKVLGKGLPFKTALIVGGDPLPQQIYRIENGVELIVGTPGRLIDLLMKHNVDLTYVSVFVLDEVDCLLERGFRDQAMQIFQSLSHPQVMMFSATIHSEVEKMSNSLANNVISISCGNPNRPNKLVKQVVIWVESKKKKQKIFEIMKSKQHFKPPAVVFVSSRVGADLLSEAITVATGLEVVSIHGEKTMIERRENLRRFLTGEVSVVVSTGVLGRGMDLLKVRQVILFDLPNSIDEYIHQVGRASRMGEEGMAVVFVNEEDRRIFKELVQVLKTAGAPIPREIANSRYTAGVYVGSERKRKLSSRSRS

SEQ ID NO: 54527 - protein, 78 aa, Zea mays
  Coding DNA Sequence Number=SeqID_12748
MREKRVYVPDSVRGQDLTEPSYAPVRGDRLTHDIPTVDVLQLPQTSLNANHLQAIPELTPQDKGTLVNSHTQVALKSL

SEQ ID NO: 54528 - protein, 106 aa, Zea mays
  Coding DNA Sequence Number=SeqID_12749
  Homolog annotation: Hit_ID=Q7XCY0; Match level="QueryCoverage=47%, HitCoverage=10%, E-value=1e-11, Identity=62%"; Hit description =Prolyl carboxypeptidase like protein, putative, expressed
MDPATVVVIEESYRSYYCMRNRAYEEALFSAAVCQLQVDRPLKKLTLLAIEGDSCKCSPPEDMKKVRKQIVDHIYPWILECQEKGHAKVPSLGSKWMFRTDTGALK

SEQ ID NO: 54529 - protein, 94 aa, Zea mays
  Coding DNA Sequence Number=SeqID_12750
MDHQDATVLKLLDAMVLMEQRLIAALAGRNGEQADAEKLTNNTDGVSKLPTTDANKHELLKEALDGLAALCAAFLADAVACGSRPDWVIGDSRR

SEQ ID NO: 54530 - protein, 180 aa, Zea mays
  Coding DNA Sequence Number=SeqID_12751
MRSWSPLSARIEVRYRHVAYGRVAQAFGSPVAAQLQRIGSSQPIRLPVTQSRRVAVVPPAASPTLRVYASLQLQPAAATSPLTSRRLAPGGQRPEHRRGPAAPRALPPGLGLLAGWPPFVLRQFASRPHRHDAPAPRVQTSKSSKSRRAAEQGRSGGRGLQTSRQASREAKQTADKQSKQ

SEQ ID NO: 54531 - protein, 251 aa, Zea mays
  Coding DNA Sequence Number=SeqID_12752
MRLARILQFLLIFLCLIVTVADWLGYFNPNIQTRLLAASTHVAVLTCVMMFCSILVGSLEVFFSSESTVLPYSGRRCIFIEWLYGSRSHWPEPEAKEKKKNEAEHVEAKYGLVPSELGVSYFCGHMVDYEEKTRKCTWETFFGKDEVMQTIRSKRLMGQKMQCGSQLVDSYIKYRRQEMRRDWMHRELYRRRDSCKEDNTSRLSELIALGEAGLHGEKEDDKFMSQAADEAEAAYYKQKADESEVEDQLFS

SEQ ID NO: 54532 - protein, 351 aa, Zea mays
  Coding DNA Sequence Number=SeqID_12753
  Homolog annotation: Hit_ID=Q6Z7V1; Match level="QueryCoverage=83%, HitCoverage=40%, E-value=1e-134, Identity=82%"; Hit description =LMBR1 integral membrane protein-like
MAPRSVTLSPWLIEPRKESKNDIKSFRGSKHWYVDVLFPDSKTNQLCQLAYDLFNGCRYAPPISYNFLNLIRLGGNAKTTFEKRMGNIDDAVPFFGRGFNKIYPLIMVVYTLLVASNFFGRVIDFLGSWKRFKLQQEEENIDGLDPSGMIIVQKERSWIEQGCKVGEHVIPLARNFNGVNTDIESQNVPLVGNTVEMKVGAASSRNDGRAGQLKYANSRETIASKYTSIREQNRQSGKAVKKEISSNSVSLLEERSSEQWSNTGIPPTGVSATWASMKIGFQNFKANLGSKKFLPLRQDPGFVLNLSVSSPESLDDIFQRLKRRPANVLVDYLDDDDNNNTRDMDVHFQDQ

SEQ ID NO: 54533 - protein, 206 aa, Zea mays
  Coding DNA Sequence Number=SeqID_12754
  Homolog annotation: Hit_ID=Q3E0G9; Match level="QueryCoverage=70%, HitCoverage=20%, E-value=7e-08, Identity=37%"; Hit description=Ig -like, group 1
MASPPPFDLCGDLDDDDIDKPVTAVPKDRRLPAAAPTPNGLNDHLLRFTRSLQRPTQNHNPSPNLPPPPPPAKSGLGHHSKLHLARPQGSDSALAPEDDELRLTQPQGSDSTSTSDDELRLARPQGSDSALAPEDDELRVARPQGSDSASAPEDDELRLARPRARTQPRLRRMTYSASPEPRARTQPRPRKTDSTSASEEPPLRPT

SEQ ID NO: 54534 - protein, 85 aa, Zea mays
  Coding DNA Sequence Number=SeqID_12755
MAKGYYGFLAVESKADGKDHRLISPEPVFYHRGWEMGGYMIDLYEHLEEEIEVEVEEEIVPQLEASPTQVVPEGCSESAPVIGVE

SEQ ID NO: 54535 - protein, 326 aa, Zea mays
  Coding DNA Sequence Number=SeqID_12756
  Gene Ontology: Mol. function=DNA binding; Cellular component=nucleus
  Homolog annotation: Hit_ID=Q10KX9; Match level="QueryCoverage=34%, HitCoverage=29%, E-value=2e-35, Identity=66%"; Hit description =Expressed protein
MSLSFAAARRRRSAGPEKARAEQRGYPEESPAEEGLHPAARDKPHEAVAGSQLELELQRARQQVTIENYPGEIFINISPTKCWNMVRERLNMEIRRQLNMGRDNLPTLQPTCSVIYIAGYDAAPKSVPPFQMKEILGDYDAIHVRRGDLLKNRKDRFGIERSLHPHLDRDTRPEYIIKRIAQWIPPGRTLFIASNERTPGFFSPLSDSALLVLQSVCRLNPIQVSTSMCAIISRITLCLPKVFDHSFGNNSEYWRSRPHATIENRDNQNMSPQDPPLVALRGLFQRANCDELRALLSLLMSNRILGDNSRQQACQILDEEIAKQWH

SEQ ID NO: 54536 - protein, 171 aa, Zea mays
  Coding DNA Sequence Number=SeqID_12757
MPTRAPANPRPHVEGTENDNSVEKTLTDDEPAMMPATTCRDPAMNLGIKRKFAKTPVFINASVNPQAPACPGTTILSLPISFSLSLYVRRWRHPTVRMPDMRTIRVPRLAIYRAAASARFRYAPAAKQLAGEGDKPVDEGGHWTVVSRGEEIWSIGKNFAALGWGIIQDSA

SEQ ID NO: 54537 - protein, 75 aa, Zea mays
  Coding DNA Sequence Number=SeqID_12758
MLGTIAGSFGLPCACGAPCHALVPGGSQRKNKVKCPRDYNQSFSDYEVELGDADLFDENLEEVVGKCDKKLKAQS

SEQ ID NO: 54538 - protein, 135 aa, Zea mays
  Coding DNA Sequence Number=SeqID_12759
  Subcellular localization annotation: CTP_CleavageSite=24; ConfidenceScore=5.24e-01
MTSRAQCESKVRGGLLGSATKRVSASSKKRSGECGRWPGNARRGRVHGRVRGREVTEGEEADRWGPQASESGLANGQSALTGRTYRAARGSGCAREEPDADKLEPPSSGRERARTRAVADKWDPPVRRSGRAQPD

SEQ ID NO: 54539 - protein, 111 aa, Zea mays
  Coding DNA Sequence Number=SeqID_12760
  Gene Ontology: Cellular component=nucleus
  Homolog annotation: Hit_ID=Q9LEE8; Match level="QueryCoverage=68%, HitCoverage=8%, E-value=3e-15, Identity=60%"; Hit description=OCL3 protein
MVKYRFCSLLQTLALLLRVIKCKSLSLSFYVTLRESNNILMLAAHIHEAMRNPICTCVHNCDNVAMLREVSLGEQHLCMENSRLKEKLDLVCALANKFLGHPISFGSSIFL

SEQ ID NO: 54540 - protein, 41 aa, Zea mays
  Coding DNA Sequence Number=SeqID_12761
MTVCVLPMVMRYLIPWAGLLRSPLSVRVEDGSLAIDLKTGG

SEQ ID NO: 54541 - protein, 106 aa, Zea mays
  Coding DNA Sequence Number=SeqID_12762
MDEYIRADNDFRQRMEEAYRYSKMTRASEKGSTHGMSGRSTIPAQAKTEAITPKGINTASNHLGRNKASSDHQPQEAEEVEALEEDSAHNQEGHYACSVEKIRGNN

SEQ ID NO: 54542 - protein, 305 aa, Zea mays
  Coding DNA Sequence Number=SeqID_12763
  Homolog annotation: Hit_ID=Q6QP51; Match level="QueryCoverage=16%, HitCoverage=22%, E-value=4e-13, Identity=71%"; Hit description =Putative growth-regulating factor 1
MMTASKKVRHVIRFHILFHFLFLSLAIGTRKGDTPKGILLREGSGPRAPLLIRGSKAGPSEGFNSRLRAIGLRAHYWSEVRRLAPRKGSTAASGHSGSAPTTDQGFVGWPPKGSDSRLRARRARDDPGVRLTAAKSGLRRYRKLRLARPQGSAPVSASEDDELRLARAQGSDSALALEDDELRLARPHGSDSASAPEDDELRLARPQGSDSASAPEDDELRLARPQGSDSALAPEDDELRLTRPQGSDSASAPEDDELRLARAQGSDSASASEDGLNLGLGGASASPDLGLRPTTSQEGPSLPYP

SEQ ID NO: 54543 - protein, 281 aa, Zea mays
  Coding DNA Sequence Number=SeqID_12764
  Gene Ontology: Mol. function=pectinesterase activity; Cellular component=cell wall; Biological process=cell wall modification
  Homolog annotation: Hit_ID=Q2QZK1; Match level="QueryCoverage=51%, HitCoverage=29%, E-value=3e-27, Identity=45%"; Hit description =Pectinesterase family protein, expressed
  Pfam annotation: Domain name=Pectinesterase; Domain location=94-270; Score=-218.3; E_value=4.3e-05; Accession=PF01095.10; Description =Pectinesterase
MESRRKNQQKTSYIVISIQLLAALLLLELVSLVPGASCEELPLDFWVSALRGVGAKDVSTADGCTKKNKDTVLCSAQANTVTNFINPTNSEEQGYRTIGESIANIPDDSTKRYILILSGGTVYREKVLVSKSKPFVTIRSDDPINPAIIVWNDTAATLGKDSKPLGVDGSSTMTVESDYFIAYGVVFRNDAAAAAKKKKAEGEAPALRVLGTCRPLLSALSPQPKAILLAISAWSSPTSGVYADDKSQHRGGIPDCGAGNSTPPLQIRGSSWADLVTTGIV

SEQ ID NO: 54544 - protein, 126 aa, Zea mays
  Coding DNA Sequence Number=SeqID_12765
MPTAFPGTRPPRNPDAKRNWEGSELGTCVLTTIPVVTRSAHDDPRIYNGGVEFPAPQSGIPPGFATNRPATPGRTTTAYPNGENVARAGNPRSGAAMFLPTVWIPRPGWEEGSRERAAQGRRNESS

SEQ ID NO: 54545 - protein, 426 aa, Zea mays
  Coding DNA Sequence Number=SeqID_12766
  Gene Ontology: Mol. function=nucleic acid binding; Cellular component= intracellular; Biological process=DNA integration
  Homolog annotation: Hit_ID=Q7XBC6; Match level="QueryCoverage=99%, HitCoverage=24%, E-value=1e-162, Identity=71%"; Hit description =Putative copia-type pol polyprotein
  Pfam annotation: Domain name=zf-CCHC; Domain location=331-348; Score =31.2; E_value=3.7e-06; Accession=PF00098.13; Description=Zinc knuckle
MSGDHAKKEMETGEKPTTSYGSTSSEESRTKRREKKSSSNKGKEKKSSSHHKEKKEKSSSHKPHRKGDKHKRMRKVVYYETDTSSTSTSDSDAPSVTSKRQERKKYRDENYDEDEVAQIEHFNSQATTILLASLSKEEYNKVQGLKNAKEVWDVLKTAHEGDELTKITKRETIEGELGRFRLNKGEEPQHMYNRLKTLVNQVRNLGSKKWDDHEVVNVILRSLIFLNPTQVQLIRGNPRYTKMTPEEVIGHFVSFECMIEGSRKINELGEPSEAQPVAFKATEEKKEESTPSRQPIDASKLDNEEMALVIKSFRQILKQRRGKDYKSHSKKVCYKCGKPGHFIAKCPMSSDSDRGDDKKGRRKEKKRYYKKKGGDAHVCREWDSDESSSDSSDDEDAANIAVTKGLLFPNIGHKCLMAKDGKKKKM

SEQ ID NO: 54546 - protein, 85 aa, Zea mays
  Coding DNA Sequence Number=SeqID_12767
MAAHNTRRSTGTLPWIGNGGAIRMKSGEVFVSIVKGERCFTQLPTTFFSYVRLEVQYVLLFVPSRMIWKFLTNTHGNNLVYKEHI

SEQ ID NO: 54547 - protein, 195 aa, Zea mays
  Coding DNA Sequence Number=SeqID_12768
  Subcellular localization annotation: CTP_CleavageSite=95; ConfidenceScore=5.51e-01
MGLGRKFSPTACASLPLLNFAPLDVIQRTGLNGALFRVLNSGNLGVRRNPSSFLFSSPAARIVSSRQEAWPTAPFSSFLCFCSCTARPCPFPLVMASSSTGPYRQRVRPHVRVRGRRSVADFMGFAEIVSVSGQNPRFRVRETARIESELLQVVAFPDTPTLRRWGLWGLGFWGKRTHPTDTIKMENVHSKDYQF

SEQ ID NO: 54548 - protein, 108 aa, Zea mays
  Coding DNA Sequence Number=SeqID_12769
  Gene Ontology: Mol. function=kinase activity; Cellular component =ornithine carbamoyltransferase complex; Biological process=amino acid metabolic process
  Homolog annotation: Hit_ID=Q6QP54; Match level="QueryCoverage=60%, HitCoverage=36%, E-value=4e-12, Identity=50%"; Hit description =Putative kinase
MALPVDVAGPRPRPGDVGAPPKLGSSLSSVAEAEPEPLGRARRRSFGRGQGGVRALGSGGAEFAVFRISLVIGENEVVIMLVIYKYAYVVFTMFFMVEFYYNNIVIYA

SEQ ID NO: 54549 - protein, 117 aa, Zea mays
  Coding DNA Sequence Number=SeqID_12770
MKAPPPYHECVKKPVWAPKAHLISVRADAAAPPHLECESGKPGTVPAVAAPPASALVIVTDTTMSPHKQQVPPRHRAGELSPPEVPTQALPRASMHTEQPTSPPHGRAHGSRHRHTS

SEQ ID NO: 54550 - protein, 96 aa, Zea mays
  Coding DNA Sequence Number=SeqID_12771
  Gene Ontology: Mol. function=protein phosphatase type 2C activity
  Homolog annotation: Hit_ID=Q2HW33; Match level="QueryCoverage=97%, HitCoverage=26%, E-value=5e-13, Identity=45%"; Hit description =Protein phosphatase 2C-like
MVVINAGDSRVGLGTTSDNGIVTPSSSSSLEAQPATTTAVADIVSVLEQDVYYLPDEPGVHFVWQPNQESSVLVMSCAFDGYYIKDYGVILAPEVI

SEQ ID NO: 54551 - protein, 218 aa, Zea mays
  Coding DNA Sequence Number=SeqID_12772
  Gene Ontology: Mol. function=sequence-specific DNA binding; Cellular component=nucleus; Biological process=regulation of transcription, DNA-dependent
  Homolog annotation: Hit_ID=Q8W0F1; Match level="QueryCoverage=88%, HitCoverage=82%, E-value=3e-38, Identity=53%"; Hit description =WUSCHEL-related homeobox 5
  Pfam annotation: Domain name=Homeobox; Domain location=13-74; Score =58.2; E_value=2.8e-14; Accession=PF00046.19; Description=Homeobox domain
MDTEAPSGRVGVKCGRWNPTPEQVKVLTELFRAGLRTPSTDQIQRISAHLGAFGKVESKNVFYWFQNHKARERHHHKKKKRRRRGAAMASSSSPDSGSGSGSSEEDGRVAAAADADLVLQPSPGRSKSKREARRSYGGGHHRRLVTCKQLAHTHRYVRDVVEQQEEDTWERPTREAVETLELFPLKSYVDLEAEKVRRCTAHTDMKRDDISARIVLIT

SEQ ID NO: 54552 - protein, 465 aa, Zea mays
  Coding DNA Sequence Number=SeqID_12773
  Gene Ontology: Mol. function=cysteine-type peptidase activity; Biological process=proteolysis
MLEVDRVVLPEVCAPVKDTVVCLSIQDEKNDPLASNSQLNMRSYSPEGDGVIKESNRVVTDKENDKSLFLSLDNDQKVHSQAEAEVQDIMVRTSCSISEILAQKITSKEQPSQKSIEVGDECFRPSQDMDYVMMFDSSKDENGPNPERLTAEGDCGDPHERLDLVTVGDIGKMVVDNAIIEDVKSNNTTANNVNHGELHVSLQLPEGNTDNGMTGVSTASSLDIKEGNNDKVVADASAHEGDINDNGSSELKIGNTNSGITGVIAASSDLKEENIDKVVAGDCAHESDINAKDCTELNIGNTDNSIAGDSTVSPEVSAENTDQIIAGDCGNETDLKADGEGADKFLATDSALPCEDDATCMDGANVIVSLDVPRSTKNDTFSKNTSSDAEMPLPVGTCELVDRPSSENDMSEHTSFDGKRPADDRTLEENEMVMPGDEKTEVHYKRRKVLASEKQSSFSGATSTD

SEQ ID NO: 54553 - protein, 190 aa, Zea mays
  Coding DNA Sequence Number=SeqID_12774
  Gene Ontology: Mol. function=cysteine-type peptidase activity; Biological process=proteolysis
  Homolog annotation: Hit_ID=Q2PS26; Match level="QueryCoverage=34%, HitCoverage=11%, E-value=6e-08, Identity=36%"; Hit description=SUMO isopeptidase
MKGSKRPVRRIDENPKMTDTKWLVTTSFPPLHAILFSNLGSEIMEVDLSKQPKPKIPCKDNLQEDGLCTEDFEDVIYPQGDPDAVSISKRDVELLLPETFVNDTIIDFYIKYLSTRIESTKKRRCHFFNSFFFRKLADLDKDQGRAPEDGDAKLSAKLPCILHMDSLKGSHTGLKDIIQSSCKAATHFDS

SEQ ID NO: 54554 - protein, 32 aa, Zea mays
  Coding DNA Sequence Number=SeqID_12775
MARRRAESRTTVVVREELVTEDPGEQQIEVAE

SEQ ID NO: 54555 - protein, 165 aa, Zea mays
  Coding DNA Sequence Number=SeqID_12776
  Gene Ontology: Mol. function=protein phosphatase type 2C activity
MCRSGRQALAQPLLGRGPERLYHVVHHQAGGPHGLCQRQRLPGIASDDSAIIVVQLIVDLKPDLPCGKCLDNVFMQCFIECVRDDSKNHRLTMTTNRLILDVNVGALLNFVEQERHSAITSYIQQIIHSHFTEFGATQSHRRPILEPVKTFILSTNANSKIILEL

SEQ ID NO: 54556 - protein, 144 aa, Zea mays
  Coding DNA Sequence Number=SeqID_12777
  Gene Ontology: Mol. function=cysteine-type peptidase activity; Biological process=proteolysis
  Subcellular localization annotation: CTP_CleavageSite=73; ConfidenceScore=5.41e-01
MTAKPQLLVLSTSTALSLSVARCRSTQPWQKSATTLADSAQNMKYVDHPWTNPKRITIQSSRECFGVDIPRLRPTTEQSNPSHVEGNPSHVERPTVINETVEQMGFGDDDDDFMPPVKKRIVARSHTRVLRNIVTKRIKVEDLP

SEQ ID NO: 54557 - protein, 286 aa, Zea mays
  Coding DNA Sequence Number=SeqID_12778
MAPRAHFPFNLHIIEQGPFNQEARCLTYKLSIAVLPASLQFLSESSLSPSDEDELHGEEDEDVRGQSNPQIRQLSPLQRKSVHLRLGSHQRAGRERTADVHGDMVEAPVLALEDGATFCVGDGPLTSPRRSSPQRRSLAEPLKKAGLSSPHFATQVPSMTTSKNISEDLSPHCHDHDPVVPGVVLLVQDDLGFNVPGEAISTESIDGVRAPEAVPVVPSVEKINNPQVLSSLGRPSLAGLYGPTTAGSPDSILPVSPQRHMSVAGPLEQASANSPQPDGPSAAEAP

SEQ ID NO: 54558 - protein, 50 aa, Zea mays
  Coding DNA Sequence Number=SeqID_12779
MLLQLPSSTFLLLMQAVMQPLQVAGLTGHGTAKRSLRETGRLAVLQSARL

SEQ ID NO: 54559 - protein, 132 aa, Zea mays
  Coding DNA Sequence Number=SeqID_12780
MAAAGDPPLPIDVEAASQGNRSVPYDPSKDPLRKPAKPKDQAWKGLRPTFLPIDTPLQSLTDLATITKDLLQWKCPKAIAEIRQEMSEYLKSNSRKFKCELDLDGDNENSAYETQVDEPDITEGAVMAIIKE

SEQ ID NO: 54560 - protein, 60 aa, Zea mays
  Coding DNA Sequence Number=SeqID_12781
MTFFKDRSDVSKDNILKPALESLSVDEQQQFQDYMKKVQEECNTQIEIRGEFTKELEFEI

SEQ ID NO: 54561 - protein, 350 aa, Zea mays
  Coding DNA Sequence Number=SeqID_12782
MGDRRMDEDEVLRGGHLGGQGGVHGTLLLLGEGRGALALLRGSHDDLDGGDGGNQCGVGGGRRGSPSGVGDEWASGGEAARRLSGEAGWRERSRFHSGGEGAVARRVTREAEPRGEEPGCTRAGRVGSSGCTGRERAERSGGVDHSGCTGRVGSSGCTGRERAERSGGVDHSGCAGRNREAVRSRVGDEGRTSAGGGGGGGGGGCSHGGLQGRDGVDGGVHQAQADWRRGRRAGTQGTDDGEEEGRGRRWGTGDRPVVGSPAARRRGPRLGGRRRGSGAGDLWAPLMERAGLGYKTGVMGVKQAEPRLELKKHRRVSRKKINQSILDEIEDDVDDLDDDYQFDVKQRSRK

SEQ ID NO: 54562 - protein, 475 aa, Zea mays
  Coding DNA Sequence Number=SeqID_12783
  Gene Ontology: Mol. function=oxidoreductase activity; Cellular component=integral to membrane; Biological process=electron transport
  Homolog annotation: Hit_ID=Q6ZD79; Match level="QueryCoverage=96%, HitCoverage=84%, E-value=1e-124, Identity=50%"; Hit description =Putative cytochrome P450 71C4
  Pfam annotation: Domain name=p450; Domain location=1-458; Score =261.0; E_value=2.5e-75; Accession=PF00067.12; Description=Cytochrome P450
MRGLAARHGGEDLMLLRLGTVPTLVASSPRAAQAVLRTHDQSLASRPRSIFGDILGYGPSDVGFAPYGEGWRQAKKLVTTHLLNTKKVQSYRAAREEEVGVVIDKIRRAAMTGAAVDLSEVLSSFTTDMVCRAVAGRSFRVDGLDKVFKDVMDASMAVLGGFNLENFYPGLAKVAGGVLMWPGRRKAERLRDRWDEVLDKVIDQHASEAAAGGPPATRRLESDFTHVLLAAQEEYGLTRDGIKGIMADMFAAGTDTAYLVLEFTMAELMQHQDVMARLQAEVRSSMPAKGHHQGQGAITEEYLAGMPYLKAVVKETLRLHPPSPLLLPHQSLEECAIDGYVVPAGTTVFVNVWAIGRDPRLWDAAEEFMPERFVVDKGATATAAEGVVDFRGTDFQFLPFGSGRRMCPGMNFALANVEIMLANLVCHFDWRVEGGANDIDMTEVFGLTVHRKEKLVLAPRLWSCSCAAAQPPMEG

SEQ ID NO: 54563 - protein, 246 aa, Zea mays
  Coding DNA Sequence Number=SeqID_12784
MTWLSMETEDKSVANATVESIWRLHVVLGRLGDLLTWSTLRSLPHRAGSRSYEEKKTTLCHREPFGPEREPSGQRAGKKSLLPLGRGPSDPESRTVRAATVSITRRPDNPSRIVATVYLAKPNPSLGHDITQSTGASIAQLPFGLPCSLVTRRLPISDCFPGGHTAKAAAGEEASPPRKGESATAVEKTVPPSKKSTVLMIERLSRKVQLALAKVEIVCIQVQHGELASPAVVPVPTKEQQLHYKH

SEQ ID NO: 54564 - protein, 355 aa, Zea mays
  Coding DNA Sequence Number=SeqID_12785
  Gene Ontology: Mol. function=3-oxoacyl-[acyl-carrier-protein] reductase activity; Cellular component=chloroplast; Biological process=fatty acid biosynthetic process
  Homolog annotation: Hit_ID=P28643; Match level="QueryCoverage=79%, HitCoverage=89%, E-value=1e-111, Identity=72%"; Hit description=3 -oxoacyl-[acyl-carrier-protein] reductase, chloroplast precursor
  Pfam annotation: Domain name=Epimerase; Domain location=78-313; Score= -54.2; E_value=0.013; Accession=PF01370.11; Description=NAD dependent epimerasedehydratase family
  Pfam annotation: Domain name=KR; Domain location=76-261; Score=3.0; E_ value=1.6e-07; Accession=PF08659.1; Description=KR domain
  Pfam annotation: Domain name=NAD_binding_4; Domain location=80-343; Score=-105.9; E_value=0.09; Accession=PF07993.2; Description=Male sterility protein
  Pfam annotation: Domain name=adh_short; Domain location=76-244; Score= 162.7; E_value=9.5e-46; Accession=PF00106.15; Description=short chain dehydrogenase
  Pfam module annotation: Pfam domain module=Epimerase::KR::NAD_binding_ 4::adh_short; Domain location=78-313::76-261::80-343::76-244
  Subcellular localization annotation: CTP_CleavageSite=63; ConfidenceScore=5.84e-01
MATAAATAAAAAVSSPAARGAAGAAAASRRGFVTFGGGAARFSPTLRSGRGFSGVQTHVAAVEQAVVKDATKLEAPVVVVTGASRGIGKATALALGKAGCKVLVNYARSSKEAEEVSKEIEASGGEAITFGGDVSKEADVESMMKAALDKWGTIDVLVNNAGITRDTLLMRMKKSQWQDVIDLNLTGVFLCTQAATKVMMKKRKGKIINIASVVGLTGNVGQANYSAAKAGVIGFTKTVAREYASRNINVNAIAPGFIASDMTAELGEELEKKILSTIPLGRYGQPEEVAGLVEFLALNPAASYMTGQVLTIDGGMVITFFEKLRRLDAMAYGVDCDDVTATLAPSSTLQILMPS

SEQ ID NO: 54565 - protein, 600 aa, Zea mays
  Coding DNA Sequence Number=SeqID_12786
  Homolog annotation: Hit_ID=Q7F1F1; Match level="QueryCoverage=52%, HitCoverage=92%, E-value=4e-98, Identity=55%"; Hit description =Putative auxin-induced protein
  Pfam annotation: Domain name=DUF568; Domain location=343-472; Score =135.3; E_value=1.7e-37; Accession=PF04526.4; Description=Protein of unknown function (DUF568)
GKDSNLVGWLEVTCNYGHPPSTNEHARRVGDRIRNAAVTVASVRRGGCPVAIPRRPAGPPKRRASFSGSQSGASHVYGIRIRRRRRHHARQSPAPRPSRGCRPCMSLLLPAGRAPLMLIPGDVRADDGTEFLLHVDDKPASRENDRRDRCEEKRHGFGWHPPHVLGFVYLLLKGYFAVTGTTASISAPTCPPPSAASCPPPLLTEPASTPGPHPHQPLQRPAPKLQLRSVTQTNDTLGLEPTVPPARPRDPAAMSIPRLLLLAVLAAAAACAPAHAAGAGACAAEKFSGNRAFAACADLARLGASLHWSYDAAAASLSVAFLAAPPSAGGWVAWGLNPRAQSMDGTQALVAVPSSGGGGAYEVQTYSISGTSLGAPGPLSAYRTSGLAAEVGGDGRVRVFATLVLPNGTGAEVNHVWQVGPYSGGIQIHDTKGDNMNAKGTLNLLTGATAAASGGGSIIRKKNTHGILNAVSWGLLLPMGAIFARYLKTFRSADPAWFYLHVACQLLGYGVGVSGWATGIHLGNLSKGITYSLHRNIGITVFALGTLQRWKTGYIAAISVLGAVAVALEAVTWGVVLRRRKEESKSYNGTSNGGRLPLSM

SEQ ID NO: 54566 - protein, 156 aa, Zea mays
  Coding DNA Sequence Number=SeqID_12787
  Homolog annotation: Hit_ID=Q10DI5; Match level="QueryCoverage=64%, HitCoverage=26%, E-value=2e-17, Identity=54%"; Hit description =Expressed protein
MRRRRRRWDCRRIGRRALESLCSSLDLVSGIQRSPALAPTPAAAGEGPSASSTEDPVLVRVAAAAAESKLVSYGDATAESKLVSYTYEPYPVTCHTRPSHSRGLIASTAFVRRKLGPLASGDVFCLLLFSAIGRFSHGLPVLDAETFKTADPFIAG

SEQ ID NO: 54567 - protein, 129 aa, Zea mays
  Coding DNA Sequence Number=SeqID_12788
  Gene Ontology: Mol. function=protein binding
  Homolog annotation: Hit_ID=Q84QP7; Match level="QueryCoverage=54%, HitCoverage=25%, E-value=2e-10, Identity=52%"; Hit description =Putative speckle-type POZ protein
MPGGRRAVGAPPRRLCYRLQAGVCVSTLPPPGLISWTKRLVRVFSPKGGGGHFHGWSCFVERSVLQSRYVANDGSFVIVGAVKVVPDDPPCNLGSHLGLLLDSTAGSDVSFVVDGERFAAHRAVLQWWP

SEQ ID NO: 54568 - protein, 58 aa, Zea mays
  Coding DNA Sequence Number=SeqID_12789
MAAAMSMFKCEENREIFLNSQRPRVRLLWLRNEIDRQVLDAIAFSCLIYFIFICIYTT

SEQ ID NO: 54569 - protein, 64 aa, Zea mays
  Coding DNA Sequence Number=SeqID_12790
MRRGAYKQCVDFSPSRRHREDGLLALCCLDRDVGLFKRRHDEPAPAVAVSDSTPTPLKSTVYLA

SEQ ID NO: 54570 - protein, 258 aa, Zea mays
  Coding DNA Sequence Number=SeqID_12791
MDMPPAAQGRRAIAVVDRKLDELCACLDDAMSSRQRSPYAEERLRAEIKSRADFLRSLMAAEVDCHGGTRPEHLAEAEARFAVLEATFDRWARRAVAAPEPVVEEKEEEADSLGSSRSTCSCTESCQEATEGDAMRDAVETRGKEGTSDGIAEDNDAECETVVIRREEAAAVPVAKKRDEAMGTREEVALDAIAKKKGDTDRDAAAETGRRTVDQRRWWRRSAAWCGAAGVVALVAVGLAVELVAVADHDVNAYVVPT

SEQ ID NO: 54571 - protein, 189 aa, Zea mays
  Coding DNA Sequence Number=SeqID_12792
  Gene Ontology: Cellular component=integral to membrane
  Homolog annotation: Hit_ID=Q69IU6; Match level="QueryCoverage=66%, HitCoverage=21%, E-value=1e-42, Identity=71%"; Hit description =Ankyrin-like protein
MRCPRRESSPRWHGARRPCACPDPDCTLPPLDVHALALFISLVVVVVQTSLIMVERRAKKRMVFVMNKLMWLACLFISVAFIALTYVVVGRDDWWLAWCTMGIGAAIMLTTLGSMCYCIIAHRLEEKNTRKIRRASASQSRGSWSRSVDSDEEILNSEYKTKIGCGTTSVFFNQRTEGPSCGTKFKSLD

SEQ ID NO: 54572 - protein, 524 aa, Zea mays
  Coding DNA Sequence Number=SeqID_12793
  Gene Ontology: Mol. function=transporter activity; Cellular component= integral to membrane; Biological process=transport
  Homolog annotation: Hit_ID=Q69IU6; Match level="QueryCoverage=99%, HitCoverage=100%, E-value=0.0, Identity=71%"; Hit description =Ankyrin-like protein
  Pfam annotation: Domain name=Ank; Domain location=118-150; Score =16.2; E_value=0.12; Accession=PF00023.20; Description=Ankyrin repeat
  Pfam annotation: Domain name=Ank; Domain location=152-184; Score =17.1; E_value=0.062; Accession=PF00023.20; Description=Ankyrin repeat
  Pfam annotation: Domain name=Ank; Domain location=186-218; Score =31.4; E_value=3.3e-06; Accession=PF00023.20; Description=Ankyrin repeat
  Pfam annotation: Domain name=Ank; Domain location=220-252; Score =24.1; E_value=0.0005; Accession=PF00023.20; Description=Ankyrin repeat
  Pfam annotation: Domain name=Ank; Domain location=254-287; Score =29.0; E_value=1.6e-05; Accession=PF00023.20; Description=Ankyrin repeat
  Pfam annotation: Domain name=Ank; Domain location=288-320; Score=1.5; E_value=19; Accession=PF00023.20; Description=Ankyrin repeat
  Pfam annotation: Domain name=Ank; Domain location=44-81; Score=14.1; E_value=0.28; Accession=PF00023.20; Description=Ankyrin repeat
  Pfam annotation: Domain name=Ank; Domain location=83-112; Score=21.9; E_value=0.0022; Accession=PF00023.20; Description=Ankyrin repeat
  Pfam module annotation: Pfam domain module=Ank::Ank::Ank::Ank::Ank::An k::Ank::Ank; Domain location=118-150::152-184::186-218::220-252::254 -287::288-320::44-81::83-112
MERQSSIRLGALEKLRSFRGMEKQKSFRGIMSLERRSRDSPGKRGDTPLHLAARAGSVAHVQRILAELDRALAAEMAARQNQDGETPLYVAAEKGHAEVVREILKVCGVQTAGIKASNSFDAFHIAAKQGHLEVLKEMLQALPALAMTTNSVNATALDTAAIQGHVDIVNLLLETDASLARITRNNGKTVLHSAARMGHVEVVRSLLNKDPRIGLRTDKKGQTALHMASKAQNAEIVVELLKPDVSVIHIEDNKGNRPLHVATRKGNIIIVQTLLSVEGIDVNAVNRSGETAFAIAEKMDSVELVNILKEAGGEAAKQQIKKRLEKLHIGGLNNAINSNTVVAVLIATVAFAAIFTVPGNFVEELSQAPPGMSLGQAYVASNPAFIVFLVFDALALFISLAVVVVQTSLIVVERRAKKRMVFVMNKLMWLACLFISVAFIALTYVVVGRDDWWLAWCTMGIGAAIMLTTLGSMCYCIVAHRLEEKNTRKIRRASASQSRGSWSRSVDSDEEILNSEYKTKMYAL

SEQ ID NO: 54573 - protein, 171 aa, Zea mays
  Coding DNA Sequence Number=SeqID_12794
MSLAVDYVILKGLMRDVVSEGYLALLLNENGHLRCIFDGSGSLRSRFLRSHRGNVFSKHKRVITGHYSVIRYNTDEQTINSTHTLAYKWDQAAQGGFTQARRFNNARVATEAFVLREPSLRQSVRPSLFLALAGTCKAFLPHPVLEGKPNAKHHLLLSTKYNGDNLGWGGL

SEQ ID NO: 54574 - protein, 119 aa, Zea mays
  Coding DNA Sequence Number=SeqID_12795
MARLCLMVVQHGRGRWSSSTGGGFGRRGPGDGEALASLKNGCAQLGRAVEGGGEGLASGAHRTATQTRKHTIGQGANKVTPQNRERESERKRRAGRRRQAGPTCQGLEARGCGHALGWA

SEQ ID NO: 54575 - protein, 62 aa, Zea mays
  Coding DNA Sequence Number=SeqID_12796
MAAWITEWAATRAGEWEGIGPAYQIRPDFGSYKSYPLEICKKSVNNYVISEHMHKQKSRHDV

SEQ ID NO: 54576 - protein, 153 aa, Zea mays
  Coding DNA Sequence Number=SeqID_12797
MKMPGPSRLRPDCARLLSAVGHMWPAGRGRRGPSRGWGRPVRLVRLFSIHMDCWGLIRIERYFNLLGIETPSIPFNPYGLRYLQARIRTSVKKYKEYEDEQCSRTVRADLAICFCVALVLVSFFQAEAEALENKSPTLAPTSGELFSTTFGKH

SEQ ID NO: 54577 - protein, 430 aa, Zea mays
  Coding DNA Sequence Number=SeqID_12798
  Gene Ontology: Mol. function=transferase activity, transferring glycosyl groups; Biological process=metabolic process
  Homolog annotation: Hit_ID=Q6Z478; Match level="QueryCoverage=94%, HitCoverage=85%, E-value=3e-99, Identity=49%"; Hit description =Putative flavonol 3-O-glucosyltransferase
  Pfam annotation: Domain name=UDPGT; Domain location=1-430; Score= -84.8; E_value=2.4e-06; Accession=PF00201.9; Description=UDP -glucoronosyl and UDP-glucosyl transferase
MRRAGSRASYARAEEAAAGLDVRFHRLPGVEAPAGCAGPVEFISRVVELHAPHVRAAVAGLACPVAALLLDLFCTPLLDVARDLVAPAVPPPAYVYFTCSAAALSFFLRLPAMCDEVAGEFGDMDGAADIPGLPPVPPLALPTPIMRRELPECKWYAYHGRRFADADGILVNTAAELEPGVLSAIARRGAGCPAAPALYPVGPVVSFAPPTEPPHPCVRWLETQPAASVVLLCFGSRGFFGAAQAREVARGLERSGHRFLWVLRGPPAPGTWSPVDADLAELLPEGFVERTRGRGLVWPAAVPQKEVLAHAAVGGFVTHCGWNSVLESLWFGVPMVPWPLYAEQHLNAFTLVAAMGVAVAMDVDRRRGNFVEAAELERAVRALMGGDNEEGRKAREKAAEMQAGCRKAVEDGGSSTATLTKLSNALCRND

SEQ ID NO: 54578 - protein, 71 aa, Zea mays
  Coding DNA Sequence Number=SeqID_12799
MHNAHERITKLENMCWWIWHLTRKKQEFEHSGDPKGHFQALLALAMDGLEKGKAGTAGSSDGGFGERQGYV

SEQ ID NO: 54579 - protein, 440 aa, Zea mays
  Coding DNA Sequence Number=SeqID_12800
  Gene Ontology: Biological process=regulation of transcription
  Homolog annotation: Hit_ID=Q7XIX9; Match level="QueryCoverage=87%, HitCoverage=88%, E-value=6e-84, Identity=50%"; Hit description =Putative transcription factor PCF6
  Pfam annotation: Domain name=TCP; Domain location=48-268; Score =147.7; E_value=3e-41; Accession=PF03634.4; Description=TCP family transcription factor
MEVEAMGGAGGKRGRAKGAGAGAGAEPEPKRRAMAVAVQPPAAAPWAQQHPASRIYRVSRASGGKDRHSKVYTAKGIRDRRVRLSVATAIQFYDLQDRLGYDQPSKAIEWLIRAAAEAIDKLPSLDAAAGFPAHPASAKDHAPPVGDDDDHHHQQQQQLTRSGCSSTSETSKGSVLSLSRSESRVKARERARERNTVARDKDPAANDTTATTSAQAASFTELLTGMAAASAAPAQHKHQLRQSSVSWQPTIVSATTDYIGFAQPRKGGGHAMAHAFASPAPHLGNIASIAMAPAQHFGLASGAVTVASGGGGEPHAEMTHFSFLQDHFMPVHAAPAPAPASAPAGEYNLDFSMSSGLMGVNTRGALQSNSQPHISGHHHQQQQLQRLSTPLDAPNIPFLYSSAAAAAAAVTTPTTADGQFAAFQLWNGFQHADMKEKGKH

SEQ ID NO: 54580 - protein, 369 aa, Zea mays
  Coding DNA Sequence Number=SeqID_12801
MGEEVAVVLEPPRPKSPPRYPDLCGRRRLQLELQALNREIDFLKGNECPFDAVLCFKEQICDAIQDELQSLEERRRRTDHAVFFGGSDQNCAYACHGSVAPAIACPAAKGHAAWIAPAAHAQICHAASPAANHATNPALGPTAVHVATYHAASQIAHPVVQTAARAAPAVHHAVNQTATPAADQTVARAAIRHAANRTAAASRPSRAANSSAAQTAAPAASRVAPAATPAAVARNAGHAPATASQAVAVSARNVAAARDAARAQAVSVASVVSSPSSAPTCLGAAPASSASSASPRAARGRRPAANASRRAVRVKTAAAAAGGHAALFRSQLALGVRAGALGPAESVQNGVDVPGAAIRAVPLDACVDC

SEQ ID NO: 54581 - protein, 519 aa, Zea mays
  Coding DNA Sequence Number=SeqID_12802
  Gene Ontology: Mol. function=oxidoreductase activity; Cellular component=integral to membrane; Biological process=electron transport
  Homolog annotation: Hit_ID=Q69P73; Match level="QueryCoverage=99%, HitCoverage=98%, E-value=0.0, Identity=85%"; Hit description =Putative elicitor-inducible cytochrome P450
  Pfam annotation: Domain name=p450; Domain location=35-505; Score =361.0; E_value=2e-105; Accession=PF00067.12; Description=Cytochrome P450
MELPPWASFLGIVLATVMLLKALTGRRSRRMYNLPPGPKPWPIIGNLDLVGALPHRSIHELSRKYGPLMQLRFGSFPVVVGSSVDMAKFFLKTHDVVFTDRPKTAAGKYTTYNYRDITWSPYGAYWRQARKMCLTELFSAKRLESYEYIRADEVRALLRDLHAASSSGRAVMLKDYLSTVSLNVITRMVLGKKYLDKEEAAAAGGSVTTPEEFKWMLDELFLLNGVLNIGDSIPWLDWMDLQGYIKRMKKLSKMFDRFLEHVVEEHNQRRLREGKGFVAKDMVDVLLQIADDPTLEVELDRESVKAFTQDLIAGGTESSAVTVEWAISELLKKPEVIAKATEELDRVIGRGRWVTEKDMPSLPYVDAIVKETMRLHPVAPLLVPRLAREDTTVAGYDIPAGTRVLVSVWSIGRDPALWDAPEEFMPERFLGSKLDVKGQDYELLPFGSGRRMCPGYSLGLKVIQVSLANLLHGFAWSLPDGVTKEEFSMEEIFGLSTPRKFPLEAVVEPKLPAHLYAEP

SEQ ID NO: 54582 - protein, 47 aa, Zea mays
  Coding DNA Sequence Number=SeqID_12803
MENISKEHNKDEDEEDNNSQTISDSSGDEELAMYLLIMEQMDNTIAI

SEQ ID NO: 54583 - protein, 299 aa, Zea mays
  Coding DNA Sequence Number=SeqID_12804
  Homolog annotation: Hit_ID=Q5ZE75; Match level="QueryCoverage=12%, HitCoverage=16%, E-value=3e-10, Identity=88%"; Hit description =Putative myosin heavy chain-related
  Subcellular localization annotation: CTP_CleavageSite=42; ConfidenceScore=5.24e-01
MSVRPSPTRLMHAAKSGAVVTLRRCSLTSRSAFFLDQFASVQASTELVNLLLGDHRIECDAREPPPEFVNLLSHANPLTLLCLRPLPASSAHCHPLRPIVYREASIPPSPTHSDPPNTPPSSTRWPHPASLPHRRRGAPSPPEDEHEQQKTLRRSPPSRICPSSPLPLCRLAQPRRYVDLIHHQLEFLLGIALELDAFKYLQIVASYGGCTGANNLDKNELSQSRVYFRGDFEWERITVKSVGIKKEFDADRVFGQEYAQGSLSDNFFAIIVPTEYDCLTASTRKKEIVDVIVKAFKST

SEQ ID NO: 54584 - protein, 168 aa, Zea mays
  Coding DNA Sequence Number=SeqID_12805
  Subcellular localization annotation: CTP_CleavageSite=47; ConfidenceScore=5.10e-01
MACGNILGFGGAKGSLSANKKIKLGSTKEQRANRRHLWSGAPDCPVCVRTVSGAPPDMSGAPEDSNSNSSPSGISRGTRAIIHRTVRCTPDSVRCSKGGRPQELASFGKLQRLIRYNSPDMSGVHRTVRCNSGATAISAPTALCGALNARAARAEVRRAHTGTPDKEQ

SEQ ID NO: 54585 - protein, 73 aa, Zea mays
  Coding DNA Sequence Number=SeqID_12806
MDGIRASTTQLQTVEVRQQMLEAAWWRSTSAHEGATSPCRTAIGKREHAESSEGCSVKAQKYRYSDDGTVAYP

SEQ ID NO: 54586 - protein, 173 aa, Zea mays
  Coding DNA Sequence Number=SeqID_12807
MRALLISISHLDFPRNNLPLPLPPLSPRGALGIGDGDHRNLDPEVSSPLLPFPSPLSPSPSRSLPCAPCPSLARQCPPLPLPCAAALAPAPASPRGGARPRPSLPPRRRPRPQRGPLALAPDAASPAPGAAPAPGTASPALARPRPQARPLPPARSPPARGLGPLRVASQLPV

SEQ ID NO: 54587 - protein, 334 aa, Zea mays
  Coding DNA Sequence Number=SeqID_12808
  Gene Ontology: Mol. function=receptor activity; Cellular component =eukaryotic translation initiation factor 3 complex; Biological process=translation
  Homolog annotation: Hit_ID=Q60EF6; Match level="QueryCoverage=81%, HitCoverage=92%, E-value=1e-138, Identity=80%"; Hit description =Putative TGF-beta receptor interacting protein
  Pfam annotation: Domain name=WD40; Domain location=1-38; Score=6.7; E_ value=6.1; Accession=PF00400.22; Description=WD domain, G-beta repeat
  Pfam annotation: Domain name=WD40; Domain location=136-174; Score =24.7; E_value=0.00032; Accession=PF00400.22; Description=WD domain, G-beta repeat
  Pfam annotation: Domain name=WD40; Domain location=181-219; Score =11.6; E_value=1.6; Accession=PF00400.22; Description=WD domain, G -beta repeat
  Pfam annotation: Domain name=WD40; Domain location=248-285; Score =8.8; E_value=3.4; Accession=PF00400.22; Description=WD domain, G -beta repeat
  Pfam annotation: Domain name=WD40; Domain location=42-80; Score=39.7; E_value=1e-08; Accession=PF00400.22; Description=WD domain, G-beta repeat
  Pfam module annotation: Pfam domain module=WD40::WD40::WD40::WD40::WD4 0; Domain location=1-38::136-174::181-219::248-285::42-80
MRPILMKGHERPLTFLRYNRDGDLLFSCAKDHTPTVWYADNGDRLGTYRGHNGAVWTCDVSRDSARLITGSADQTAKLWEVSTGKELFSFRFDAPARSVEFAIGDALAVVTTDNFMDHVPTVQVKRIAEDIDDQTEESALVITGIKGRINRAVWGPLNRTIITAGEDATIRIWDSETGQLLKESDKESGHQKTISSLSKSLDWSHFITGSLDKSAKVVLGGGQDAMNVTMTDRRAGKFEAKFYHKILQEEIGGVKGHFGPINALAFNPDGRSFIVSTFGHLTLSKGYAHISCFLLYMLNDSAMLSHGNIRYSDPHKDVISISERKICVAMCNFH

SEQ ID NO: 54588 - protein, 766 aa, Zea mays
  Coding DNA Sequence Number=SeqID_12809
  Gene Ontology: Mol. function=nucleoside-triphosphatase activity; Cellular component=integral to membrane; Biological process=vacuolar transport
  Homolog annotation: Hit_ID=Q6ES53; Match level="QueryCoverage=93%, HitCoverage=82%, E-value=1e-136, Identity=77%"; Hit description =Putative white pigment protein
  Pfam annotation: Domain name=ABC2_membrane; Domain location=478-686; Score=137.9; E_value=2.7e-38; Accession=PF01061.14; Description=ABC -2 type transporter
  Pfam annotation: Domain name=ABC_tran; Domain location=52-242; Score =141.1; E_value=3e-39; Accession=PF00005.17; Description=ABC transporter
  Pfam module annotation: Pfam domain module=ABC2_membrane::ABC_tran; Domain location=478-686::52-242
MPTEATELRRRCRLAGTARSGQPGTAWIGPRRVPPTTTTTTPRNARVKALRGPGHTLLGPSGAGKSTFLDALAGRIAKGSLEGSVSIDGRSVTTSYMKQISSYVMQDDQLFPMLTVLETLRFAAEVRLPPSLSRAEKLNRVWELIEQLGLQTTAHTYIGDEGIRGVSGGERRRVSIGTDIIHKPSLLFLDEPTSGLDSTSAYSVVEKVKEIAKGGSIVLMTIHQPSFRIQMLLDRIVILARGRLIYLGTPLTLPTHLAGFGRPVPDGENSIEYLLDVIKEYDESTLGLEPLVAYQRDGSKPDEAAKTPIPKTPRTPYQKSVQFRQIQLKSNQFSVTTGTPHANPMSNFESYNIDDEDEEFDNSLERKSHTPLHTGTSTYHPRLASQFYKDFSVWVYHGVTGTPHRKPTWTPARTPARTPVSSYQQRSRVATPQHAPPPQSPREPVFKPEEPSYHEYQLELEPLDAPEDGPKFANPWFREVVVLSWRTALNVVRTPELFLSREIVLAVMALILSTLFHRLSDANFTTINRLLNFYIFAVCLVFFSSNDAVPTFIQERFIFIRERSHNAYRASSYVVSSLIVYLPFFAIQGFTFAVITKFMLHLQSSLVNFWIILFASLITTNAYVMLVSALVPSYITGYAVVIATTALFFITCGFFLKRTMIPMAWRWLHYISAIKYPFEALLVNEFKGSECYVGTQNQLSPGPLGQVSNLNSTSTTCPLVGQDVLSTMDIAIDNIWIDVAILLAWGVLYRLVFYVVLRFYSKNERK

SEQ ID NO: 54589 - protein, 126 aa, Zea mays
  Coding DNA Sequence Number=SeqID_12810
MDALKFEYPDYERLNKGAKGAKRKRIVSVLSRQAARMLLSPLGSELTKLLLKKDEPSTTKGGMGRKQETAATAEQVMAPVPDKGKKIAEAALEEKKFDLRNLVGQELSESEKKELQEYGISCGYQP

SEQ ID NO: 54590 - protein, 238 aa, Zea mays
  Coding DNA Sequence Number=SeqID_12811
MACYPLAPQNSESAARGDVGAAAHFVEHLASTMGPCAAARKQGGNRVASHGGEDAGSVQAGRGAEVEEKLQGGGAMGRERARPLHGQQRETLGSSTNEVAGRPWRHPAAERHGSAGNEGVVALRSLELGEGGVHGSFCSCAREAREEGTMEEEEPSSLLQSWEEGLPAAERHGEGEEEGDLAGAGVPEGEGAGRALGRGGKLGCLSYAGAMGGVAVVCHEQRRRKLRVRGKRRRESGG

SEQ ID NO: 54591 - protein, 98 aa, Zea mays
  Coding DNA Sequence Number=SeqID_12812
MQLVDDLKNGGLTQWMLANPWGCTVYEMEIGIRIKVWYSLGWLVDGRIPSRRRDPPPAHVDQPTPTTTADDPYLDVIARDPQTSPDPSSEQPRRRVWD

SEQ ID NO: 54592 - protein, 115 aa, Zea mays
  Coding DNA Sequence Number=SeqID_12813
METDVCRYKSDNVGFPKLEAMLSTMSDEDFSDCLAYTHLEEKSFKRLEKDFIDSRTKVQRLKTSNAEQKKRIASLKAEMEEMKEYELEMTKLRQSSAEVVVNLISAQVKMDRHEG

SEQ ID NO: 54593 - protein, 253 aa, Zea mays
  Coding DNA Sequence Number=SeqID_12814
MPATNTRHATAAHSDATTKAVASKELGVFDGHGRAQIGATETKTERRALLGEAKRHGKADGRHAHLVKVETTGGRDGSLGQSRPRLGGLRGQQREFASSHGSWGDPGTRSDELAADPSWGELQQEATGKLGRREAARERERDRAPSREAEVRLSVGDGTPRDGANRERGRASREAPRPRGGREAGRREEEEGRLGAWQTERKRAAAEEEDTREQEACARVGEDKYREKISGQRSAVEKIREKEIRMMMPGNIE

SEQ ID NO: 54594 - protein, 81 aa, Zea mays
  Coding DNA Sequence Number=SeqID_12815
MARRQEEASKCSKKFLSEIWKRGGKELSIEESIKYREKVVIEVKHTESEAKDTAAETEAISARAIKKAEDYEILKTYEPGN

SEQ ID NO: 54595 - protein, 375 aa, Zea mays
  Coding DNA Sequence Number=SeqID_12816
  Gene Ontology: Mol. function=1,3-beta-glucan synthase activity; Cellular component=1,3-beta-glucan synthase complex; Biological process=1,3-beta-glucan biosynthetic process
  Homolog annotation: Hit_ID=Q5VS25; Match level="QueryCoverage=67%, HitCoverage=14%, E-value=1e-120, Identity=83%"; Hit description =Putative beta 1,3 glucan synthase
MGLLASVQGPSQLLNQQEIILNASTFDKCLVIGNQIREVGKGRDVGLNQIALFEGKVAGGNGEQVLSRDVYRLGQLFDFFRMLTFFFTTVGYYVCTMMTVLTVYIFLYGRVYLALSGLDYSISRQARFLGNTALDAALNAQFLVQIGIFTAVPMIMGFILELGLMKLQFCSVFFTFSLGTRTHYFGRTILHGGAKYRATGRGFVVRHIKFAENYRLYSRSHFVKALEVALLLIVYIAYGYTKGGSSSFILITISSWFLVMSWLFAPYIFNPSGFEWQKRGCRALLCEWAVDLMKKLMKLGSLDHTIGHSAILDLADGAGDKRSYVLDIDRLSVEGGDGGDVEPGGRGGFGVTRGDSTLWSRRRHYPPRCAHGPEW

SEQ ID NO: 54596 - protein, 177 aa, Zea mays
  Coding DNA Sequence Number=SeqID_12817
  Gene Ontology: Mol. function=1,3-beta-glucan synthase activity; Cellular component=1,3-beta-glucan synthase complex; Biological process=1,3-beta-glucan biosynthetic process
  Homolog annotation: Hit_ID=Q5VS25; Match level="QueryCoverage=87%, HitCoverage=8%, E-value=5e-60, Identity=74%"; Hit description =Putative beta 1,3 glucan synthase
  Subcellular localization annotation: CTP_CleavageSite=41; ConfidenceScore=5.47e-01
MVSPLSHQSFQKILFCPLPTKVYGFSWIVLFVMVLLFKLFTATPRKSTALPTFVRFLQGVLAIGIIAGIALLIVLTSFTVADLFASALAFIATGWCVLCLAVTWKRVVKVLGLWDSVREIARMYDAGMGAIIFVPIVVFSWFPFVSTFQSRFLFNQAFSRGLEISLILAGNKANQQI

SEQ ID NO: 54597 - protein, 117 aa, Zea mays
  Coding DNA Sequence Number=SeqID_12818
  Subcellular localization annotation: CTP_CleavageSite=72; ConfidenceScore=5.61e-01
MALIAGKSSLSLAPLPFPLSLYKLDSRAPTLPLSSSPKTAVPSLFRAHALLAKISSALPFGPSAPIRVTSCPCFLVAPFSQTVHATVPPWRPPLPLPLSRPPRSPSPSSLRTKTSQR

SEQ ID NO: 54598 - protein, 66 aa, Zea mays
  Coding DNA Sequence Number=SeqID_12819
MVGNSGVLLAREHGTLIDAHDLVIRLNNAPAGDGSLNWVFALCITKSNFAGEVATVGGPPSRWVGV

SEQ ID NO: 54599 - protein, 178 aa, Zea mays
  Coding DNA Sequence Number=SeqID_12820
  Gene Ontology: Mol. function=asparagine synthase (glutamine -hydrolyzing) activity; Cellular component=cytosol; Biological process=amino acid biosynthetic process
  Homolog annotation: Hit_ID=P49094; Match level="QueryCoverage=98%, HitCoverage=31%, E-value=2e-89, Identity=88%"; Hit description =Asparagine synthetase [glutamine-hydrolyzing]
  Pfam annotation: Domain name=GATase_2; Domain location=2-161; Score =100.2; E_value=6.3e-27; Accession=PF00310.11; Description=Glutamine amidotransferases class-II
MCGILAVLGVAEVSLAKRSRIIELSRRLRHRGPDWSGLHCHEDCYLAHQRLAIIDPTSGDQPLYNEDKTVVVTVNGEIYNHEELKAKLKTHEFQTGSDCEVIAHLYEEYGEEFVDMLDGMFSFVLLDTRDKSFIAARDAIGICPLYMGWGLDEMKALSDDCERFITFPPGHLYSSKTG

SEQ ID NO: 54600 - protein, 41 aa, Zea mays
  Coding DNA Sequence Number=SeqID_12821
MAPRRRERAEQAKALSVPIEARNGEGLYDYQRPSTWSTKGG

SEQ ID NO: 54601 - protein, 476 aa, Zea mays
  Coding DNA Sequence Number=SeqID_12822
  Gene Ontology: Mol. function=transporter activity; Cellular component= integral to membrane; Biological process=oligopeptide transport
  Homolog annotation: Hit_ID=Q5Z6P7; Match level="QueryCoverage=99%, HitCoverage=82%, E-value=0.0, Identity=68%"; Hit description =Putative nitrite transporter
  Pfam annotation: Domain name=PTR2; Domain location=1-389; Score =251.1; E_value=2.4e-72; Accession=PF00854.12; Description=POT family
MALLTVSAALPRFRPAPCKPGGAVACQEAAPWQLAVLYVSLLLNAVGAGGYRPCIVAFGADQFDESRAAERARSWGFFNWTTWAGAGASACPAFCMGVSVAAFVAGYPMYRRLEPAGSPFTRLAQVVVAAVKKRRLPAADVDPALLYEDDELDAPISMYGKLVHTDQLSFFDRAAIVTDGDLVTLTDADSGKPSTAPVPDLWRLSTVHRVEELKSVIRMGPIWAAGILVITGSSTQNTFSLQQASTMDRRLAPGLSTFEIPAGSMTVFGLLAMLFTLFVYDRALIRVARRFTGLDRGISFLHRMGVGFAISVLATLVAGFVERHRRDAAAAAGATDAGTSPLSAYWLVPQYALHGVAEAFTSVGHLEFMYDQAPESMRSTATALFWLSISLGSYASTLLVDAVHRWSAGPGGANWLPDNINHGKLDYFYWVVTVLQVMNLVYYAICAKRFTFKPVQLHKKEEEEGGKALVELQEKV

SEQ ID NO: 54602 - protein, 239 aa, Zea mays
  Coding DNA Sequence Number=SeqID_12823
MPASPRRQCALAWLAYGGGTCSLVLLARIGACARCWLAAAGAQLARAHGRVGLGLAAVLRMPMTSSRWRDCWWWVVGQLVLCTRSWGERSSGESHARLREDGGDAYGRHSYPIEGAVLGPLVLHLGVLASDFLGFLAGCSVDVETLKVGAYWVGASVDGKRWQQAAAWQGDIGVVVPAGFSLVLVISIALLGLRRKLFLVGSRRVATAFRRHFSFLKVLPRRPSVCMVVSGMEAFRRST

SEQ ID NO: 54603 - protein, 259 aa, Zea mays
  Coding DNA Sequence Number=SeqID_12824
  Gene Ontology: Mol. function=endonuclease activity
  Homolog annotation: Hit_ID=Q9LS39; Match level="QueryCoverage=43%, HitCoverage=25%, E-value=2e-32, Identity=60%"; Hit description =Genomic DNA, chromosome 3, P1 clone: MYF24
MPVREERGWGGAERGIRMLLENANALAEKWDKIPIVLAVKTYPDISHSLLKYQWTDEEVRNATGYSNVMVAEHPLKLSSSYAMLKGNSNNRGLHGEPLATSYHRKFLGTVDYLWHTHGIECSRVLDTLPISVLKRTRGLPTREIGSDHLPIVAEFAFTESVEDDSDEDDESEQDDESEISPASLHNEFLGIFARVLYGILLFTESSITLSRIKYHIEQNQHFPHRMSTEARAFALVAEHYAMDLDVKLSILVRDQKNHC

SEQ ID NO: 54604 - protein, 125 aa, Zea mays
  Coding DNA Sequence Number=SeqID_12825
MDCFGLQVVDLSMVEGELPSCSDVGTDFLHAGCSDGTAATATAEEIASDTAASVDADAGAAEGIAAAEKKVRRGIPALYANSAAIPGFGRLQCNPETSPDAFPSPSRCADLHEMRGGRFYHRRTR

SEQ ID NO: 54605 - protein, 119 aa, Zea mays
  Coding DNA Sequence Number=SeqID_12826
MNNGRGASTCKVDIAVEHCVERVACAVEQQHRYVWVAGGRWSWRAQWPLPVLVSTRHEWGSPRPGGGRAPRGGEGGGHRRFHGEGLLGARLLPMGLPARALEGAVARDGVCPEQDRAWS

SEQ ID NO: 54606 - protein, 148 aa, Zea mays
  Coding DNA Sequence Number=SeqID_12827
MAQVRAPPSLLAGHWLGTQCLAPALPWHTGPLPSVLDVDPSKVVAFDLIQAPRRSCPHRLSSSSSSIRSPPHSDGRASCLCQAEALTSRTRIGRSDEAARSAVVVSTGGEVCVLSDACYEGLPCIAARLPVRGSMGGGRWVGWLLGFR

SEQ ID NO: 54607 - protein, 159 aa, Zea mays
  Coding DNA Sequence Number=SeqID_12828
  Gene Ontology: Mol. function=kinase activity; Cellular component =ornithine carbamoyltransferase complex; Biological process=amino acid metabolic process
  Homolog annotation: Hit_ID=Q6QP54; Match level="QueryCoverage=53%, HitCoverage=36%, E-value=1e-10, Identity=53%"; Hit description =Putative kinase
MDYGAELCNLDAIAHGAEYRGLKMHLKFLGVQTFSKHHFTGEENNASCTAPTAMPPARVRLTAAKSSLGRHRKLRLARPQGSDSSSTPDDGLRLARPQGSDSTSTPEDGLRLTRPQGSDSTSTPEDGLRLARPQGSDSASTPDDGLRLARPQGSDSAST

SEQ ID NO: 54608 - protein, 583 aa, Zea mays
  Coding DNA Sequence Number=SeqID_12829
  Homolog annotation: Hit_ID=Q1S0I7; Match level="QueryCoverage=50%, HitCoverage=62%, E-value=8e-29, Identity=39%"; Hit description=IQ calmodulin-binding region
MGWAPRWLRGLLGGGRKAAVTKPAKEKKLWGFGKSFREKDPAPAPERPRTPSVQPTATPRRGFAAAPDEADDEQSKRAIAVAAATAAVAEAAVAAAQAAAAVVRLTSSGRCPPPAAAKRGGVGGCSDPGRFPWLPGGYRRSRVVMAVARRALKALRGLVKLQALVRGNIVRRQAAETLRCMHALVRVQARARACRAIRSQHVAAHPDPPTPEKYDQAGAPRHARSGSLKANSSKTPGGERLGRERSESCGRNWLDRWVEERYTDDEKNAKILEVDNGKPGRHGSKRRGGNHHQSPCSTMTSEQNSRSYATMPESPSKDSTTAQQSVPSPSSVGMAAEALSPLRVPADIAELCDSPQFFSATSRPGSSRRGGAFTPAAKSECSRSLFGGYSDCPNYMANTESFRAKARSQSAPKQRPQQQYEKSGSLRRASAHALAAGPAAAQRSVASLHAMKAYPGSGRLDRLGMPIHAALKALAQGMFRKQPASELRNPIGSGGSSSRREQYGSRDQRRRMVPIADTSGLWRIASPIGRAALAGSRGHSTGVHAGYATMRRHGTPRPRAGATNDQPVASTRLSFAGSQRLGA

SEQ ID NO: 54609 - protein, 478 aa, Zea mays
  Coding DNA Sequence Number=SeqID_12830
  Gene Ontology: Mol. function=oxidoreductase activity; Cellular component=integral to membrane; Biological process=electron transport
  Homolog annotation: Hit_ID=Q7XU38; Match level="QueryCoverage=95%, HitCoverage=89%, E-value=0.0, Identity=89%"; Hit description =Cytochrome P450 87A3
  Pfam annotation: Domain name=p450; Domain location=37-474; Score =104.9; E_value=2.4e-28; Accession=PF00067.12; Description=Cytochrome P450
MASMAYIAACTAALAIFVALLLWAYRWSHPKSRGMLPPGSMGIPLLGETMQFFAPNPTYDVSPFVKERVKRYGSIFKTSIVGRQVVVSADPDMNYFVFQQEGKLFESWYPDTFTEIFGRDNVGSLHGFMYKYLKTLVLRLYGQENLKAVLLAETDAACRGSLASWAAQPSVELKEGLSTMIFDLTAKKLIGYEPSKSSESLRKNFVAFIRGLISFPVNIPGTAYHECMEGRKNAMKVLKRMMKERMADPERRCEDFFDHVIQELRREKPLLTKTIALDLMFVLLFASFETTALALSLGVKLLTDNPKVVDALREEHDAIAKNRKDPDAPVTWAEYRSMTFTNQVIMEMVRLANIVPGIFRKALQDVEIKGYTIPAGWGVMVCPPAVHLNPDIYEDPLAFNPWRWQGKPEITGGTKHFMAFGGGLRFCVGTDLSRVLMATFIHSLVTKYSWRTVKGGNIVRTPGLGFPDGFHIQLFPRN

SEQ ID NO: 54610 - protein, 141 aa, Zea mays
  Coding DNA Sequence Number=SeqID_12831
MEPPFSLASSCLIPRKISTPTAIVDLVPPDILTAIVAPSPSMESHNRAIIGRNPLDPTSSAHPQSPQASPLMAYPAPRIHGTAMIAHAPNKACPQSLRWRGQPRNLCRNPTNVLPHPSISQIGTAKAAGEAYLERGQNNGE

SEQ ID NO: 54611 - protein, 137 aa, Zea mays
  Coding DNA Sequence Number=SeqID_12832
MEPKLSSVGVRDLRRVVMPTPVLVVLLDARHDLHRVIIPTPVRTPIASIAVPPARGRCACRSDGGPHGKGAVSETPRVCNCRRWTMKRWIKEMEEVAAMATNSRSAPAPPPPFLPPDSRSLDPDTSFLGSIGEFIDS

SEQ ID NO: 54612 - protein, 78 aa, Zea mays
  Coding DNA Sequence Number=SeqID_12833
MAVRAGLIGSREVRAEQQRDPRARISARGSSAVKWAPQVGVPSHTAGQRDPHPVKGAASWASAVSEVRMGPNVRVMAQ

SEQ ID NO: 54613 - protein, 108 aa, Zea mays
  Coding DNA Sequence Number=SeqID_12834
MTTHLRVEFDAVTENKVHDPIKGREGALEVLAVMKGDMHTVGMHGNRNGGRDQRDGHCQCCGRSCRRRWRSEEGGHRRGMEARGATRAALSREEAAVASWEITSAVGK

SEQ ID NO: 54614 - protein, 174 aa, Zea mays
  Coding DNA Sequence Number=SeqID_12835
LPPFALLVAKDESFAFGSASSVGRPGQPSPSELVDGFDDSTAGGEMRSGKREKCSFRAQSRQSPWIPVRRGGDRHPGSRLSPSLGCRARRRPSSEVEVESEPWGRARRRPPSGVEHESELRGRARRSPSSEVEVEPEPWGRARRRPPSGVEDESELRGRARRSPSSEVEVESEP

SEQ ID NO: 54615 - protein, 285 aa, Zea mays
  Coding DNA Sequence Number=SeqID_12836
  Homolog annotation: Hit_ID=Q67TV0; Match level="QueryCoverage=20%, HitCoverage=5%, E-value=2e-12, Identity=60%"; Hit description=GPI inositol-deacylase PGAP1-like protein
MGVGDLPQQPPRCRWRHHSVISAGVRRLNVSAAGVEAAAATSVEDGVASRCVEGGGAWPSEPCCGARMQARAMAYCRSLGAHSLTSTRRCHGSPAVKSCACWCGGGMGSAWHRYPPIALQPSLGHFFSHVNEEWRKGYKTGVSHAISSKLSNVVVVSVSGGIHDYQQGETLNHLLVNCVFSRIFWYNLLRKFGLHSLAPQPDAVSFMDWWERVSETTNGLVREGLDSVIILGSWMIWKHRNRVIFDGGSPNLPLIMEHADEERRGWEIAGAKGLSLLAVPLHRLL

SEQ ID NO: 54616 - protein, 142 aa, Zea mays
  Coding DNA Sequence Number=SeqID_12837
MGSSLPVQCHNHGEQGSRSLLGGSSLGEGMDLQKRTKCVASENDIALLVMEVVKIEVDIVEAIEGGASPKHQQRHTSIHNQQLLSDNRSKTKRRSDGKGRPCYSNTLTSTHMSIYNTNSVILEVAAVGTDSKTQAETESQPE

SEQ ID NO: 54617 - protein, 451 aa, Zea mays
  Coding DNA Sequence Number=SeqID_12838
  Gene Ontology: Mol. function=sequence-specific DNA binding; Cellular component=nucleus; Biological process=regulation of transcription, DNA-dependent
  Pfam annotation: Domain name=SRF-TF; Domain location=9-62; Score =39.4; E_value=1.3e-08; Accession=PF00319.9; Description=SRF-type transcription factor (DNA-binding and dimerisation domain)
MGRRKVSMGIIPNRRLRISTFGKRKEGLKKKANELAVLCGVEVALVAAPADGDGGAADVWESKEGVLARYRELDPEVRARHTFREYLYAELSKEEAKLARVTQAGPDGLDCWDKALDGVDTVEEAQKLLETIDAAIRDADDRRRALGLPVDDDDDEDGGAGIVLEGIAPLSSAAVEDGYLLDAFGGNGDANDRAMATWGNNGFQEPCSAANMQYGFQQFSSSSNGATVGYDYDLQMVLDMYNNGGPATGAYYYQTRDAGTMQDGYGFPCASTSARYFGMPSAYQMQPVVGSGAAEPILGMSSAGEPCHAMVPVPVEYPSAHTSLNYVDTQATHGVHGSGGTSFAMETRGSFINAPPAFSVATSTGGGGGNFVSAPPAAPSQTMGGTVDDYTRAQPLPMSRGTVDDFTRAQPLRMSYGDDMTIAGTYAMQSGIEEVHYLSDLADSQLNLWGN

SEQ ID NO: 54618 - protein, 48 aa, Zea mays
  Coding DNA Sequence Number=SeqID_12839
MSPAPSSGKRGRVPDPEEDVYVDNLHSHKRYLTEKDIQIICIVCCGYT

SEQ ID NO: 54619 - protein, 66 aa, Zea mays
  Coding DNA Sequence Number=SeqID_12840
MKPSHVDFGKSKIKGHIEVLKRFGYIDNIERVRLGGDELVPSQREDEVVVFRLLRIKPIERLCTYV

SEQ ID NO: 54620 - protein, 112 aa, Zea mays
  Coding DNA Sequence Number=SeqID_12841
MRPGKVLATRAWRQWSGLGRGKKHGPPASVKEGMIATKADLGHRCGVHVGSEEEAGKGGVAWTKVEDDVPTNRSIRKKKLGGEGDKHQGSKHFNTGTKAEHNQDAHARRTNL

SEQ ID NO: 54621 - protein, 656 aa, Zea mays
  Coding DNA Sequence Number=SeqID_12842
  Gene Ontology: Mol. function=oxidoreductase activity; Cellular component=integral to membrane; Biological process=hydrogen peroxide catabolic process
  Homolog annotation: Hit_ID=O48539; Match level="QueryCoverage=92%, HitCoverage=81%, E-value=0.0, Identity=94%"; Hit description=RbohAOsp
  Pfam annotation: Domain name=FAD_binding_8; Domain location=330-446; Score=207.6; E_value=2.8e-59; Accession=PF08022.2; Description=FAD -binding domain
  Pfam annotation: Domain name=Ferric_reduct; Domain location=133-289; Score=171.9; E_value=1.6e-48; Accession=PF01794.9; Description =Ferric reductase like transmembrane component
  Pfam annotation: Domain name=NAD_binding_6; Domain location=452-639; Score=259.8; E_value=5.6e-75; Accession=PF08030.2; Description =Ferric reductase NAD binding domain
  Pfam module annotation: Pfam domain module=FAD_binding_8::Ferric _reduct::NAD_binding_6; Domain location=330-446::133-289::452-639
MVSPQAPPSTPSGREVRDLGVVICGAELDTKICGTELWQLETLLLQKDTYMNYSQALSYTSQALSQNLAGLRKKSPIRKISTTLSYYLEDNWKRLWVLALWIGIMAGLFTWKFMQYRNRYVFNVMGYCVTTAKGAAETLKLNMAIILLPVCRNTITWLRNTRAARALPFDDNINFHKTIAAAIVVGIILHAGNHLVCDFPRLINSSNEKYAPLGQYFGETKPTYFTLVKGVEGITGVIMVICMIIAFTLATRWFRRSLVKLPKPFDKLTGFNAFWYSHHLFIIVYLALIVHGQFLYLIHVWYRKTTWMYLAVPVCLYVGERVLRFFRSGSYSVRLLKVAIYPGNVLTLQMSKPPAFRYKSGQYMFVQCPAVSPFEWHPFSITSAPGDDYLSIHVRQLGDWTRELKRVFAAACEPPVGGKSGLLRADETTKKALPKLLIDGPYGSPAQDYSKYDVLLLVGLGIGATPFISILKDLLNNIIRMEEEEDASTDLYPPVGPNKPHIDLSTLMTVTSRPKRVLRTTNAYFYWVTREQGSFDWFKGVMNEIAELDQRNIIEMHNYLTSVYEEGDARSALITMLQALNHAKNGVDIVSGTKVRTHFARPNWKKVLSKIASKHPFAKIGVFYCGAPVLAQELNKLCHEFNGKSTTKFEFHKEHF

SEQ ID NO: 54622 - protein, 139 aa, Zea mays
  Coding DNA Sequence Number=SeqID_12843
MHNGLEELFSATATHQATPTPTIDLGDDNVVVEGEVTPYGGGAVTASMTSSTSRKWKCTSDVWEDINKIFATENGVETHYHPREEGATLLTNAHWYDGEKILEFLERFYDSTVVMYDARMQHTIEDKSLEESFKDLFLD

SEQ ID NO: 54623 - protein, 376 aa, Zea mays
  Coding DNA Sequence Number=SeqID_12844
  Gene Ontology: Mol. function=oxidoreductase activity; Cellular component=integral to membrane; Biological process=electron transport
  Homolog annotation: Hit_ID=Q9XEG2; Match level="QueryCoverage=85%, HitCoverage=37%, E-value=3e-73, Identity=49%"; Hit description=NADPH oxidase
  Pfam annotation: Domain name=NADPH_Ox; Domain location=213-311; Score= 218.8; E_value=1.2e-62; Accession=PF08414.1; Description=Respiratory burst NADPH oxidase
  Pfam annotation: Domain name=efhand; Domain location=312-340; Score =23.4; E_value=0.00083; Accession=PF00036.22; Description=EF hand
  Pfam module annotation: Pfam domain module=NADPH_Ox::efhand; Domain location=213-311::312-340
  Subcellular localization annotation: CTP_CleavageSite=80; ConfidenceScore=5.54e-01
LPLGRVAGAFPQRFQGHPQNRSIQSSSASPLRALDCSGSRAGKRLLIGSAMRGAAAPGHQRWSGSAGTTPRSLSTGSSPRGSERSSDDGEELVEVTLDLQEDDTIILRSVEPAAAGGATALPLGARGDHAGGASSSSRSLSPSIRRTSSHRLLQFSQELKAEAMSIARQFSQDLTKRFGRTQSRAEGQGQQQQPSSGIESALAARAARRQRAQLDRTRSGAHKALRGLRFISSNKANNAWMEVQANFDRLASEGFLSRSDFAECIGMTESKEFALELFDTLSRRRQVQVDKINKEELREIWQQITDNSFDSRLQIFFDMVDKNADGRIGEEEVKEIIMLSASANKLSRLKEQAEEYAALIMEELDPEGLGYIERQW

SEQ ID NO: 54624 - protein, 246 aa, Zea mays
  Coding DNA Sequence Number=SeqID_12845
  Subcellular localization annotation: CTP_CleavageSite=37; ConfidenceScore=5.12e-01
MSGVPEDSNSNSPPSGISRGTRAIIHRTVRCTPDSVRCAKEKRPQELASFGNLQRLVRYNSPDMSGVHRTVRCNSGATAIRRQRLPAMHLLHGQRAQKSESPILAHRTRNSRCPVCTGHPGRPTSQKLQWLESNGSDDVAGAPDMSDHAKKEMETGEKPTSSHGSTSSEESRTKRREKKKSSSNKGKKKKSSSHHKEKKEKSSSHKPHRSGDKQKRMRKVVYYETDTSSTSTSGSDAPSVTSKRQE

SEQ ID NO: 54625 - protein, 186 aa, Zea mays
  Coding DNA Sequence Number=SeqID_12846
  Homolog annotation: Hit_ID=Q67UT5; Match level="QueryCoverage=28%, HitCoverage=12%, E-value=9e-10, Identity=57%"; Hit description=F-box protein-like protein
MSGGAPDTVRWHTGQSGAPDQRQLNPSVFEVAPISIRYDLCTYSASLWLSRSDVDETFEIDWGFLNAQWTDDMCANLQIVQTIGIAWLPNEFSFMKLILSKADLVSMFYDAFGEFLYLTQRYEDKSSQFEQSSYVVNHLWELCEENDIDSATAQFPRVGKVCNTFCKERYIEHIQKLSEKIYEPIT

SEQ ID NO: 54626 - protein, 139 aa, Zea mays
  Coding DNA Sequence Number=SeqID_12847
MWRDEGTINISGDLPPIRRLISYSQQASEHEEDTINISSEPASCGEHEEGTINISWEPVSYGEMYLILASNDARVTYYFEIVWLISSSQQALEHEEGTISIIDSNLPSMGSDSVDRLINQIQFEVVVAHVRVDVHCRPA

SEQ ID NO: 54627 - protein, 88 aa, Zea mays
  Coding DNA Sequence Number=SeqID_12848
MSCHVDNTMARPCELTKCATFFREIVDLLITNDSTSFCLKSSASPWQLGIGWLRTPYAVPHDVMLVLSDSLNLEMITKVIASGKADHY

SEQ ID NO: 54628 - protein, 574 aa, Zea mays
  Coding DNA Sequence Number=SeqID_12849
  Gene Ontology: Mol. function=transferase activity, transferring glycosyl groups; Cellular component=integral to membrane; Biological process=metabolic process
  Homolog annotation: Hit_ID=Q942C4; Match level="QueryCoverage=75%, HitCoverage=90%, E-value=1e-167, Identity=65%"; Hit description =Putative glucosyltransferase
  Pfam annotation: Domain name=UDPGT; Domain location=11-516; Score= -40.0; E_value=1.3e-08; Accession=PF00201.9; Description=UDP -glucoronosyl and UDP-glucosyl transferase
MDDVVPATAKQTVVLYPGGGAGHVAPMTQLAKVFVRHGYDVTMVLLEPPIKSNASGASFVESFAASNPSITFHLLPPIPPPDLASSTKHPFLVVLELLGQYNDKLESFLRTIPRERLHSLVIDMFCTDAIDVAAKVGVPVYTFFAANAGALAVLTQTVALLDGRQTGLKELGDTPIEFLGVPPIPASHIIREMLEDAEDEVRTAMAKIWKRDTDTRGVLINTFYSLEAQALQAFSDPLCVPGKVLPPVYPIGPLVGKGGSGTDGGEAAERPHECLAWLDAQPERSVVFLCWGSRGLLSEEQLKEIAAGLEKSGQRFLWVVRTPASSDDPKRFWLPRPEPDLDALLPEGFLERTKDRGLVIKSWAPQVDVLSNPAVGAFVTHCGWNSSLEAITAGVPMLCWPQGAEQKINKVLMTEAMGIGLELEGYNTGFIKAEEIETKVARIICLPAVLPSNDLNCPSTPLFSSRRMLPTPARIPWSSAPPIRASEQPIAATTALPTHLLGANSRRTLIARPSPVPATPATAAALPLVHPSAARCRRPLTILYPQRAGRSPPLAPLKGEGPIRTLMLATSTML

SEQ ID NO: 54629 - protein, 336 aa, Zea mays
  Coding DNA Sequence Number=SeqID_12850
MGLGCCGLRPGGGSECCEDFVRKYSMKTDMPRSWDIHGSNVRLNHVFELNGLLYGLYPEEDSAKAGDERRKKRVATRVAEGCSKGKAAVTTARKMKKVEVKARGVTKASGAPGALKGFVEELAETCTEPREKKWKALLPLVDPRREVKVPCPNVKGFAVVVVMPPPAAPAAATRRVLSPVKAGKVTGANSAKIGGSSEASRELFVDDYLIEDVSMFDAHTGLTAGSGGDASEVGGGDDPGEVYGGGFSGPVGVILLLLKGVGRSPMRLQLVLVFGELVDVVTSLLCFERKRPEDKIERLWTQNTEAIRDKSAAENKSRNLLEKVVSLEKENEGLSR

SEQ ID NO: 54630 - protein, 731 aa, Zea mays
  Coding DNA Sequence Number=SeqID_12851
  Homolog annotation: Hit_ID=Q2QYH0; Match level="QueryCoverage=97%, HitCoverage=98%, E-value=1e-171, Identity=53%"; Hit description =Expressed protein
  Pfam annotation: Domain name=DUF936; Domain location=1-724; Score =286.3; E_value=6e-83; Accession=PF06075.3; Description=Plant protein of unknown function (DUF936)
MATVTQGVLLRLLQAMHTEERVAGEHRSPVLQVTGVVPALTASTSDAPLLAAPPSNGVLLNLSDGLHSTYVQVPPADADALLAAARPHLVGHLVHLDRLRLARPVPRALGLRTVPSSRSLPCAGAPQPLVVRPAACARGYVIQPAASAADAAPPLMPSCPTSSSDDNDAKRTVLGPKNAVADPAPPPQQPVKRRFSSPAPPSKQRDPSPAAKPAVSRASSPSVGKSASRPSSPALRSTPRATSPAPSKCVVPSLVAAREENRRAAREPAIIVPSRYRQPSPAGGRRGAASPAVAGGRRASLSPSSRRLSGEGTGKKKVGVLVAGISKMTDLGSGSAAKPGRKSWDDPTRTVAATSVMKSKAKVDKDTILRTQEAMSRRLSDATTEQSSNDDSSVDEKPKQPRKKIDAPTSVKAKTAAPKITLHDPKWTDGSIPLDALPDKLSKIGKEAFERRDSAATAAASALQEALISESVIRNISKFSEICASARVSNPFPTVDLFLVVCEDALKWKTIAAESVVTNGAEEEELLEKKSTWHWVGAALATDLEVLKLLNGATGPFSRTRSSGTTNKPNASSVEPPRTASMSSKKQAHGASAKAQSKAAAVSPSSPPRCSTWNMGETAELAKALWREMRAWFLTFVDEALDVGFHLFEDQQNVAGKGRQHGGGHITMVLSQFKKISDWLDQVGKIAAAEEEEQRTKEKIELLKRKIYGFVISHMGSALESPASVSVSSRS

SEQ ID NO: 54631 - protein, 263 aa, Zea mays
  Coding DNA Sequence Number=SeqID_12852
  Gene Ontology: Mol. function=translation initiation factor activity
  Homolog annotation: Hit_ID=Q2QYG5; Match level="QueryCoverage=91%, HitCoverage=99%, E-value=1e-64, Identity=57%"; Hit description =Expressed protein
  Pfam annotation: Domain name=DUF567; Domain location=31-244; Score =85.5; E_value=1.6e-22; Accession=PF04525.3; Description=Protein of unknown function (DUF567)
  Subcellular localization annotation: CTP_CleavageSite=51; ConfidenceScore=5.59e-01
MHPVPPRSSTTSSIAASATRVHPSDAVGGRATAASSGLQGQAPAVYTVWKRSSMGFQGTDGFSVYDATGSLAFRVDNYSRRRKLFAGELLLMDGRGAPLLALRPQILSMRDQWNCYRATSEEPSGDNDQSFRRRRRQQQLFFSMRQCSLVRGTDEVEVHMAAASGTSAAQQQVPSFTVQGSFWRRSCKIRRGGDGDGDGEEVARISRKKAAGAAPAPVTLGEDVFSLTVVPGADCAMVMAFVVVMDRICQRPYRPLMCSASSS

SEQ ID NO: 54632 - protein, 270 aa, Zea mays
  Coding DNA Sequence Number=SeqID_12853
  Gene Ontology: Mol. function=translation initiation factor activity
  Homolog annotation: Hit_ID=Q84YE1; Match level="QueryCoverage=79%, HitCoverage=91%, E-value=1e-36, Identity=53%"; Hit description =Hypothetical protein 15B
  Pfam annotation: Domain name=DUF567; Domain location=23-186; Score =94.9; E_value=2.4e-25; Accession=PF04525.3; Description=Protein of unknown function (DUF567)
MAKVHPNAAGSVVATAAAVGRAPAEADGEPSTVLTVWRKSLLFNCDGFTVYDASGDLAFRVDCYAGSTRRWRRAGVVLMDASGKPLLTVRRKTRLGLAERWVIYDADADDGTTTTARATPLLSVRRRIGACCKTLALAHSAAAGTDDAAAAAALSYVVEGSYGRRACAVREERGGAVVAEVQRKEARRRRRVPPRRGGVTSRRAAFHGARHRPRRHVPRRGRRRRLVDDAVVATQEEFVHGYIEWLYRIGEFCKHGTVYQTFGTTVGRGN

SEQ ID NO: 54633 - protein, 236 aa, Zea mays
  Coding DNA Sequence Number=SeqID_12854
  Subcellular localization annotation: CTP_CleavageSite=37; ConfidenceScore=5.35e-01
MDHISCGKLSLAPSYHFARFGHLLSCPRSVTSLAAVPMFAKFSSSGGELADVVIRQLEELAKSEAAVVAASYAELLEPGDGEELPPWVSPDLDNGPAADFEALDADVDAAWHDAATIAFAAVPSHEEQEAWIATGCDVDARWAEVEEMREQAAPAPDEPCLSSFVDTSEIFPASVTLSGGGGDVDNSGDNYKPDEETAPRPQLLATRALVPVTEKGGEREGEWNTGDDRRRRRQGM

SEQ ID NO: 54634 - protein, 42 aa, Zea mays
  Coding DNA Sequence Number=SeqID_12855
MTMIPLAGFTALSAAGLLLIFSSFLLQTQEVAIAAVVRFREL

SEQ ID NO: 54635 - protein, 412 aa, Zea mays
  Coding DNA Sequence Number=SeqID_12856
  Gene Ontology: Mol. function=protein serine/threonine kinase activity; Cellular component=membrane; Biological process=protein amino acid phosphorylation
  Homolog annotation: Hit_ID=Q2RB87; Match level="QueryCoverage=99%, HitCoverage=100%, E-value=1e-160, Identity=70%"; Hit description =Serine/threonine-protein kinase NAK, putative, expressed
  Pfam annotation: Domain name=Pkinase; Domain location=81-360; Score =62.8; E_value=1.1e-15; Accession=PF00069.15; Description=Protein kinase domain
  Pfam annotation: Domain name=Pkinase_Tyr; Domain location=81-360; Score=58.0; E_value=5e-16; Accession=PF07714.7; Description=Protein tyrosine kinase
  Pfam module annotation: Pfam domain module=Pkinase::Pkinase_Tyr; Domain location=81-360::81-360
MGNCGTREENAVVAAHAQVQQLHLLQQPSKNANADRKHTCMSSDISDPSTPRKVEDAKNISIYNDVIAFTLFELETITKSFRVDYVLGEGGFGTVYKGYIDENVRVGLKSLPVAVKVLNKDGHQGHREWLCFVDHDMGNRQADKTEVNCLGQLRHPNLVKLIGYCCEDDHRLLVYEFMFRGSLENHLFRSKPSAPVMLFVRLLLTTFEEKGKITGMLSDASMYDYTAKLSDFGLAKDGPEGDQTHVSTRVMGTYGYAAPEYVMTGHLTARSDVYSFGVVLLELLTGRKSIDKSRPSREQSLVDWALPKLNDKRRLLQIIDPRLEGQYSARAAHKSCSLAFYCLSQNPKARPLMSDVVETLAPLQQGGGGGSDASSGLPDCRGRRRLTGNSVVHFRAIPNPKCTPVVPACRVR

SEQ ID NO: 54636 - protein, 523 aa, Zea mays
  Coding DNA Sequence Number=SeqID_12857
  Gene Ontology: Mol. function=thymidine kinase activity; Cellular component=intracellular; Biological process=protein amino acid phosphorylation
  Homolog annotation: Hit_ID=Q337S8; Match level="QueryCoverage=89%, HitCoverage=61%, E-value=2e-62, Identity=32%"; Hit description =Pentatricopeptide, putative
  Pfam annotation: Domain name=PPR; Domain location=100-134; Score =16.6; E_value=0.08; Accession=PF01535.11; Description=PPR repeat
  Pfam annotation: Domain name=PPR; Domain location=336-370; Score =44.9; E_value=2.8e-10; Accession=PF01535.11; Description=PPR repeat
  Pfam annotation: Domain name=PPR; Domain location=372-406; Score =11.5; E_value=0.33; Accession=PF01535.11; Description=PPR repeat
  Pfam annotation: Domain name=PPR; Domain location=475-509; Score=9.3; E_value=0.59; Accession=PF01535.11; Description=PPR repeat
  Pfam annotation: Domain name=TPR_4; Domain location=304-329; Score =2.9; E_value=17; Accession=PF07721.5; Description=Tetratricopeptide repeat
  Pfam annotation: Domain name=TPR_4; Domain location=99-124; Score =15.2; E_value=0.24; Accession=PF07721.5; Description=Tetratricopeptid e repeat
  Pfam module annotation: Pfam domain module=PPR::PPR::PPR::PPR::TPR _4::TPR_4; Domain location=100-134::336-370::372-406::475-509::304 -329::99-124
MQSPEIQQRNRAPTHSRAGSLAPRVPRHLRTAAALAAAVQGLIDASPARGESQTIHAQLLASGLVGSADLSVKLLVLHIRCGSLHNARAVFDGMPSRSRAAHNYLIAGYFRRGRPAEALGILRRLAASTGRLDVFALSMALKLSAALALPGVVAREAHARALRSVEQSDDILFAALVDAYVKSGLLGLRAAGARRNARAGASCAPRHCSSGACRKWLFEDVDSIFNEMEGKDAVAYNAIVEGYSKTEETEEGSLPPTEEHAASGASSLNIDIRERARGLLTQTSPELGEQVHCQGTKSGLVLDIKVGSALVDMYAKCGRVEDGRRIFNQMAERNVITWTSMIDGYGKNGLSDEALQLFGEMRERRDVRPNHATFLSILSACAHAGLLSQGQEAFQSMESEYLLQPRMEHYACMVDLLGRFGGVRQAYDFVRGMPVRPNSDVWAALLGAATLHGDMDICKVASREVFELSRKGRPGAYMAFSNTLAAAGEWDGVHDVREMMKQRGVLKDTACSWVGSENPPLVD

SEQ ID NO: 54637 - protein, 638 aa, Zea mays
  Coding DNA Sequence Number=SeqID_12858
  Homolog annotation: Hit_ID=Q9LIQ0; Match level="QueryCoverage=71%, HitCoverage=74%, E-value=2e-44, Identity=28%"; Hit description =Arabidopsis thaliana genomic DNA, chromosome 3, BAC clone:F14O13
  Pfam annotation: Domain name=Krr1; Domain location=389-570; Score =159.4; E_value=9.1e-45; Accession=PF05178.3; Description=Krr1 family
MGRRKKSKEMEKKPLDILSGSDEDFDSGENLSKIQINEEYARRFEHNKRREALQRLEERRKQGLVPASDDDESESESSSEEEDEAAAIASRLVDRRMFEVIRRIRSGDPRILDKDAKVYSSEEEGGEEGEDAKKQEESKQEKEKTKKEKPLYLKDVNARHLLEEGPEFAAQPSRSSSKFERIAYDEQQKKGLEAFLEAQKEALGDGGDDDGDLFQVKEKARAGADDEAEEDEEEKQTKDLAGEVFGKDEELDENEKFLKEFFLKRPYLETEKSKSYLDNIQELSDEEELEIQEEYEHAYNYRHEEAMASGAVVADRVLGHSRVVEGSVRKKESSRKQQRKSKEERMARVKQEQAEELKHLKNLKKKEIAEKLERIRMIAGIEGDAACKLGADDLEEDFDPEDYDKKMQEMFDDSYYEADEVDPEFGSGEEMDLEKPDFGKEDELLGLPKGWASDHSKEESTATDAKGEKGKISLKDKVELEKEMEEYYKLDYEDTIGDIKTRFKYKQVKPNSFGLSTYDILASDDKDLNQYVSVKKLAPYREDEWKVTHHKKQSKDLILGGQKKEGKKDKSGKKSRSEEDPSSSKTENDRMTNGQESTDAKKKSTRSERRKRRKSELRPSSDRLEAYGKINSKRHKSH

SEQ ID NO: 54638 - protein, 560 aa, Zea mays
  Coding DNA Sequence Number=SeqID_12859
  Gene Ontology: Mol. function=acyltransferase activity; Cellular component=integral to membrane; Biological process=metabolic process
  Homolog annotation: Hit_ID=Q5Z801; Match level="QueryCoverage=89%, HitCoverage=90%, E-value=0.0, Identity=77%"; Hit description =Putative JD1
  Pfam annotation: Domain name=Acyltransferase; Domain location=168 -295; Score=32.6; E_value=1.4e-06; Accession=PF01553.11; Description =Acyltransferase
  Pfam annotation: Domain name=efhand; Domain location=439-467; Score =2.7; E_value=7.6; Accession=PF00036.22; Description=EF hand
  Pfam annotation: Domain name=efhand; Domain location=512-540; Score =24.0; E_value=0.00053; Accession=PF00036.22; Description=EF hand
  Pfam module annotation: Pfam domain module=Acyltransferase::efhand::ef hand; Domain location=168-295::439-467::512-540
MASTCLAPASLSTPLLSDSIARAPAANGHATNHRHHHHDDSDGAAAVSVCDDGGGDPFAFLSEDRPPRDRGPSPADPFRNGTPAWGGGVYAWSRTLLLLPVALVRLALFGLSIAIGYAATWVALRGWADTHGRPRVGGGPMPAWRRRLMWITRISARCILFSFGRTLLIRYHWIRKKGRPARRELAPIVVSNHISYIEPIFFFYELFPTIVSSESHDALPFVGTIIRAMQVIYVDRFSPASRKAAVNEIKRKAACNSFPRVLLFPEGTTTNGRFLISFQHGAFIPGYPVQPVVVRYPHVHFDQSWGNISLLKLMFKMFTQFHNFMEVEYLPVVYPPEIKQENALHFAEDTSYAMARALNVLPTSYSYGDSMIMARAIEAGKVNGSNYMVEMAWVKDIYGVSTAEAMDLLEHFLAMNPDNDGRVKAQDFWAHFGLDCSPLCKKIFHYFDLGIKESITFRQFLVGCAHLRKQPLFQGACETAFEKCRDPETSEISRAQLADVLRLSMLLPSGDRMLDLFKTFDIDGDEKISKDDFMTCLGRFPFLIAFFAAPINGEVYIEIV

SEQ ID NO: 54639 - protein, 702 aa, Zea mays
  Coding DNA Sequence Number=SeqID_12860
  Gene Ontology: Mol. function=protein binding; Cellular component =cytoplasm; Biological process=hydrogen transport
  Homolog annotation: Hit_ID=Q5Z800; Match level="QueryCoverage=97%, HitCoverage=97%, E-value=0.0, Identity=64%"; Hit description =Putative NF-E2 inducible protein
  Pfam annotation: Domain name=DUF544; Domain location=66-193; Score =184.3; E_value=3e-52; Accession=PF04424.4; Description=Protein of unknown function (DUF544)
MSSDPSPHLPSPVAPPGAAEADPHHLPQPAEPHEVMHRTRAVDFLGRRTPIVYQNDNGPCPLLAICNVLLLKNVISLNPDAGEVSQQKLLSLVAERLIDPNIAGQDKDEEYVCNREQNIADAIDLLPRLATGIDVNVMFRKIDDFEFTRERAIFDLLDIPLYHGWIVDPQDTETATAIGSKSYNALASGLAEFKSGKPTEENKYVEEETVDFAAATTAALKIPSPSVSRGRSFDEHTLSNSSTVPHKRRGDLEEEEELMRVLNLSKAKSGDVEVSFDTSHSHSSSNIETPQNESFQSEALELVVATKKEEYGNHATSDHVSMLSVTNVAINGSEVVPEESQENLISKEPEDNGIKNLDIPIQFSETTPYPSHESFASSDHQPAIPTLVEGDKETCKEQFDVQIHGQSNDTEVACDSSVTTCEAVPDHATTELDVKSDSLDNSQSLPSSIQECEPIYQGEEHILGTTNMVYENQEPVYEGEVVLAEQADKIGESSSSGDDKATEHQWELIDNFLLTTANQLTVYGLFCLQEGLNESELCVFFRNNHFNTMFKYNGSLYLLATDQGFISQTDLVWQRLDEVNGDGVFLTSNFTPFNAETPRNDSWNEQQAMTSTADYLAQFDNSTSGNSDLELAIALQQQEFERQPQRFQAPQPQQQQQQQQQPPPQTQYQTQSGRPGLVVGPRRSNAPPPSRSESKKERCIVM

SEQ ID NO: 54640 - protein, 43 aa, Zea mays
  Coding DNA Sequence Number=SeqID_12861
MRLHTLRGMKAEDICIAFIEVIFADDVVLYPQRCLLLIKGSEK

SEQ ID NO: 54641 - protein, 877 aa, Zea mays
  Coding DNA Sequence Number=SeqID_12862
  Gene Ontology: Mol. function=RNA-directed DNA polymerase activity; Cellular component=intracellular; Biological process=RNA-dependent DNA replication
  Homolog annotation: Hit_ID=UPI00005A975E; Match level="QueryCoverage =99%, HitCoverage=50%, E-value=0.0, Identity=87%"; Hit description =PREDICTED: similar to Retrovirus-related Pol polyprotein from transposon 297
  Pfam annotation: Domain name=RVT_1; Domain location=56-225; Score =148.1; E_value=2.3e-41; Accession=PF00078.17; Description=Reverse transcriptase (RNA-dependent
  Pfam annotation: Domain name=RnaseH; Domain location=455-582; Score =11.9; E_value=4.5e-06; Accession=PF00075.14; Description=RNase H
  Pfam annotation: Domain name=rve; Domain location=773-877; Score =18.9; E_value=0.00016; Accession=PF00665.16; Description=Integrase core domain
  Pfam module annotation: Pfam domain module=RVT_1::RnaseH::rve; Domain location=56-225::455-582::773-877
MPAIPRDVAEHSLDIRAGARPVGQPLRRFDEEKRRVIGEEVHKLMAAGFIKEVFHPEWLANPVLVRKKGGKWRMCVDYTGLNKACPKVPYPLPRIDQIVDSTAECETLSFLDAYSGYHQIRMKESDQLATSFITPFGMYCYVTMPFGLRNAGATYQRCMNHVFGEHIGRTVEAYVDDIVVKTRKASDLLSDLEVTFRCLKAKGVKLNPEKCVFGVPRGMLLGFIVSERGIEANPEKIAAITSMGPIKDLKGVQRVMGCLAALSRFISRLGERGLPLYRLLRKAECFAWTLEAEEALGNLKALLTKAPVLVPPADGEALLVYVAATTQVVSAAIVVERQEEGHALPVQRPVYFFSEVLSETKIRYPQVQKLLYAVILTRRKLRHYFESHPVTVVSSFPLGEIIQCREASGRIAKWAVEIMGETISFAPRKAIKSQVLADFVAEWVDTQLPTAPIQPELWTMFFDGSLTKTGAGAGLLFISPLGKHLRYVLRLHFPASNNVAEYEALVNGLRIAIELGVRRLDARGDSQLVIDQVMKNSHCRDPKMEAYCDEVRRLEDKFFGLELNHIARRYNETADELAKIASGRTTVPPDVFSRDLHQPSVKLDDAPEPEVPSAPPEAPSAQPEVPSAPEGEALVVEEEQSGATPDRDWQAPYLQYLRRGELPLDQVEARRVARRAKSFVLLGDEEELYHRSPSGILQRCISIAEGRELLQEIHSGACGHHAAPRALVGNAFRQGFYWPTAVADATRIVRTCEGCQFYAKRTHLPAQALQTIPITWPFAVWGLDLVGPLQKAPGGYTHLLVAIDKFSKWIEVRPLNSIRSEQAVAFFTNIIHRFGVPNSIITDNGTQFTGKKFLDFCEDHHIRVDWAAWLIPCRMGK

SEQ ID NO: 54642 - protein, 123 aa, Zea mays
  Coding DNA Sequence Number=SeqID_12863
MGKSKKGGSSSHHSGDKRKREPTPPSEDFGDSEYSEEEFSSKYEGSPGTYIRVIDRAGLEGSDESEVSSNEGDSSDSSEEGSDGDDGDRGDDDGGGDGSKGDGKGHGGSGNDKGGSGSGKASG

SEQ ID NO: 54643 - protein, 510 aa, Zea mays
  Coding DNA Sequence Number=SeqID_12864
  Gene Ontology: Mol. function=hydrolase activity, hydrolyzing O -glycosyl compounds; Cellular component=chloroplast; Biological process=carbohydrate metabolic process
  Homolog annotation: Hit_ID=P49235; Match level="QueryCoverage=94%, HitCoverage=81%, E-value=0.0, Identity=84%"; Hit description=Beta -glucosidase, chloroplast precursor
  Pfam annotation: Domain name=Glyco_hydro_1; Domain location=24-502; Score=784.7; E_value=5.4e-233; Accession=PF00232.9; Description =Glycosyl hydrolase family 1
MAPLLAAAMNHAAHPVLRSHLGPNNESFSRHHLSSSPQSKRIMDGSNADIGANSYHMYKTDVRLLKEMGMDAYRFSISWPRILPKGTVEGGINQDGIDYYKRLINLLLENGKTPFFLASLFMESHNLVFKGIEPYVTIFHWDVPQALEEKYGGFLDKTHKRIVNDYKNFAKVCFDNFGDKVKNWLTFNEPQTFTSFSYGTGVFAPGRCSPGLDCAIPTGNSLVEPYIAGHNILLAHAEAVDLYNKYYKGENGRIGLAFDVMGRVPYGTSFLDEQAKERSMDINLGWFLEPVVRGDYPFSMRSLARERLPFFSDKQQEKLVGSYNMLGINYYTSIFSKHIDISPKYSPVLNTDDAYASQETYGPDGKPIGPPMGNPWIYLYPEGLKDILMIMKNKYGNPPIYITENGIGDVDTKEKPLPMEAALNDYKRLDYIQRHISTLKESIDLGANVHGYFAWSLLDNFEWYAGYTERYGIVYVDRKNNYTRYMKESAKWLKEFNTAKKPSKKIITPA

SEQ ID NO: 54644 - protein, 68 aa, Zea mays
  Coding DNA Sequence Number=SeqID_12865
MAQHYDWRTPRRWPLGHIAGKWVPSNLDQNHIGRSMNDKKIDVAPKLRARELRHYSRKGNRLKGEKAI

SEQ ID NO: 54645 - protein, 145 aa, Zea mays
  Coding DNA Sequence Number=SeqID_12866
MAVMGTTSEKMYLCQVPNFGFEMIKLRPGELGEAWSGLRRAGWSGTRARVSDGGWRRGQSAREGEAMRNEVRGVRGALAGLYEGSWTRGRASWPRNPATCVSAHSPVHGESGEGGTDKAGPRRRERKGDARGQWLGSGELGPSDT

SEQ ID NO: 54646 - protein, 342 aa, Zea mays
  Coding DNA Sequence Number=SeqID_12867
  Gene Ontology: Mol. function=protein dimerization activity; Cellular component=nucleus; Biological process=regulation of transcription, DNA-dependent
  Homolog annotation: Hit_ID=Q53M47; Match level="QueryCoverage=79%, HitCoverage=26%, E-value=3e-71, Identity=48%"; Hit description=HAT family dimerisation domain, putative
  Subcellular localization annotation: CTP_CleavageSite=52; ConfidenceScore=5.06e-01
MVGNKKGKNKASQKDLKSYFSQGSSGSSLSTHGSGVVAIVEDVPLEENVLPSVEHDEEEEQVQEGITDFNPDHIISDPGLRIPIERFYANIRDEVRRAFIAKGPTQPTGHRFPPSSDKRSFQKKWFSQYSWLEYSVEKNKAYCFYCYLFKNDRMDDKFGYDAFTKAGFSQWKNAYLALPKHVGGPSSIHNVASTSFHDFDNQRSSIKHKVSSYSKDALIKYETRLETSLGIVSYLVLQGEPFRGHDESSTSLNRGNFLELLDWYKQRNDEVKRAFDELCPKNAKMTSGTIQKELGSCCAEAITKAIKEEMGDCLFTILVDESRDISIKEQMALVVRFVNIFF

SEQ ID NO: 54647 - protein, 128 aa, Zea mays
  Coding DNA Sequence Number=SeqID_12868
MLMQVNLDATGWCYIVEPEKDEVIVYFHDRLAFVGLLRFLSLDMLVGLYKRRMMTTTWASIKQIRIEVQRDWLDRLKLHRFEERDRRSSSCADSGKKCGGHKRGRGHGKGERFGSASSDGYKGQFDDE

SEQ ID NO: 54648 - protein, 79 aa, Zea mays
  Coding DNA Sequence Number=SeqID_12869
  Gene Ontology: Mol. function=transferase activity
  Homolog annotation: Hit_ID=Q10SB5; Match level="QueryCoverage=81%, HitCoverage=27%, E-value=4e-21, Identity=75%"; Hit description =Glycosyl transferase family 48 protein, putative, expressed
ERAHVMGRGQKSDAREIQTLYHSYTRNIFKALQNVSDQLDRAQLTKAYQTAAILFEVLKAVTQQHAVEVDHEESCASLN

SEQ ID NO: 54649 - protein, 716 aa, Zea mays
  Coding DNA Sequence Number=SeqID_12870
  Homolog annotation: Hit_ID=Q8W417; Match level="QueryCoverage=99%, HitCoverage=75%, E-value=1e-110, Identity=39%"; Hit description=Cig3
MEFFSRGPVWKHSGELFSSVSNDLQILLSSGLEEDLNFGSDAAENALAAVRLTVILIFTVHNVNKEPDRQSYAEIVQRRVLLQSAFTAAFDFVGRILRRCSELHDIASSFYLPAILVYIEWLASHPELAVDSEMEEKHANARSFFWSQCISFMNKLILTNLASVNDDDDEACFSNMSIYEEGETGNRFALWEDLELRGFLPLLPAHTILDFSSKHTFGSTKEKKARVQRIFAAGKSLLNFVQIDQLRIYFDSSSKKFVMAKNPPVSKTNTPLHESPDALKTSGTEMDYEAARRFDSVSSNMGTLQSKVQFCPDGDDDEEIVFKPTASEKFPKAPSDLLVNGYTHPVPMSTAGWPTNASLVPVQSTGSMTATGWPPNGGSNAFPSTASLSAAGNYNINQSLPRSSVGWAVNGEQSVIPSIAPRFELVQPVEEPVSSWTSSGAQHVGTQHKHTGLTFPDVVSEPLVSASMVQRFSSTDYSKFLSEQEMLLVNGLNTVNLTGNGYLKQRLQPGLSGLQSMGYSSQTPIEPGGTTANSMHNHLKITGENVPSTLDSVVPSIAPLGGMPMKFTEAPLTASKKNPVSRPSKPVGPPPGFDHVAPKRQDDSIPVEKLQIPQVDDYSWLDGYQQSIDHVHNLRTVYSGVSDSTAFATPFPFPGKQQLSGMHAQGATNEKTWQDFRLFEPSKQNMLQNYHQRNQQNGQIAEQEPANSVWSSSYHV

SEQ ID NO: 54650 - protein, 198 aa, Zea mays
  Coding DNA Sequence Number=SeqID_12871
  Subcellular localization annotation: CTP_CleavageSite=55; ConfidenceScore=5.60e-01
MDTVAPRLSRSSTRYGPISSSAASFSGPVRKWRKAWVPLTGTGTGTAGSGGGSSRGDNKVVLFRWTPVNGCSGGGGGTDGGMELAAAGASTCRRRYVPATPLNEDAVVTSSKCHAEGLKVTQDAPQGSEAWRCMVSSMHAKDGVDGDDCGIGPVLKDHLTACVIGYLVKQVLGFLEFGVDPNELQKTPNEEVCMSWDS

SEQ ID NO: 54651 - protein, 136 aa, Zea mays
  Coding DNA Sequence Number=SeqID_12872
MSTINGGGRELGTMSEMLAHQRGSMPSRKNTQGAHELSDETELKARRRDATATTRELRELRHCASSARDELTAESDSAGRAGQETEKLDAEQKFDARRDQASWRVSKTYRASYRRRKERLGRAASQTPNAGQRAHG

SEQ ID NO: 54652 - protein, 79 aa, Zea mays
  Coding DNA Sequence Number=SeqID_12873
MAPVEPLPEAPNDGRPIVCPMSDFCPLTMVPVEPLPEAPKDGRQVCPMSDYCPLTIDGVQKESFLETLRKEQRWSGLHE

SEQ ID NO: 54653 - protein, 185 aa, Zea mays
  Coding DNA Sequence Number=SeqID_12874
  Subcellular localization annotation: CTP_CleavageSite=32; ConfidenceScore=5.07e-01
MEGTVLGSFTATPAPPRVVPALQKSRPCRHISAENLAPSPETSLPPLLTLLIPHILATGSLSFGCVLSSLSSRGVHTVALDLPDQQHRPRWPPPPMSPETPSYPHPPHPPPEHRGGGRIDRGRVPTARLLASSIRPSLPSSLAQPSSLLLIASFRARVAVSALRALKPPVVPLSAPHRPTVFLSS

SEQ ID NO: 54654 - protein, 405 aa, Zea mays
  Coding DNA Sequence Number=SeqID_12875
  Gene Ontology: Mol. function=DNA binding; Cellular component=nucleus; Biological process=RNA-dependent DNA replication
  Homolog annotation: Hit_ID=Q9LGH0; Match level="QueryCoverage=81%, HitCoverage=97%, E-value=3e-52, Identity=34%"; Hit description=NAM -like protein-like
MQPPRSSAMNAQPQVRRDSQLIREVLSFGGGIPHWQMATVRELDLDGGSELHPTGGSLFSDDLCATMDGNGYFSSMMRDDNSQREFDTHSNTCPELQSQSMSVCPVAPNAGPNNKRSKNFSDDEDEVLVSAWLNISLDPIVGKDQKGGRYWSRIFEYFHEHNKCQSKRTLNSLMHRWETIQKCVNKFCGCLTRIELRRQSGTTMQDMACALYKSEDEHKKSFQFMHRWNKLRTQPKWLAKLDDLASGRTSNKKQKTQPNVDGTAMVPNEKGDNEVQAGEDQALIRPTRKKKSKAAIIQEKRKSVTTTLENMCAQKKDTDGEKEVKKEERFNKAFALEQERVTNEKLLLEVRKEEVELRKQQIELQKQRDEERIMTLDLSAMPEELRRYYMGLRAKIMRNEDTPST

SEQ ID NO: 54655 - protein, 85 aa, Zea mays
  Coding DNA Sequence Number=SeqID_12876
MVINDKEKESIFNEPRDDKPTDSGSSHKKKDGKKKRRIKKIVYYDSDESSSQRDDDYDEKKKPVNSKFSRIIFTHIYLFAIGEKV

SEQ ID NO: 54656 - protein, 197 aa, Zea mays
  Coding DNA Sequence Number=SeqID_12877
  Gene Ontology: Mol. function=carboxyl- and carbamoyltransferase activity; Cellular component=ornithine carbamoyltransferase complex; Biological process=amino acid metabolic process
  Homolog annotation: Hit_ID=Q8SA97; Match level="QueryCoverage=57%, HitCoverage=24%, E-value=3e-21, Identity=48%"; Hit description =Ornithine carbamoyltransferase
  Subcellular localization annotation: CTP_CleavageSite=46; ConfidenceScore=5.60e-01
MALPVDVAGSCPRSGDVGVPPKPGSSLSSVPRLSPSPRVGRGRDCSAEARAESEPWGRVKRSSSSSGAEPESEPWGRAERSSPSSGPLQLYADGGYQLRIRRLEGTPNYGPRQIGNQSTFPVCSHDLLDTVTARPTQYDSFEANSGRGDAVPICQSPTLAGDAVPIHPGPTLAETRFRLAQGQPQRETRFRFIRAQS

SEQ ID NO: 54657 - protein, 704 aa, Zea mays
  Coding DNA Sequence Number=SeqID_12878
  Gene Ontology: Mol. function=protein serine/threonine kinase activity; Cellular component=flagellin-based flagellum; Biological process=protein amino acid phosphorylation
  Homolog annotation: Hit_ID=P53682; Match level="QueryCoverage=74%, HitCoverage=100%, E-value=0.0, Identity=63%"; Hit description =Calcium-dependent protein kinase, isoform 1
  Pfam annotation: Domain name=Pkinase; Domain location=258-499; Score =258.3; E_value=1.6e-74; Accession=PF00069.15; Description=Protein kinase domain
  Pfam annotation: Domain name=Pkinase_Tyr; Domain location=258-497; Score=-42.9; E_value=7.7e-10; Accession=PF07714.7; Description =Protein tyrosine kinase
  Pfam annotation: Domain name=efhand; Domain location=546-574; Score =15.0; E_value=0.28; Accession=PF00036.22; Description=EF hand
  Pfam annotation: Domain name=efhand; Domain location=582-610; Score =1.7; E_value=9.9; Accession=PF00036.22; Description=EF hand
  Pfam annotation: Domain name=efhand; Domain location=618-646; Score =13.0; E_value=0.49; Accession=PF00036.22; Description=EF hand
  Pfam annotation: Domain name=efhand; Domain location=652-680; Score =16.0; E_value=0.14; Accession=PF00036.22; Description=EF hand
  Pfam module annotation: Pfam domain module=Pkinase::Pkinase _Tyr::efhand::efhand::efhand::efhand; Domain location=258-499::258 -497::546-574::582-610::618-646::652-680
  Subcellular localization annotation: CTP_CleavageSite=42; ConfidenceScore=5.19e-01
MTSVVLSPLRKQGNVSRIHATPTAVLLQGSSASPTATLPYVYQASSGQRGETCHPRRTLPWHSTGPSYPHGPHPVHHPAPGEAGILATVPPPGSPASRLRSRPQRQVRSFTAASGPHGPAFHLVRALSALDFVYFGEDSELETRSRVRGVAEVSSRRHSMAGFGENLCSRGEFRCHAVALMGNQCQNGTYGYGSNYNSYNHFQKEPLASRHCDGDDTEGCYTGPSRPSIADLMRQGLRQTLTSISVLGRETPNVTEHYTLGRQLGEGLTGTTYLCTETSTGCQFACKSILKTRFRNMQDVEDVRREVQIMRYLSGQKDVVAIKDAYEDEEAVHIVMELCEGGELYDRIKKGNYSEQKAAHLIRTIVGVIENFHSLGVMHRDLKPENFLLQDKDDDLSIKVIDFGLSVFFKPEVLQKHYGPEADVWTAGVILYVLLSGVPPFWADTHEGVLDKVRNGHFDFESDQWHMISDSAKDLIRKMLCPCPSERLKAHEVLKHPWICDNGVATHQTLDPTVLSRTNKLSAVNKSKKLALQVIAKHLSEEEIARLRGMFKAMDNGNNVVITLSELKEGLSKCGSVFRNIEISDIVEADDYDGNTNINWEEFIAVTVPLNKTEHKEHLMAALTYFDKDGGDYITVDELQKASVEHEMKNAFLEDTIYQVDQNNDGQTNYGEFVTMMQSDSSGLGWQTMESSMNVPLREAPEVY

SEQ ID NO: 54658 - protein, 142 aa, Zea mays
  Coding DNA Sequence Number=SeqID_12879
  Gene Ontology: Mol. function=protein serine/threonine kinase activity; Cellular component=membrane; Biological process=protein amino acid phosphorylation
  Homolog annotation: Hit_ID=Q9ARH1; Match level="QueryCoverage=93%, HitCoverage=20%, E-value=1e-32, Identity=55%"; Hit description =Receptor protein kinase PERK1
MVFYLTVEDPCGGTYQSWQQHVPPPPLEHVAKMHPSPLLAYANHPPQLLPPAVAAMINSNGGSGSNYSGGEILPPPSPGAALSFSKSTFTYEELMRATDGFSDVVLLGQGGFGYVHRGVLPNGKEIVVKQLKLGSGQGEREF

SEQ ID NO: 54659 - protein, 840 aa, Zea mays
  Coding DNA Sequence Number=SeqID_12880
MAGSGSDGAPATAGASLMSDYLDGPNAIQRRAASVAIVRSGAGAGDGPRVVDGPGREDRRAQSSRRASLSLWRSRAPATKTAAVDSIPSSVPGAAAPRGAKDKGSSTAWRSWKPVRALAHLGKRRAGCLFSVEVDAARGVPASMEGFRLAVTVRKAETRDGSVQTLPCRVRGGAADFDETLFVRCNLYFAGGAGTGKPLRLQPRRFVVTVVAVEGRGRGALLGTHTVDVSSLVLESLRKISSEGRRVRWFDETFALSGTAAGGELQLKLGFQLMEDAGLSLYTQAEERDRGSPAPGSSRARAHNRNSFSISSTPKLSPSDASVSPSMRAYKQLVDRLRVDENGDPDHHPAVRSLMPRKPGDDELSASTTDAGDVNSLPEYEVVEKGVETVKEVVHYQAQREVLRELDSIAEQIEAIEALMTNGGKKSPRAAGQQQRLDADEEMVTVEFLRKLEADGVGDKKKLRLPLTPRSEPASPARKAVTTPPVVPDLGRGIGPAVQTRDGGFLVSMNPFDLPLGNRDGPPKLAMQVSRPFVLPGATAATGFDVLQKMAAAGGADEVRDRVASLGGMDDITGKTPEQVGFEGIAAAVIGGRRTEGASSSAARSVRLVRKLAVALSEGRSERVSTGIWSAGDDPETLDEVFAFSLQKLETMAVDALAVQAEMADEDAPFEVSAAAGDTGVFDSLVPSDEWSESGASDGRVTLVAAIQVRDPSRRYEAVGAPMVAVVQSARLLGAAGYSAGRFKVRSLHVGGVQMRCTPSGGGGSARWGAERQKLTAMQWMLAHGPARAGKRAATTTAQAGARVQRPDVVWSLSSRVLAGMWLKTVRNPDVRIGGGGGGT

SEQ ID NO: 54660 - protein, 87 aa, Zea mays
  Coding DNA Sequence Number=SeqID_12881
MALRHPILAQWVLYPVRSITDAYYGCSTTPIPLWSPSHVYKPPSRHQEQRDECPSGQGVTLHKIVTAIGGGVSVAKAQRLWKAVVGP

SEQ ID NO: 54661 - protein, 205 aa, Zea mays
  Coding DNA Sequence Number=SeqID_12882
MDRGWILNFCGVSYAKRYREGVRWGFGPLDYICTVWIKSVTTRTGNNSYSRRQLTLIDRRCGADERLRSRSGERFPDFRCAAHPGSEGYTLPDVPPFAWMASWVHADDARQNRLRRRWNDGAAMFDYGCAGSRSRRPRRPSGALYGRDVAEVFQWPRPDSAAAASFSARWLKPAMKTPAHAPETERRSERELSVWTVGSASRRVV

SEQ ID NO: 54662 - protein, 128 aa, Zea mays
  Coding DNA Sequence Number=SeqID_12883
MGRGKGWTRRANGKRKRPPSHPSEDFGDSEYSEEAFSDGEGDGGEDDGSSSNNDGKGGGGGDGDGEGGNGEGDGDGEGDDKGDNDDGKGDDDSDSDDKGDSDGSKGHDDSKGDGDKGDGKAGGIMLLV

SEQ ID NO: 54663 - protein, 205 aa, Zea mays
  Coding DNA Sequence Number=SeqID_12884
  Gene Ontology: Mol. function=protein dimerization activity; Biological process=regulation of transcription, DNA-dependent
  Homolog annotation: Hit_ID=Q1S398; Match level="QueryCoverage=97%, HitCoverage=49%, E-value=1e-53, Identity=49%"; Hit description=HAT dimerisation
MVYVLQIFEGKGKQQETSLARAGDTRWGSHYKTLLRIESMWDSIIEVLEIVKQDERNPSKMMLQILHITNELSLILQRKDQNIVQAMSLVVDVKTCLINLRSEGWEPLFEETKTFCLANDIPIPNMEDMVPRFGRSRKGGRNNITQEHFFRIDTFYAAIDAITTEFDHRFNETSSELLVCFACLDPRDSFSKFDVDKLSRLVDIY

SEQ ID NO: 54664 - protein, 671 aa, Zea mays
  Coding DNA Sequence Number=SeqID_12885
  Gene Ontology: Mol. function=nutrient reservoir activity
  Homolog annotation: Hit_ID=Q10QG3; Match level="QueryCoverage=66%, HitCoverage=60%, E-value=1e-116, Identity=53%"; Hit description =Cupin family protein, expressed
  Pfam annotation: Domain name=Cupin_1; Domain location=296-487; Score =144.1; E_value=3.7e-40; Accession=PF00190.13; Description=Cupin
  Pfam annotation: Domain name=Cupin_1; Domain location=36-158; Score =1.7; E_value=0.00037; Accession=PF00190.13; Description=Cupin
  Pfam annotation: Domain name=Cupin_2; Domain location=67-145; Score =19.7; E_value=0.0032; Accession=PF07883.2; Description=Cupin domain
  Pfam module annotation: Pfam domain module=Cupin_1::Cupin_1::Cupin_2; Domain location=296-487::36-158::67-145
MAVATTARWLLLLAVVSAAAASGKHERWRVGGQVVEKERRRVVAESEAGSVSAVDVADAAGTAYRLHFITMDPGALFLPVQLHADMVFYVHSGRGKVTSIEEESSEQSSLEVERGDVYNFEQGSILYIQSYPNASRQRLRIYAIFTSEGINADDPSVMNLRSYSSFRSSAMHCMYTSVIVVCQINQSRSPRWKLTPASAIWSKGSRQTFFAWDLGKLTDSIFHKVKPEVVEAIKSAKTPPPIIAYNPEEEKGDKKPGWTENIIDALLGVRDPEEFLNKKKKKKDKHKDKKSKSKAFNFYSGKPDVQNCYGWSRMMTSKDLDALHGSSIGMFMVNLTTGSMMGPHWNPKATEIAIVTEGSGIVQTVCPSSSSSSSSPSGGSSGDHHHGHKRRGGPGGRGDEGEGEGGRARWQCRNSVFRVKEGDVFVVPRFHPMAQMSFNDDSFVFVGFSTHMGQNHPQFLAGKGSVLQAIGKKVLALALGQRDPTAVDKLLSAQRESTILPCVSCAEELAEKAEEERKRREEEGGGKGKGPGEREKEKERREREEKEKEEEREREREEKERKEREREEKERKEREREEEERREEEEERARKEQEKQRRREKEEEERARRREEEEREREEEEERRREEEEGGGGRGDEPEREEEGGDKPPYRLSKKLKKRYHARAGVFSRSG

SEQ ID NO: 54665 - protein, 136 aa, Zea mays
  Coding DNA Sequence Number=SeqID_12886
MAYMTDFKDLNDVSPDMDTRLINLSAAKHEELEVFRKKVDEEFQRQKNRRRKVDEKWYLLHFRIDRHQKVVRAREIKFDTISALLQQPLIVKSMTEDIEKMTYTLEKNSYAYFLSPELSTETTEPKTSTIYVVMGS

SEQ ID NO: 54666 - protein, 173 aa, Zea mays
  Coding DNA Sequence Number=SeqID_12887
  Gene Ontology: Mol. function=ATP-dependent helicase activity
  Homolog annotation: Hit_ID=Q2QXQ5; Match level="QueryCoverage=71%, HitCoverage=23%, E-value=1e-20, Identity=53%"; Hit description=ATP -dependent RNA helicase, putative, expressed
MAKGDGRGGGPQGLRLAVQVPGGLPQRYPGCGGAEEGDDSIHGARSGGAAPAQALSDVLDASGACATVTQTTWLVSTACDIVARKERHGMVVSCPFLLYLVSSQDKATQRNWGVVRFAVVPLMGLGVCGSLCQDGLFTNDDEEDGYDYAVGNGKEEGVEADLQEFQDFGEFED

SEQ ID NO: 54667 - protein, 111 aa, Zea mays
  Coding DNA Sequence Number=SeqID_12888
MQNQAGEPGDDELSESGVGGEGVVPELLHRGRAGPVAQGEPPRDVGLLGSEAEANVDLGARVGVRRERFLAPMTGVTEAGGMGVACEDGERRADAEIGGGMGGEGSLAPIP

SEQ ID NO: 54668 - protein, 255 aa, Zea mays
  Coding DNA Sequence Number=SeqID_12889
  Homolog annotation: Hit_ID=Q9ZPX1; Match level="QueryCoverage=25%, HitCoverage=35%, E-value=1e-20, Identity=72%"; Hit description =Probable ADP-ribosylation factor At2g18390
  Pfam annotation: Domain name=Arf; Domain location=2-88; Score=-49.7; E_value=6e-06; Accession=PF00025.11; Description=ADP-ribosylation factor family
MSYWRKFFEQTNGLVWFADSSHIRRLDDCRAELHNLLKEERLVGASLLIFANKQDMQGALKPTGIAKRHPISVVTLRQLIAAWFSRRYTRFKKRSADFHGRAADLVHSLRGTAMPRRQALEEEQCREEKGISTVPKHKGSTEVEAESGPKGRARRRPSSEVEVESEPWGRARRSPSSEVEAESEPWGRSRRSPSSEVEAESEPWGRARRSPSSEVEAESEPWGRARRSPSSEVEADLTLSSGTTVGAGQAALFSC

SEQ ID NO: 54669 - protein, 178 aa, Zea mays
  Coding DNA Sequence Number=SeqID_12890
MDKEKKRNIKEKAQNSFPFIFPNRGPFPPLPGPLGHPGPRAFAFPPHPARAPGPLRAPTAQLPRVPGSLLQRAWPAHPAWPSAQAPTPRPPGQRPLPGPATATHPVRSRERVWPSCLAPAWASVVPALAPPGPPATLSNCASSLGTLRDVRSHSAKNRPTARAPVDLPPLHSPTNESS

SEQ ID NO: 54670 - protein, 72 aa, Zea mays
  Coding DNA Sequence Number=SeqID_12891
MGSRHSACSAETGRRGSFVLLLIVTLLRGERYLIRDGWFTDDDDAGYDYGNGKDEGDKTDTQEFQDFDEFVV

SEQ ID NO: 54671 - protein, 150 aa, Zea mays
  Coding DNA Sequence Number=SeqID_12892
MGKDKKGRGLPRRSGDKWKREPSPPSEDFGDSEYSEEEVSSRSEGSPVYASPSASSDDLDDSQGIAAEGSDELEVSSDEENSSDSSEEGNGGDDNDEGDDSGDDSGGGGGDDDGNDGCMGGGGCSEDGWSDDGGKGGGSGSKASGKAPLA

SEQ ID NO: 54672 - protein, 234 aa, Zea mays
  Coding DNA Sequence Number=SeqID_12893
  Homolog annotation: Hit_ID=Q1S066; Match level="QueryCoverage=97%, HitCoverage=95%, E-value=1e-12, Identity=24%"; Hit description =Arabidopsis conserved protein
  Pfam annotation: Domain name=DUF241; Domain location=44-231; Score =44.0; E_value=5e-10; Accession=PF03087.5; Description=Arabidopsis protein of unknown function
MVCHLRSASVPSSPRSNEIHVEEQLQSLKAAISSPSVTIKTMVDGLSKLGSIYDRIDVLTCLPTSQRKAVEEELERSLVLLDLCSVLQESFVELKASVQEMQLALKRGDDAALQTRVQCYARLVKKAQKLFKKFNKKTASDIESCRVINLVAEAREIAVSTLESTLHLLSKQIAMPSCSKWSLVSKSFQKKRVMCEADQLQGLELGFVDLENRVGTLFRKLVQNRVSFLNILSL

SEQ ID NO: 54673 - protein, 194 aa, Zea mays
  Coding DNA Sequence Number=SeqID_12894
  Pfam annotation: Domain name=DUF241; Domain location=3-191; Score =24.3; E_value=2.8e-07; Accession=PF03087.5; Description=Arabidopsis protein of unknown function
MVDSLSKLGSIYNHIDALTCLPRSQRKAVEEELEHSLVLLDLCSAVQESFVELKASVQEVQLALERGDHTAAHTKIQCYVRSAKKAQKLFKKVNKKTASDIEGCWVINLVAEAREIAVLILESTLHLMLKQIVIPSSSKWSLVSKSFRKKCVVSCDAEQLQGLELDVVDLESRVGTLFRTLIQSRVSLLNALSL

SEQ ID NO: 54674 - protein, 230 aa, Zea mays
  Coding DNA Sequence Number=SeqID_12895
  Homolog annotation: Hit_ID=Q1S066; Match level="QueryCoverage=96%, HitCoverage=94%, E-value=2e-14, Identity=25%"; Hit description =Arabidopsis conserved protein
  Pfam annotation: Domain name=DUF241; Domain location=40-227; Score =32.7; E_value=9.1e-08; Accession=PF03087.5; Description=Arabidopsis protein of unknown function
MACHLRSASMPSSPRSVEEQILSLKVAISLPSVTIETMVDSLSKLGSIYSHIDALASLPSCQRKAMEEELERSVVLLDLCSAMQESFAELKASVQETQLALKRGDDAALHAKIQCYARSAKKAQKLFKKVNKKTASDIKGCRVISLVAEAREVALSILESTLHLLAKQIAVPSPSKWSLVSKSFQKKRIMCEAEQLQGLEPEIAGLESGVGTLFRTLIQSRVSLLNALSL

SEQ ID NO: 54675 - protein, 108 aa, Zea mays
  Coding DNA Sequence Number=SeqID_12896
MPVMLHEDSIPPEPGNSVAGMNKKNSITVSITTLAYHLRSASVPCSPLCNEVDAHKQPQSVKTTVSSSSVAIGTMCVGFRKLGGVYNCICELACLPSNQVTQQRKTVE

SEQ ID NO: 54676 - protein, 196 aa, Zea mays
  Coding DNA Sequence Number=SeqID_12897
  Subcellular localization annotation: CTP_CleavageSite=28; ConfidenceScore=5.08e-01
MAEPALGLIPCRTQSKKWPTTGFAGSRRARARQKWWFSGEGRRSGQGFPLPEKALGQKQGYHTYLMRNNKVYKQTIKDLVLYPCCQEGTKTIQEKQEEVHCSRSTELQGDQDVVSNQRDCLLNAGILIASPVEGNCDDKFHQIVPYLQDNPEEKSCCEDEQLQELEFDIVELENGVESLFHTLIQSRVSLLNILSL

SEQ ID NO: 54677 - protein, 52 aa, Zea mays
  Coding DNA Sequence Number=SeqID_12898
MDLPENHGPRLLLGVDVPLFFLVDPSAKSCIHMFPQRQRRFAVDTRWSSTEY

SEQ ID NO: 54678 - protein, 72 aa, Zea mays
  Coding DNA Sequence Number=SeqID_12899
MEQRLRRGLSVAAGRSRGRGAVTVVACAGTTGEAGAALQRGRGEQWRRRGLGIAAGEARSRAGRGGAVVVRR

SEQ ID NO: 54679 - protein, 830 aa, Zea mays
  Coding DNA Sequence Number=SeqID_12900
  Gene Ontology: Mol. function=solute:hydrogen antiporter activity; Cellular component=integral to membrane; Biological process =regulation of pH
  Homolog annotation: Hit_ID=Q6ZJ60; Match level="QueryCoverage=97%, HitCoverage=98%, E-value=0.0, Identity=67%"; Hit description =Putative cation/hydrogen exchanger
  Pfam annotation: Domain name=Na_H_Exchanger; Domain location=54-446; Score=74.0; E_value=4.7e-19; Accession=PF00999.11; Description =Sodiumhydrogen exchanger family
MSREAPPGPQLLAEVTVNKSIFCFPLNDSVATSSGVFAGDDPLKFYFPLLLYHVCAVFALSRAVHALLGRANVPLVISQIVAGALLGPSLLGRVLPNASAPFATPEGWLQLNTVGAYAFTLQIFVIGVKTDLGMIVKSGKKAVAIAFFGAIGPHMAMYAAAAALGARVPAPWKANFMLTNLNVWWSLSAFIVVCSTLGDLNLLSSKLGRLAMSAALIGDFANTIFVAGITSYLLASSPLERVQRIGFLSLVIFAIFIGFLTYVARPAILRLMRDVPEGGLLSEARLVAVLLITIVCSFASEVLGLHATYGPFMLGLMLPGGAPLGVTLEERLDRLVAGVLMPLLFAQGGLRLDVFKITDASTCLLLEIFLLVGVAAKQAACMLPCIYCGMSPREAFIVGLMMNFKGITEVAYASAFVDSDIFDEQVYAAFMLNILLLGAATSSLVKHLYHPEEKYVAYRRRTVQHKKLGDELRMLACVHSQADVAPMLALLDAASPSPVSPVSVYLLHLTPLVGLTSSVLRAFKYGDRNCVPSGGTDSGRIVNAFQYFVQQRPVGSASLLPYVCIAPYATMHDDVCAVALEKRAMLIVVPFHQRLAIDGSVENTTASAGSVQAANVNVLHYSPCSVAILVDRGSLSVASSAVAGGPAATADADGFPHRVALYFLGGPDDREALALATHMAEDAPIGLTVFRFLPPPEWRKGGDPEEDRLDEEALQEYVRRWVDGHRVAYSENLVCSSDEMVDTIRKSSPASDLLIVGRRADGPKSPLTVGISDWSEHLELGVLGDLLTSTDFGCRVSTLVVQQQTRAAAGEISRSPEKNAAKPPESDGHV

SEQ ID NO: 54680 - protein, 177 aa, Zea mays
  Coding DNA Sequence Number=SeqID_12901
MAPKNSLAAMTLTLQYHICSKPVLEEWQLSISRKQTYSRRRSLIKSKLPNVIFTVYLYEPEKRTDPASLGTSDSKRTIPHYRKTSRRSPRLARTSNRNHGANRIDGAGEIKETDLKSLGRAKGSVRSDQTVALKVWGMANASKAAVGRGKGVPVWSSGGGGAVEAEMKEPEGRVPEG

SEQ ID NO: 54681 - protein, 58 aa, Zea mays
  Coding DNA Sequence Number=SeqID_12902
MGLSVALLLARMLGMAGIFPLLLNWTEEQSGWVPKLLPTKICSRFPGLLLLLLKAWNE

SEQ ID NO: 54682 - protein, 405 aa, Zea mays
  Coding DNA Sequence Number=SeqID_12903
  Gene Ontology: Mol. function=DNA binding; Cellular component =mitochondrion
  Homolog annotation: Hit_ID=Q6ZJ55; Match level="QueryCoverage=97%, HitCoverage=100%, E-value=2e-89, Identity=55%"; Hit description =Putative AT-hook protein 1
  Pfam annotation: Domain name=AT_hook; Domain location=128-139; Score =3.0; E_value=7.1; Accession=PF02178.9; Description=AT hook motif
  Pfam annotation: Domain name=AT_hook; Domain location=78-90; Score =15.6; E_value=0.047; Accession=PF02178.9; Description=AT hook motif
  Pfam annotation: Domain name=DUF296; Domain location=179-302; Score =204.8; E_value=2.1e-58; Accession=PF03479.5; Description=Domain of unknown function (DUF296)
  Pfam module annotation: Pfam domain module=AT_hook::AT_hook::DUF296; Domain location=128-139::78-90::179-302
MEAKPGEASVGHAPAPMAAAAPVMAAPPLEETVSFQQPLPAPAAAAERGSSSAVLVPPLATAAGGGAMALVPVLMKVPKKRGRPRKYGPDGSLIRPLNATPISASAPLPAAVAPGHYTPASAVGAAMKRGRGRPLDFAAAAAKQHQQHHHQLYQHQQQQFGFHFDSIGDMGACSAGANFTPHIITVAPGEDVMTKVISFSQQGPRAICVLSANGVISTVTLCQPDSSGGTLTYEGRFELLSLSGSFMPTENGGTRSRSGGMSVSLASPDGRVVGGGVAGLLVAASPVQSPHLADCGWELPAKLPDGAEEQEATGGRGTCCRRPADASRSPDLEHRHPQQRARAAELRVPERGEHDGPGRNLRRGPELGVVPCSAAADGRGVQDAVVWGPEDDHVRIMSTLKPSRS

SEQ ID NO: 54683 - protein, 204 aa, Zea mays
  Coding DNA Sequence Number=SeqID_12904
  Subcellular localization annotation: CTP_CleavageSite=20; ConfidenceScore=5.11e-01
MASTDTVGSASTIGAGLGARARRASPCSSSMLRWRAACHQSEVAMDDVDGLLIPRTDPPTPPPPWFWFVGRLASAPLNWLSLFPPAGRRAGPEAPRGTGGRHPRIVVVARALMRFLSSVIRLCGLGCDSSSVIPARLTCICARFDGDLCWARFAVHLCVQQHSACMHGFEGGFPAFQRDLARNAELGELAGLLSRRSGGGAVVG

SEQ ID NO: 54684 - protein, 135 aa, Zea mays
  Coding DNA Sequence Number=SeqID_12905
  Homolog annotation: Hit_ID=Q75UP2; Match level="QueryCoverage=63%, HitCoverage=14%, E-value=1e-07, Identity=35%"; Hit description =Leucine-rich repeat receptor-like kinase
MQPLEEMLPLPRDLFDIRYSGADARRKVAPDVASGYAHSFTFKDLLVATGYFNEANFIGEGGFGKVYKGKINGQTILRSKDTAGWRYGFTALFLSVRSLEFFQGMECIWSFSSMLNGSDSVISFYHPLFVDPSIH

SEQ ID NO: 54685 - protein, 65 aa, Zea mays
  Coding DNA Sequence Number=SeqID_12906
  Subcellular localization annotation: CTP_CleavageSite=40; ConfidenceScore=5.08e-01
MASGGAAASAANSSELGRYGSLEWGLSNRPNPRQIQGFVMSKLLVPMPSSGISVKVGILMNMGEF

SEQ ID NO: 54686 - protein, 130 aa, Zea mays
  Coding DNA Sequence Number=SeqID_12907
MPPCTDGGALRCSNHGKKTTIVIAMPHTPCSTPWIFVLSIGVSGHCFAGRGRCHGGRAPPCLVAGRKKMGGPLTQLWMDEIAPSRTPFMCQSPTVGSDRMYGILSRLFKSWALVTDRTTHNAYRFIVAGF

SEQ ID NO: 54687 - protein, 141 aa, Zea mays
  Coding DNA Sequence Number=SeqID_12908
  Subcellular localization annotation: CTP_CleavageSite=56; ConfidenceScore=5.46e-01
MARSHPSIAESTVHPSSSFQLPNTAARLHRGGGHGRRSNAPTPQRSRQKSKECYTVCTAWRSQWLSSYRDSSSAKPPHRCMAAWPTPDEKLSTHRGHLPQPSLGAQDAGEGGTRRSFSQHSVATRVLEHAGWRPSHKLHTR

SEQ ID NO: 54688 - protein, 1002 aa, Zea mays
  Coding DNA Sequence Number=SeqID_12909
  Gene Ontology: Mol. function=structural molecule activity; Cellular component=nucleus; Biological process=negative regulation of progression through cell cycle
  Homolog annotation: Hit_ID=Q3LXA7; Match level="QueryCoverage=99%, HitCoverage=100%, E-value=0.0, Identity=85%"; Hit description =Retinoblastoma-related 3
  Pfam annotation: Domain name=RB_A; Domain location=415-615; Score =343.1; E_value=4.6e-100; Accession=PF01858.7; Description =Retinoblastoma-associated protein A domain
  Pfam annotation: Domain name=RB_B; Domain location=728-858; Score =231.4; E_value=1.9e-66; Accession=PF01857.10; Description =Retinoblastoma-associated protein B domain
  Pfam module annotation: Pfam domain module=RB_A::RB_B; Domain location=415-615::728-858
MDGVAKPSTSSGSGVTDSASAAAASIDERFADLCESKLGLDDSMTRQAMQLFNETKNIKSSMSSLGGGSPEEVERFWSACVMYCVSRLSKARRSKESGSVSLCQILRASKLNIVDFFKEMPQFCIKVAHILTGLYGSDWEKRLELKELQANVVHLSLLSRHYKRAYQELFLPNDGKCSDSSSESNNQEVSDYYRFGWLLFLVLRIQTFSRFKDLVTSTNELVSVLAVLIIHIPVRLRNFDIKDSSYFGKKSDRGVSLIASLCEKYHTSEDELSKALEKTNTLILDILKKKPWTATSACQQDNLTFIDPEGLTVFKDLLQGGSLKSSLLILEKEYENAINTRGELDERMFANDEDSLLGSGSLSGGAINLPGTKRKYDVMASPAKSISSPNPMSPPRFCLSPKGNSFCNSKMAPITPVSTAMTTAKWLRSTVSPLPSKPSGELLRFFSACDKDVTDDIVHRAGIILGAIFTSSSFGEQICTNMRSANRMDAIWTEQRKMEALKLYYRVLESMCRAESQILSGNNLTLLLSNERFHRCMIACSAELVLATHKTVTLMFPAVLEKTGITAFDLSKVIEGFVRHEDTLPRELKRHLNSLEERLLESMSWEKGSSMYNSLIVARPVLSIEINRLGLLAEPMPSLDAIAAHHNISMGGLPPLPFQKQERLQDKDEIRSPKRACTERRHVPVDSNSFRSQVKDSIKLKLPPPLQSAFASPTRPNPAAGGETCAETGIAVFFSKISKLAAIRIRSLCERLQLSQQVLERVYSLVQQILSQQTGLFFNRHIDQIILCSIYGVAKISQLQLSFKEIVFGYRKQPQCKPQVFRSVYVHWPPTSHNGKTGEDHVDIITFYNEVFIPAVKPLLVEVGPGASPKRKEEGKGPYPESPRLARFPNLPDMSPKKVSATHNVYVSPLRSSKMDTLLSPSPKSYYACVGESTYAFQSPSKDLKAINNRLNSWKKVSGRLNFDIVSDLVVASSLNGVQNAKPAATEVVPTKTPVKCEPSES

SEQ ID NO: 54689 - protein, 153 aa, Zea mays
  Coding DNA Sequence Number=SeqID_12910
  Subcellular localization annotation: CTP_CleavageSite=58; ConfidenceScore=5.59e-01
MSFPLPPLPLPSLPLPSPALPPPADAPAPPTHSLTPVILPWSAATQPATPASVSSPLSAQSVADIPGGRSKAQRWLWDVAVEVPAPLFPCAPPDPFLLIYVGDASTVSRRPTMRLSVAVWYGVFIAACLGIGCARAHAGRGLCITQRRCWCGV

SEQ ID NO: 54690 - protein, 182 aa, Zea mays
  Coding DNA Sequence Number=SeqID_12911
  Subcellular localization annotation: CTP_CleavageSite=18; ConfidenceScore=5.09e-01
TTHLRPTSDGRCSHTSLKANLVQETQSRLTRNQPPGGRCSHDSPEATHGQETQSRLARGQPRMSSTFLTCPRASRLMLQKVLNSTDQLCEADRPTNSLMTKFIDQFNEEDQPTNSLSSNPMRQRSESSATDPHQLRHDASPSSHIWTYTHHDEWAPGATICMVHHDDHQLNLMAYEVAIVGH

SEQ ID NO: 54691 - protein, 124 aa, Zea mays
  Coding DNA Sequence Number=SeqID_12912
MSRERGLPWRLTRACLEGEACRAATSAQAHELAELPPPTVIVGKKGRASSMAARRRYAPALACSEQIEPRPCTRKKATTISRSMMPHGGGVGVTSMACALVAGEFVKIIPGVEICVYYSLDRLM

SEQ ID NO: 54692 - protein, 144 aa, Zea mays
  Coding DNA Sequence Number=SeqID_12913
  Gene Ontology: Mol. function=nucleoside-triphosphatase activity; Biological process=biosynthetic process
  Homolog annotation: Hit_ID=Q54R62; Match level="QueryCoverage=58%, HitCoverage=19%, E-value=3e-14, Identity=40%"; Hit description =Uridine kinase
MDANVVQRCLEAGGRDFLFHHTSSPPSPTSASAAASSSILQSLPLHVSFDRGYYLLVKAIQELRARKDGHVVTVGIGGPTGSGKTSLAEKVASVLGCVVIVSMEDYRTAPGVDDGISDVNAVDFDALARNLQIFAVSSIKADYT

SEQ ID NO: 54693 - protein, 235 aa, Zea mays
  Coding DNA Sequence Number=SeqID_12914
MNEMLRLDRNSVNTLDASAPEWETTGCRFESQETRTPDRTFVVYEPSKQSAEPAEVCKVTNGAVFDHKMRDKCVKFVCTAILIEHIEVVDLVVSILALNHVFPYNLPKRLSNTTNNSTNSILAMGEDMEELDTREMMLQRLACKTSPHQTEDLIGQVKKGQNSIIILGAWSIWNHRNQFVFDKIQPNLDKVFVAVWDELHIGVWPKLRVRSLVLTPTTECHPSIVVYVGDRKWKP

SEQ ID NO: 54694 - protein, 121 aa, Zea mays
  Coding DNA Sequence Number=SeqID_12915
MSMDKMWFNVLLKQWKHSGHDFSLRNRKASTILVSLYSCNKLKKTAKSLISWSNNQVGHIRFQLAMAKEILHRLEIAQDDRILSMNELWLKNKLKKHTLLLSSLRRTMARLRSRISWLKDG

SEQ ID NO: 54695 - protein, 101 aa, Zea mays
  Coding DNA Sequence Number=SeqID_12916
  Subcellular localization annotation: CTP_CleavageSite=60; ConfidenceScore=5.05e-01
MARMMALGPHIVHVVRYKGYETVRRPQGPRARVVLPMVERSVLPSTGASFLRKPPLVEPSLAYKRRRHGRRLRLGFPRTQEETLESPRRRTQGRNPDEERP

SEQ ID NO: 54696 - protein, 86 aa, Zea mays
  Coding DNA Sequence Number=SeqID_12917
MDIIDDLARLCERYSRLVVGPPVYPNYVPRLDPLVSRRQEKGSPQKDLPSVSPEALSPGSSEVEPNRGVEQIEKKPLKWIPCLNQD

SEQ ID NO: 54697 - protein, 448 aa, Zea mays
  Coding DNA Sequence Number=SeqID_12918
MDESRKRAVSTANGKNISSSLDEDFGNDFLSSWKLPKSGKDTIDFSVDSVPKSSKKFSFDNLDDFGLNGAFDKLPSFQMGMSDLDFSSPDKKKVKHTSSNADLFEKKKETDKDNFSFSFDFNELGKFSLDGKLGIEEKSTNRFNGKSDPVSSEVKKDTQRGLLAKGNAILEENNSKDKMHTLDTRTSRPSHLTNHENVKNASQPTSNIDVADSSDKMQEHTSVNPATMEQTKVDSVLNDNPGEHPKEIYAMKAAVNIPSQDFSCGAISSEDPTQGPADHVNSKDAPIVNCGKVHVSRESNDDEQSNGLQSRDTSIINSNVSRRPSGQFNSQNEVLEESVSLNEGSQDNQSFSGAPKKFLKKTSHGTTNTEEEISGPKILSCSVQREHMQANAVPHKSKTALSKTYSKLASNGLLATSMNAKVDTNAKLGCIQHSQQCHTGALLLLQQP

SEQ ID NO: 54698 - protein, 58 aa, Zea mays
  Coding DNA Sequence Number=SeqID_12919
  Subcellular localization annotation: CTP_CleavageSite=52; ConfidenceScore=5.49e-01
MELAPASAWTASHGSGQRRSLCPAPLLACRVRARALFLPRAESSVVLSSLTSSMAVVP

SEQ ID NO: 54699 - protein, 342 aa, Zea mays
  Coding DNA Sequence Number=SeqID_12920
  Gene Ontology: Mol. function=heat shock protein binding; Cellular component=integral to membrane; Biological process=protein folding
  Homolog annotation: Hit_ID=Q0WT48; Match level="QueryCoverage=75%, HitCoverage=37%, E-value=5e-98, Identity=68%"; Hit description =Putative DnaJ protein
MADNTNRTNAMYLVWSGAVFAKKSIWDLAVPLSARKTSGGNSEGIAHFLQLPHFTEATVKKIARKKIRAFQELCDMSVEGRAALLTQVAGLSEEQVRDVELVLEMIPCIEVDIKCETEGEEGIQEGDVVTMYAWVSLRRRNGLTAALPHCPNFPFHKEENFWLLLADAASNDVWLSQKVSFMDEATAITAASKAIQDTQEALGASAKEIGNAVKEAVDRVKKGSRLVMGKFQAPAEGTHNLTSFCLCDAWIGCDIKTSFKLKVLKRSRAGTRGHVPEEGSAAAVEDGIEDEEEEDEEEYDDYESEYSDDEEDEKNKGKGQGKVVNGSAHQGAESDIDSGSDE

SEQ ID NO: 54700 - protein, 83 aa, Zea mays
  Coding DNA Sequence Number=SeqID_12921
MEKRMAEMFQYMQSLDATSGFAPPPPLFPAADPAQCYTPSNSWHSAKTLLSVQQKVLSKEVVTDVQFTVFFLSRVTLGKEFVE

SEQ ID NO: 54701 - protein, 119 aa, Zea mays
  Coding DNA Sequence Number=SeqID_12922
MESVLCAEETKPNNWDSFLPEAETRAGPATTQGESAARMHTYSIHTAQRTTEATHRGPSCRGPVIPQVLPEAAHDRSSSRQSRGIGNLEIWRGSLAEMSRMRGETREGGAPSRRDGGGI

SEQ ID NO: 54702 - protein, 164 aa, Zea mays
  Coding DNA Sequence Number=SeqID_12923
  Gene Ontology: Mol. function=RNA-directed DNA polymerase activity; Cellular component=chromatin; Biological process=RNA-dependent DNA replication
  Homolog annotation: Hit_ID=UPI00004C1733; Match level="QueryCoverage =70%, HitCoverage=8%, E-value=6e-61, Identity=94%"; Hit description =UPI00004C1733 related cluster
MPDIPRDVAEHSLDIRAGARPVKQHLRRFDEEKRKAIGEEIHKLMAAGFIKEVFHPEWLANPVLVKKKGGKWRMCVDYTGLNKACPKVPYPLPRIDQIVDSTAGCETMSFLDAYSGFVLTVLLYTHDPIPKIPCLTYFTWETLSNYVFEDLRKPKAPNSSPSQY

SEQ ID NO: 54703 - protein, 163 aa, Zea mays
  Coding DNA Sequence Number=SeqID_12924
MGRGTRGSGWHRYADGKRKRASSPPSEDFGDSEYSEEAYWRSIERDGLNGSDESGVSSDEADSFDSFEEWSSDDGDGEGDSSGDDNDDGDGGSKGDGDGSGNDDKGDGDGGRGNDSKGYSSGDDGSGDVKGEGGRGEGGRGNGGSSGKGDGGSGKASGVMPLV

SEQ ID NO: 54704 - protein, 97 aa, Zea mays
  Coding DNA Sequence Number=SeqID_12925
MASLVTTIQLSQFVTFIHTLLVLSKVVGLARPISLSLAAQVAPPIDLAPTAVDVVPIDVEAVSMDQDDGLLDYEPSLNRVEVNVVHFSPNHYAVGDD

SEQ ID NO: 54705 - protein, 521 aa, Zea mays
  Coding DNA Sequence Number=SeqID_12926
  Gene Ontology: Mol. function=tyrosine N-monooxygenase activity; Cellular component=endoplasmic reticulum; Biological process =electron transport
  Homolog annotation: Hit_ID=Q43135; Match level="QueryCoverage=90%, HitCoverage=84%, E-value=0.0, Identity=76%"; Hit description =Cytochrome P450 79A1
  Pfam annotation: Domain name=p450; Domain location=28-507; Score =200.3; E_value=4.6e-57; Accession=PF00067.12; Description=Cytochrome P450
  Subcellular localization annotation: CTP_CleavageSite=41; ConfidenceScore=5.08e-01
MSGFVSGHPTLRPWRSRRNSTCCTPSLPPGPVPWPVVGNLPEMMLSDKPAFHWIHHIMKEAGTDIACIKLGGVHVIPISCPKIALEVLSNQDANFASRPLTFASKTFSTGYRDAAMSHCGDHWKKMGRVLASEIVCPSRHRWLHDKRADEADNLTRYVYNLATKAGSSGAVDVRHIARHYCGNVVRRLMFNTRYFGKPQPDSGPGPLEVQHVDAVFTSLGLLYSFCVSDYLPWLLGLDLDGHEKMVKEANERVTRLHDAVIDERWRLWKSGERRELEDFLDVLIMLKDAEAGRPVLSIEEVKALLMDITFASMDNPSNAVEWALAEMVNNPTMLKKAVDEIDSVVGQERLVQEHDIPRLNYTKACIREAFRLHPVAPFNVPHVAVADATVAGYRIPKGSHVILSRTGLGRNPDVWDDPLRFDPERHIPLSPEMEVSLVERDLRFISFSTGRRGCIAAALGTDMTIMLFARLLQGFSWSKMTGVAAIDLSESRHNTFMARPLVLQAKPRLPAHLYPGILLCK

SEQ ID NO: 54706 - protein, 388 aa, Zea mays
  Coding DNA Sequence Number=SeqID_12927
  Subcellular localization annotation: CTP_CleavageSite=70; ConfidenceScore=5.16e-01
MPKLAASAHTFVVRTLGRSFSLCRFSFSGAVSWPKDSFHRITDHTYLFGGMSRHHTNLCSYEGFVVKVVRSQGVTPMLMYYAECMICIIRRRPKWHGDWTKEWFHAKVDFEQREDFKDYEDPAINAETGERKRVAKGDGKTSKKTVDADKEKDESDGGEEPFSGPEKKKAKTSSKKSATAQEQGKGSATTTSSMGCTRVLEVMTQPLPFSPLSPLGLILIWFVPTAKGTNEGGQSLKDKEISYEEVESPCILVLRGAAFGEKELKEPKLTIGEDVTEPTQTTGEEIDELGFFVKHLGGANWYALDAIGSDFDDADFKHYITSTARSIWFGRSRLTIAKGDTRPRKSLVPRRTSVFGEQSPRLGTSFLHTDSTISFPGLRRASSATHRG

SEQ ID NO: 54707 - protein, 141 aa, Zea mays
  Coding DNA Sequence Number=SeqID_12928
  Homolog annotation: Hit_ID=Q9LU56; Match level="QueryCoverage=35%, HitCoverage=12%, E-value=6e-07, Identity=50%"; Hit description =Arabidopsis thaliana genomic DNA, chromosome 5, P1 clone:MWD22
  Subcellular localization annotation: CTP_CleavageSite=28; ConfidenceScore=5.55e-01
MGRAATPAPGAQSSRLPRAVSRLRLVLRSSEAAARSGSKRWIGCFRPSPSPATAAAGAAVVKEAKGKRPEVEVEPARGGGEDVWSADAETEVAQGGAFPEHLVIMVNGLVGSADDWKFAAEQFVRRMPGQGDRAPCSLSHG

SEQ ID NO: 54708 - protein, 375 aa, Zea mays
  Coding DNA Sequence Number=SeqID_12929
  Gene Ontology: Mol. function=transition metal ion binding
  Homolog annotation: Hit_ID=Q84YL2; Match level="QueryCoverage=99%, HitCoverage=99%, E-value=3e-21, Identity=54%"; Hit description =Flavohemoprotein b5/b5R-like
  Pfam annotation: Domain name=Cyt-b5; Domain location=324-372; Score =7.7; E_value=0.059; Accession=PF00173.18; Description=Cytochrome b5 -like HemeSteroid binding doma
MADEDSSDFTFCRVSSAENDGQPESPKAIPMASMTLEDVRVKSADTSKNNGMKTVDSEKDRSGNNVSVSTKDDNMKAPVTHTGSGAESNVPLQAKRSSKKPAARAKVPFEKGYSQMDWLKLTQTHPDLAGEIDLTSMKEKATTNIGFCADPLPINIRGVKGGHNHKVVVPPSAASEDSDHCPLILGLRVGLENDAFTLNPFGQTYVALLPKKNRAEEVKDYRPISLQVLLNGIPGKTIQLKRGLRQGDPLPLMLFILVMDILGDMPRESDIQMILNILHLSGEASGLKNNVQKSNFCDEVRAFFSIAMVTEIGNGLKGQSNRRLISLEEVKQHKAGDCIWTVLKGRVYNIAPYMKFHPGEFLLEKCLVGFLDPTA

SEQ ID NO: 54709 - protein, 134 aa, Zea mays
  Coding DNA Sequence Number=SeqID_12930
  Gene Ontology: Mol. function=metal ion binding; Cellular component =integral to membrane
  Homolog annotation: Hit_ID=Q337S3; Match level="QueryCoverage=82%, HitCoverage=58%, E-value=4e-46, Identity=64%"; Hit description=RNA -binding protein, putative, expressed
MRKFQDSIKALQADIDHANAMVSEFLRDYDGSVIQMRVAYSAVAHFLLQWTDCKLAGALGLLKVMLYKLPSGITELDDRKQRKLCLKKFRSRDEQLWEVDTERELECGICLEVSPKVVLPNCAHMLCMRCFEDW

SEQ ID NO: 54710 - protein, 257 aa, Zea mays
  Coding DNA Sequence Number=SeqID_12931
  Homolog annotation: Hit_ID=Q6BTJ4; Match level="QueryCoverage=87%, HitCoverage=38%, E-value=3e-12, Identity=30%"; Hit description =Similar to CA1621|CaIFF6 Candida albicans CaIFF6 unknown function
MAPPVDVVGLCPRLGEVEAPPRSRSSLSSKVEVESEPPGRTRRRSSAEARAESEPWGRAKRSSSSFGAEPESEPWGRAEWSSLSSGAEPESEPWGWAERSSSSSGTEPESEPWGRAKRSSSSSGAEPESEPWGREERSSSSSGAEPESEPWGRAERSSSSSGAEPESEPWGWAERSFPWRLGPNSAAVSLTFSSGSAVGAAQVALSSCQTAIWPTLLLGEDRASGEPKLCADGGYQLRFRSLEGRGVCGLINSVANG

SEQ ID NO: 54711 - protein, 61 aa, Zea mays
  Coding DNA Sequence Number=SeqID_12932
MAATTATSTKVVIIGRSCTAHAKELGDLVPKEVEETWTRLQPSLKAWKLPLSVIIAKERHI

SEQ ID NO: 54712 - protein, 1036 aa, Zea mays
  Coding DNA Sequence Number=SeqID_12933
  Gene Ontology: Mol. function=ATPase activity, coupled to transmembrane movement of substances; Cellular component=integral to membrane; Biological process=transport
  Homolog annotation: Hit_ID=Q8GU79; Match level="QueryCoverage=97%, HitCoverage=88%, E-value=0.0, Identity=59%"; Hit description=MDR -like ABC transporter
  Pfam annotation: Domain name=ABC_membrane; Domain location=486-715; Score=-2.0; E_value=0.0015; Accession=PF00664.13; Description=ABC transporter transmembrane region
  Pfam annotation: Domain name=ABC_tran; Domain location=204-388; Score= 236.9; E_value=4.4e-68; Accession=PF00005.17; Description=ABC transporter
  Pfam annotation: Domain name=ABC_tran; Domain location=790-982; Score= 214.7; E_value=2.1e-61; Accession=PF00005.17; Description=ABC transporter
  Pfam annotation: Domain name=SMC_N; Domain location=193-394; Score= -108.9; E_value=0.0012; Accession=PF02463.9; Description=RecFRecNSMC N terminal domain
  Pfam module annotation: Pfam domain module=ABC_membrane::ABC _tran::ABC_tran::SMC_N; Domain location=486-715::204-388::790 -982::193-394
MLSFLVIPLILIIGAAYTKKLNVLSLSRNAIVSEAVSVVEQTLSHIKTVFSFVGESWAMKSFVQCMESQFNLSKKEALIKGIGLGMFQAVTFCSWALMVWIGAVAVTKNKATGGGTIAAIMSILFGAISITYAAPDLQTFNQAKTAGKEVFKVIKRKPSISYAKSGLVLDKIHGEIKFRRVHFAYPSRQDKPILQGFSLSIPAGKVIALVGSSGCGKSTVISLLQRFYDPTSGDILIDGHSIKKIDLKSLRRNIASVSQEPSLFSGNIKDNLKIGKMDASDKEITEAARTANVHSFISKLPNEYLTEVGERGVQLSGGQKQRIAIARAMLKDPPILLLDEATSALDSESEKLVQDALERAMRGRTVILIAHRMSTIVNADTIVVVENGRVAHTGTHHELLDKSTFYSNVCSMQNIDKEAENKVASTPDNMEEQIGEAHIKQSSTNQGPNKKLERLESKQPRNENVKETPPFFRLWYGLRKEDIMKILVGSSAAAISGISKPLFGYFIMTIGVAYYDPNAKKEVTKYSLIFFTAGMVTMDFLPHALSVTRQQSRPSYSDRMAVIVQCIASILIATIVSMKVNWRMALVSWAVMPCHFIGGLIQAKSAKGFYGDSAIAHRELVSLASEAASNIRTVASFVYEDEIIKKAELSLQEPLRITKIESMKYGVIQGISLCLWNIAHAVALWYTTVLVQRKQAKFENSIRSYQIFSLTVPSITELWTLIPMVMSAISILNPVFDTLDRETQIVPDKPENPGKGWLVGRTEFQDVSFNYPSRPEVTILDGFNLIIEPGQRVALVGPSGAGKSSVLALILRFYDPARGRLLIDNKNIKDYNLRWLRKQIGLVQQEPILFNTSIRDNISYGSESPSETEIIQAAMEANIHEFISGLPEGYGTVVGDKGSQLSGGQKQRIAIARTILKRPAILLLDEATSALDGESERVVMSSLGTKVWKDKDEQASTITSITVAHRLSTVINADTIVVMEKGKVVELGNHQELISAEDGVYSKIVPLAKQHERMTIYSSSIMAKDQRHLARIALGD

SEQ ID NO: 54713 - protein, 348 aa, Zea mays
  Coding DNA Sequence Number=SeqID_12934
MGFGLVPARHYARAGLGPRPRHAVPARHGPFKTESPIGPTSYSYFLRPEVCNPNPNPSRALVSFSPSPLSAPPSPSRRLAPSVPSWVLASSPVGSLVGARLAARRFPRGARLAGRRFPRGARTRFPRFPVDRRLAPSSVDVEASAVARRASWNPGCPVLGTSSVEVVAVRDQVPAMEHRYDPTSINHDLVLMGQTPDVVDDVHDDLEDLFGSTAPTPNPTINLGDDNVAAEGEALPDATASTTASTGRKRKCTSDVWEDMDKIFATENGVEEARPPELASLGFARQPLRYNSPDCPRAQKSESPIPVHRTPNSTCPVCTGHPGGPTSQKLQRSESNGSDDVAGAPDCP

SEQ ID NO: 54714 - protein, 792 aa, Zea mays
  Coding DNA Sequence Number=SeqID_12935
  Gene Ontology: Mol. function=protein serine/threonine kinase activity; Cellular component=ubiquitin ligase complex; Biological process=protein amino acid phosphorylation
  Homolog annotation: Hit_ID=Q336U5; Match level="QueryCoverage=99%, HitCoverage=88%, E-value=0.0, Identity=46%"; Hit description=U-box domain containing protein, expressed
  Pfam annotation: Domain name=Pkinase; Domain location=432-693; Score =106.9; E_value=6e-29; Accession=PF00069.15; Description=Protein kinase domain
  Pfam annotation: Domain name=Pkinase_Tyr; Domain location=432-694; Score=59.7; E_value=3.9e-16; Accession=PF07714.7; Description =Protein tyrosine kinase
  Pfam annotation: Domain name=TolA; Domain location=229-514; Score= -155.5; E_value=0.091; Accession=PF06519.2; Description=TolA protein
  Pfam annotation: Domain name=U-box; Domain location=720-792; Score =65.8; E_value=1.4e-16; Accession=PF04564.6; Description=U-box domain
  Pfam module annotation: Pfam domain module=Pkinase::Pkinase _Tyr::TolA::U-box; Domain location=432-693::432-694::229-514::720-792
MRPQELRAYRQHEREKMEKKLNEYVLICRRLKVNCDIVAIQNDDIANGVINLISLHGIKKLVVGAASDKKYSKTMKAPTSNTALKIMEGAASPCKIWFTCKGSLIVVKGGNADTPTVPSSQNTAPLPVFNISSQMRSMMIHNSKDKASSSNLSMANDMGESRTDVPCSLYENAGDTLLQSFEDVESTFKGKPRRLRSLEDFTVDSGRSQTQNSDSSCPPNDGAASISRTAVVDNDNISEVASNMHLSTNNSYDHISPTPHDLDKLKETLTKIQLLEKEVQEECNKQQNAERELQSALQKSKELEKSYMNELRQQKALKEMLEKQRQEIDVMRRQQEEAYAALYNANEQKVTLEQRISEIELYVKDKEDELARNKHQLEALQADCDRIQQERDAAIREATELHEKNRLGVFAPSEALNTKFSLIELQQATQDFNPMFKVGEGGFGSVYKGFLRNTTVAIKLLHPESMQRQSEFHQEASVLSTVRHPNLVTLIGTCPEAFGLVYEFFPNGSLEDCLGCKNNTRPLTWQTRTRIIGEMCSALIFLHSNKPHPVVHGDLKPDHILLDANYSSKLGDFGISRLLIQTNTCSTNLYRTTNPRGTFSYMDPEFLTTGELTPRSDVYSFGIIILRLLTGKQPQRIAEIVEDAIEKENLHSIIDSTAGSWPFIQANQLAHIALRCAELSRRRRPDLTVDVWKVVEPLMKAASMTARPLSCTAPSDETCIPSYFICPILQEIMRDPYVAADGFTYEGEAIRGWLDSGHSTSPMTNLDLERSLLVPNRALRSAILEWNQQERQ

SEQ ID NO: 54715 - protein, 132 aa, Zea mays
  Coding DNA Sequence Number=SeqID_12936
MGENSREWRRAAARRGGRRTAGRAEAAKSEMANAGTGRGGQTPESTHQHTLRTAVSNTREAAESPPLAVDDKIFVAVPEELKHGKSNLLWALHNLARDASSSRIAIAHVHVPAQMITTITIALLEPRPSPGD

SEQ ID NO: 54716 - protein, 250 aa, Zea mays
  Coding DNA Sequence Number=SeqID_12937
  Gene Ontology: Mol. function=branched-chain-amino-acid transaminase activity; Biological process=branched chain family amino acid metabolic process
  Homolog annotation: Hit_ID=Q94LV4; Match level="QueryCoverage=44%, HitCoverage=29%, E-value=2e-37, Identity=66%"; Hit description =Putative aminotransferase
  Pfam annotation: Domain name=Aminotran_4; Domain location=10-232; Score=-36.5; E_value=8.7e-08; Accession=PF01063.9; Description =Aminotransferase class IV
  Subcellular localization annotation: CTP_CleavageSite=84; ConfidenceScore=5.59e-01
MGCAVCHLRHAVLAITVPISMSCVAYSHATFVTSSCPTGVTISMGSTACQFVTTSPTSAVVRGLLVRWWLQRVRRQLLEATLVVVDLGTQGRNLALSDGHQPPSRPAVSKCEHGVRLVSRGVIARLQLEDDLFVREGCSVRDNIISTPLLTGTILPGITRRSVIEISQNLGFQVEERLITIDELLGADEVFCTGTAVVLSPVGSITYRGRRVEYGKNQEAGVVSQQLYAALTAIQKGLTEDSMGWTLQLT

SEQ ID NO: 54717 - protein, 601 aa, Zea mays
  Coding DNA Sequence Number=SeqID_12938
  Gene Ontology: Mol. function=protein dimerization activity; Cellular component=nucleus; Biological process=regulation of transcription, DNA-dependent
  Homolog annotation: Hit_ID=Q2QRD1; Match level="QueryCoverage=98%, HitCoverage=63%, E-value=1e-172, Identity=62%"; Hit description=HAT family dimerisation domain containing protein
  Pfam annotation: Domain name=hATC; Domain location=506-580; Score =43.1; E_value=9.5e-10; Accession=PF05699.5; Description=hAT family dimerisation domain
ATITRSTIGTGHLSRHRDKCKRLHGRTGNQSMLRYNADGTVFRWEYSAEVARVQLCRLIARLDLPLCFADCDAFDEYIKTTHNPRHCNVSRQTTTRDIQKYFKERHAIVAEKLKSVTSVALTSDIWSGNAKEDYLSVVAHYVNSDWQLEKRILAMRLIDCSHSSKNIAERIHAVVNEYELAEKVFSITLDNASANTRAMDHLTPLLSAYVGPLLLHQRCACHIINLVVHATFVELKPHLEDFRTAISFLNSSNQRIAAYKSFCVAMGVRPRKFGLDMEVRWNSTYLMLKHLIPYKSTFSVFIQTHYHPREEGTTLLSEAHWYVAEKILEFLERFYDSTVVMSGVYYPTSPLMLHHILHINKHTNMYENDNLLRHIVVPMKDKFLKYWGTIPLLYAFAFILDPRAKMRGFNNMLALMTHSDYSGYLTSVRADLSDLFNKYDDKFGSVRLQRTSNATPGEGKSKYAWDLVFGADGIGSSSSMALGAGLGAFGASSSSGMVPELSRRTSASALLHAASTSGISGSELAAYPVLSILAKDIISVPVSTVSSDSAFSLAGRLIEERRRRLGSGMVEMLSLLKDWEAADARMQHTTEDKILEESFRD

SEQ ID NO: 54718 - protein, 303 aa, Zea mays
  Coding DNA Sequence Number=SeqID_12939
MDKVLAFSILSASPADLSSTGAGFGGSWARLSWRRGADDQRAPRREQQQEEDEDREKRDLRSRDGGAHASGGGAAAAPPRFAPEFDGIDWELLNYQSRTTNRATSVSNRIEGDHIHGNLPQIPSSATIEGRRRIGPNLITKPKYETKAETMDSKQCSPSNSGANRGRVSRRRSAAGARWSAAFSCLGVGAASAAAAWGRARHESRAAEEEEERPAAEMSAGDELRMEKARILSMVWSVTDDGGGWKSAEGRGGETWRLVVAAGRRGATPGGVSGGVWSVGWIGLDRSYRQATAPWCRAVGIPS

SEQ ID NO: 54719 - protein, 151 aa, Zea mays
  Coding DNA Sequence Number=SeqID_12940
  Homolog annotation: Hit_ID=Q6QP51; Match level="QueryCoverage=61%, HitCoverage=41%, E-value=6e-18, Identity=55%"; Hit description =Putative growth-regulating factor 1
MTNGVRGNFFRAIVTGSTCVHVSMTMTGYNKHSENSAIHPVPTTVPTSRVNLSHDLPRVQPRAQQGAPPRPTSGLGLSLGLGRRSPPRPTSGLGLSLGLGRSHILARPRASASGGVTSSPDLSLGLRRSLCLARPRPRTDRATGDTSLPYP

SEQ ID NO: 54720 - protein, 367 aa, Zea mays
  Coding DNA Sequence Number=SeqID_12941
  Gene Ontology: Mol. function=DNA binding; Biological process =regulation of transcription
  Homolog annotation: Hit_ID=Q5NKQ3; Match level="QueryCoverage=79%, HitCoverage=65%, E-value=3e-59, Identity=48%"; Hit description =Putative NAM (No apical meristem) protein
MDRPCVVPWAAARPRTAPTRHVLLLGRLPRQYRDLRRSPGRLVSQLAWAAAKDGAPTKGRPCVHGSSQVCVRRAAHRAKIFGSGSQPYFGSCSCARAGLGDGVWDGFSEEPTIRGAAGDQAAQEQEGWVICRVFKKKNLVHHGQSSGVKQQAAGDDHAASHTAAAAAHMDESSPSQCSSVTVISDHVHANVNDKQQQAQASLLMMHTHHSASSDDDALDHILQQYMGGGRQAPAPDTKPALLEQLDHLHHHLAAAPTTRAAAGFYYGKFMKLPPLEHAGLPPSPPPPGAREYGAAAAAGWDDDDDALDRLAAYDHLNGLSNDASKNMAAFFDVEPSAAAAAAVDGDLWSLARSVSALHADLTMNNNV

SEQ ID NO: 54721 - protein, 643 aa, Zea mays
  Coding DNA Sequence Number=SeqID_12942
  Gene Ontology: Mol. function=transferase activity, transferring glycosyl groups; Cellular component=chloroplast; Biological process =starch biosynthetic process
  Homolog annotation: Hit_ID=P04713; Match level="QueryCoverage=99%, HitCoverage=100%, E-value=0.0, Identity=84%"; Hit description =Granule-bound starch synthase 1, chloroplast precursor
  Pfam annotation: Domain name=Glyco_transf_5; Domain location=82-365; Score=425.4; E_value=8e-125; Accession=PF08323.2; Description=Starch synthase catalytic domain
  Pfam annotation: Domain name=Glycos_transf_1; Domain location=405 -600; Score=29.2; E_value=1.5e-05; Accession=PF00534.10; Description =Glycosyl transferases group 1
  Pfam module annotation: Pfam domain module=Glyco_transf_5::Glycos _transf_1; Domain location=82-365::405-600
  Subcellular localization annotation: CTP_CleavageSite=76; ConfidenceScore=5.64e-01
MAALATSQLVATRAGLGVPDASTFRRGAAQGLRGGRTASAADTLSMRTSARAAPRLQHQQQQQARRGARFPSLVVCASAGMNVVFVGAEMAPWSKTGGLGDVLGGLPPAMAANGHRVMVVSPRYDQYKDAWDTSVVSEIKMGDRYETVRFFHCYKRGVDRVFVDHPLFLERVWGKTEEKIYGPDAGTDYRDNQLRFSLLCQAALEAPRILSLNNNPYFSGPYGEDVVFVCNDWHTGPLSCYLKSNYQSHGIYRDAKVAFSELNNAVFVLHARIPRLVVTAFCIHNISYQGRFAFSDYPELNLPERFKSSFDFIDGYEKPVEGRKINWMKAGILEADRVLTVSPYYAEELISGIARGCELDNIMRLTGITGIVNGMDVSEWDPSRDKYIAVKYDVSTAVEAKALNKEALQAEVGLPVDRNIPLVAFIGRLEEQKGPDVMAAAIPQLMEMVEDVQIVLLGTGKKKFERMLMSAEEKFPGKVRAVVKFNAALAHHIMAGADVLAVTSRFEPCGLIQLQGMRYGTPCACASTGGLVDTIIEGKTGFHMGRLSVDHRRSCFVVLSSQCNVVEPADVKKVATTLQRAIKVVGTPAYEEMVRNCMIQDLSWKGPAKNWENVLLSLGVAGGEPGVEGEEIAPLAKENVAAP

SEQ ID NO: 54722 - protein, 303 aa, Zea mays
  Coding DNA Sequence Number=SeqID_12943
  Homolog annotation: Hit_ID=Q5Z5B8; Match level="QueryCoverage=49%, HitCoverage=7%, E-value=1e-72, Identity=85%"; Hit description =Putative callose synthase 1 catalytic subunit
MARTLLKQRGMSTVFWGELVVTTVYTLNRSSAKALNERTPYEAWHGHKLVISHLRVFGCLTFTKELDHIGKLDDRSTPGCSLATRRALKAYHILDPETQLVRNEHDILFDKGQRWAWDKVVDDDSTSTYDDFTVEYVHFEGARGVAILDLVFGWKAKRSMSFAVKLRYVLKLISAAAWVVILPVTYAYTWENPTGLARTIKSWLGDGQNQPSLYILAVVIYMAPNILASMLFLFPFMRRILESSNVKVITIMMWWSQPRLFVGRGMHEGAFSLFKYTMFWIILLAMKLIVEFFVVLLVGTQTM

SEQ ID NO: 54723 - protein, 530 aa, Zea mays
  Coding DNA Sequence Number=SeqID_12944
  Gene Ontology: Mol. function=1,3-beta-glucan synthase activity; Cellular component=1,3-beta-glucan synthase complex; Biological process=1,3-beta-glucan biosynthetic process
  Homolog annotation: Hit_ID=Q5Z5B8; Match level="QueryCoverage=75%, HitCoverage=20%, E-value=0.0, Identity=82%"; Hit description =Putative callose synthase 1 catalytic subunit
  Subcellular localization annotation: CTP_CleavageSite=63; ConfidenceScore=5.53e-01
MGRIGTAVRGGRARIRPSLGPRTFRMGSWVARSSGSRRQRGGRRRGGRRFRGGCWREAGGGVGAGKGRDRGGRRREDRRAGDGRAAILSRCIEWGETPPDFFFLSWCRDSNPGWLSRPLLWRVRLTSCTIKPLVQPTKDIMREPIRTFQWHEFFPHGTNNIGVVISLWAPIILVYFMDTQIWYALFSTLIGGIYGAYRRLGEIRTLGMLRSRFESLPEAFNERLIPSDANKSKGLRAAFSSRPKASGDESEREKRAARFAQMWNAIITSFREEDLIDNREKDLLLVPDCKDRELDIFQWPPFLLASKIPIALDMAADSGGKDRDLTKRIKSDPYFSFAIRECYASFKNIINTLVFGQREKDVLVQIFTVVDKHIEEETLITGLNMKNLPALSKKFVELLELLQKNKEEDLGQVVILFQDMLEVVTRDIMEEQDLLETLDSLHGANSRKHEGITPLDQQDQLFAKAIKFPVVESNAWTEKIKRLHLLLTVKESAMDVPINLDARRRISFFANSLFMDMPNAPKVRNMLPFS

SEQ ID NO: 54724 - protein, 70 aa, Zea mays
  Coding DNA Sequence Number=SeqID_12945
MDNGRHHTSQPHYPFTGASGILLLVYINNVTLTNNVNQDNLINLPSLAAPCPRVIAALVARDHVPTPNDL

SEQ ID NO: 54725 - protein, 557 aa, Zea mays
  Coding DNA Sequence Number=SeqID_12946
  Gene Ontology: Mol. function=1,3-beta-glucan synthase activity; Cellular component=1,3-beta-glucan synthase complex; Biological process=1,3-beta-glucan biosynthetic process
  Homolog annotation: Hit_ID=Q5Z5B8; Match level="QueryCoverage=99%, HitCoverage=28%, E-value=0.0, Identity=86%"; Hit description =Putative callose synthase 1 catalytic subunit
  Pfam annotation: Domain name=DUF605; Domain location=53-279; Score= -131.1; E_value=0.024; Accession=PF04652.6; Description=Protein of unknown function, DUF605
  Subcellular localization annotation: CTP_CleavageSite=35; ConfidenceScore=5.65e-01
MAAPGRRTADVSSSSPSPSPAAPSTGRRLLRTQTVANLGESIFDSEVVPSSLVEIAPILRVANEVEVENPRVAYLCRFYAFEKAHRLDPTSSGRGVRQFKTALLQRLERENDPTLKGRVHKSDASEMQRFYREYYRKYIQALQTVVNKDDRARLTKAYQTAAILFEVLRAVNDSQSVEVDQAILDTHIKVEEKKKLFLPYNILPLDPESTGEAIMRYPEIQAAVYALRNTRGLPWPKDQDKKPEEKNTGKDLLDWLQAMFGFQKDNVSNQREHLILLLANVHIRKIPKADQQPKLDDKALDDVMKKLFKNYKKWCKYLGRKSSLWLPTIQQEVQQRKLLYMGLYLLIWGEAANLRFMPECICYIYHHMAFELYGMLAGNVSPMTGENVRPAYGGDEEAFLTKVVTPIYKVIEKEAERSKTMKSKHSHWRNYDDLNEYFWSVDCFRLGWPMRADADFFKTPKDPYLNHLNGENRSAGNVHWMGKVNFVEIRSFWHIFRSFDRMWIFLILSLQAMIIIAWNGGTPSDIFDAGVFKKVLSIFISAAILKLGQVFAYILME

SEQ ID NO: 54726 - protein, 179 aa, Zea mays
  Coding DNA Sequence Number=SeqID_12947
MAPPVDVVGPRPRLGDVEAPPRSRSSLSSVAVVESEPLGRARRRPSAEARAESEPWGRAKRSSSSSGAEPKSEPWVGRSGPESEPWVGRSGVRRLLGLSPSPSSGSGGAEFAVFRGLAQVRALGRAKRSFLWCLRPGLTAYRPHSVEWHNSRCGAGGAVLLSGRSVERRSDCGHFGSVD

SEQ ID NO: 54727 - protein, 264 aa, Zea mays
  Coding DNA Sequence Number=SeqID_12948
MVDGGLFTNKLRDSKKMRCEGVSVEMSRWIRFVRSTTDQREVVLVLDLSRKIKINGLDPIIPGSTAKSGRHPYERQILDPAIAPTSDGQRVIFYLRTSASNNGESVYGMPSRRITRVRRGYNPPHASSNDREIRERKIMEACFTMALHRNEQPRTGVVQFGLQHAVKEPSPPIDEHARGTSQMPSAQRAEVAVSGPPASVVAEGEIGTQGKARKPLSDPFIDQVPAEQVYEAGQLTKSLSSRATNIEHIHEEGTKGNNVGQRRP

SEQ ID NO: 54728 - protein, 632 aa, Zea mays
  Coding DNA Sequence Number=SeqID_12949
  Gene Ontology: Mol. function=RNA-directed DNA polymerase activity; Cellular component=mitochondrion; Biological process=RNA-dependent DNA replication
  Homolog annotation: Hit_ID=UPI00004C1731; Match level="QueryCoverage =99%, HitCoverage=46%, E-value=0.0, Identity=81%"; Hit description =UPI00004C1731 related cluster
  Pfam annotation: Domain name=RnaseH; Domain location=237-364; Score =11.1; E_value=5.3e-06; Accession=PF00075.14; Description=RNase H
  Pfam annotation: Domain name=rve; Domain location=397-555; Score =87.7; E_value=3.7e-23; Accession=PF00665.16; Description=Integrase core domain
  Pfam module annotation: Pfam domain module=RnaseH::rve; Domain location=237-364::397-555
MLLGFIVSERGIEANPEKIAAITSMGPIKDLKGVQRVMGCLAALSRFISRLGERGLPLYRLLRKAECFTWTPEAEEALRNLKALLTNAPILVPPAAREALLIYVAATTQVVSAAIVVERREEGHALPIQRPVYFISEVLSETKIRYPQVQKLLYAVILTRRKLRHYFESHPVTVVSSFPLGEIIQCREASGRIAKWAVEIMGETISFAPRKAIKSQVLADFVAEWVDTHLPTAPIQPELWTMFFDGSLMKTGAGAGLLFISPLGKHLRYVLRLHFPASNNVAEYEALVNGLRIAIELGVRRLDARGDSQLVIDQVMKNSHCRDPKMEVYCDEVRRMEDKFYGLELNHIARRYNETVDELAKIASGRTTVPPDVVSRDLHQPSVKIDDTPESEAPSAQPEAPSARPETSLVQPEKAPGGYTHLLVTIDKFSKWIEVRPLNSIRSEQAVVFFTNIIHRFGVPNSIITDNGTQFTGRKFLDFCEDHHIRVDWAVVAHPMANGQVEHANGLILQELKPRIYNDLNKFGKRWMKELPSVVWSLRTTPSQATGFTSFFLVYGAEAILPTDLEYGSLKTRAYADQSNQASREHSLDQLEEARDKALLHSARYQQSLRRYHARGVRSRDLQVGDLVLRLR

SEQ ID NO: 54729 - protein, 611 aa, Zea mays
  Coding DNA Sequence Number=SeqID_12950
  Gene Ontology: Mol. function=ATPase activity, coupled to transmembrane movement of substances; Cellular component=integral to membrane; Biological process=transport
  Homolog annotation: Hit_ID=Q9LZB8; Match level="QueryCoverage=67%, HitCoverage=60%, E-value=1e-106, Identity=49%"; Hit description=ABC2 homolog 12
  Pfam annotation: Domain name=ABC_tran; Domain location=397-585; Score= 218.6; E_value=1.4e-62; Accession=PF00005.17; Description=ABC transporter
  Pfam annotation: Domain name=SMC_N; Domain location=389-591; Score= -109.6; E_value=0.0013; Accession=PF02463.9; Description=RecFRecNSMC N terminal domain
  Pfam module annotation: Pfam domain module=ABC_tran::SMC_N; Domain location=397-585::389-591
  Subcellular localization annotation: CTP_CleavageSite=54; ConfidenceScore=5.45e-01
MAVAPPLSTHVSRTLTSNLHLWPRTHGGVAHARTRALIPTPAAACAFRFSFRVRATASGSKLPPYPLPDVFPYITAEWEAVAKGWACAAVAVYCLSRAVPAAGRLPRALAGGGGGGGAAVVVAARGGVALAAFASARAAATYAQQAFLWEAALQAAGRLRERAFERLLERDLEFFEGRGGVAAGDIAHRITDEADDVADALFSVLNVLPSMLTVKANNGELKEIMRFQKLARADLKNNLSKKKMKALIPQAVRATYIGGLLVLCAGSIVVSGSSFDAEEFLSFLTALALVVEPIQDAGKAYNEYKQGQPALERIFDLMRFNPKKVLHVYPVSKWQKALVDCSFRNKGYWMKGMVTDKPRAIHLQSINGDIKFHDVTFRYVDDMPPVADGVNLHIRPGEIIALVGPSGGGKTTLAKLLLRLYHPQKGYILLDNHDIQDIQSQCLRTHIAFVSQDTMLFSGTIAENIAYRDPVGDIDMNRVEYAAKIANAEEFIKMLPEGYNSNVGQRGSSLSGGQKQRLSIARAIYQNSSILIMDEATSALDIRSELLLKEALSNLIAKHSVTVIIIAHRQEMVLMADRIISLERGELREMSKQAFLSQDGHFSLPRIRSPN

SEQ ID NO: 54730 - protein, 112 aa, Zea mays
  Coding DNA Sequence Number=SeqID_12951
MGDVGRSDGRQAVKRAGVRYVDADAIAGPGRACRRRRGQYDCMSFVDKKKEKGKHGLYVAKPNMFRSFGDPSTSIQRIRIRIQITSDTNTNTGVFGCNTDNRVSNTELVGHG

SEQ ID NO: 54731 - protein, 64 aa, Zea mays
  Coding DNA Sequence Number=SeqID_12952
MAPPSLVGAPPIFTVYFIHLFGVMLILAMVCIVLMRVDEQATVETEVQQVEVAEQELIEGKLCP

SEQ ID NO: 54732 - protein, 304 aa, Zea mays
  Coding DNA Sequence Number=SeqID_12953
  Homolog annotation: Hit_ID=Q9LLI1; Match level="QueryCoverage=38%, HitCoverage=13%, E-value=2e-57, Identity=77%"; Hit description =Cellulose synthase-9
MDSLEKALLVYNDMCREGVTLDDTVFVAALGACAHGGLLQEGWSIFNQMVEYCRIVPRMEHYGCIVDLLGRAESRTSSETSEFARKWVPFVKKYNIEPRAPEWYFSQKIDYLKHKVHPSFVKDRRAMKREYVEFKVMVNGLVAKAQKVPEEGWIVQDFTPWPGNNTRDHPGMIQRPGFQHHKKAGAMNALVRVSAVLTNGQYRAFWRLSDGSQRISMEVVLEMLMEVEATTYTFTFDDHILAINRHDYYRCSFQYYYCNLEDGEYVLIQELEAQQEEAREPALELVAEEPSAAPSFEGKPQLYA

SEQ ID NO: 54733 - protein, 436 aa, Zea mays
  Coding DNA Sequence Number=SeqID_12954
  Gene Ontology: Mol. function=DNA binding; Cellular component=nucleus; Biological process=regulation of transcription
  Homolog annotation: Hit_ID=Q53PP7; Match level="QueryCoverage=93%, HitCoverage=84%, E-value=1e-129, Identity=61%"; Hit description =Expressed protein
MEGNDLPPGNMLQGAPYDSLDLHGDSMAKHAPNSGKQIFSSSQMPGTFTMSMTRATEPDDFPGFQFKEHGKSDDHHHHQYHSHHQKNCMSDGEEHDMAEDATDTPSGKGKKGSAWHRMKWTDSMVKLLITAVSYTGDDHGADSGGGRRNIAITQKKGKWKAISKVMGERGCHVSPQQCEDKFNDLNKRYKRLIDILGMGTACNVVANPALLDSMNHLSDKMKDNAKKILSSKHLFYEEMCSYHNNNRANLPEDHALQHSLLLALRCKEEHDLRRASGDADEDDRSADSDYGENDEEQYPVHTRMREPSTTKRKRHRDVALVTSNSHEGSERSDPHDVTVDINKAFTDATNMVLLQQDLASQAIEIQKRRLQIEAKELELTKQRHKWERFRKKKDREIERMALENEHMVIENKRLELELRHKELELELKLKGKGNHP

SEQ ID NO: 54734 - protein, 58 aa, Zea mays
  Coding DNA Sequence Number=SeqID_12955
  Subcellular localization annotation: CTP_CleavageSite=37; ConfidenceScore=5.23e-01
MPAARSTITVELPAVSVAQRAIVRRSCPVPPLARLAVCSALWCSCAGAMPMAESARPS

SEQ ID NO: 54735 - protein, 377 aa, Zea mays
  Coding DNA Sequence Number=SeqID_12956
  Pfam annotation: Domain name=zf-CCHC; Domain location=97-114; Score =11.0; E_value=0.015; Accession=PF00098.13; Description=Zinc knuckle
MGQQEEPTSSKLYAFACDGHKKMKGKKKAPSSSEEEEEEEDDDDERDQPSTSSFEDEETVRRDKKVMGMIHKINLMDVPLQVEDLLFNIDMKKQRKRVCFACGEKGQFRDKCPNMVEPTKRGAKARHSQVSRLGMILQVNMILQGIAATGLHHALHGYLTNALWQEVAHLEQKRWSCEGTTEAQGIDRATVVELRLHRRNSGERGPGRPKGLGANRRVFQVAGDSAELTGATDTAGSSTATVEQAAGVGRRWRGSSRARRARERARGFGRVRKLERGGGRAGRGAQKRHGGADVAGEHAHVGASTAGDRGREVRDELIGANGGTEREGAGAREGNSADRSVPPSSERERGGVSALRFAPTGGPRLSGTGGGRARGLG

SEQ ID NO: 54736 - protein, 75 aa, Zea mays
  Coding DNA Sequence Number=SeqID_12957
MVGTSAVTARWQPGSVEHCTLQDMVDGVTWPTTLPSGWTVEWDAAQQERSRRSSGLGLALFLTFDDINYPLQSIL

SEQ ID NO: 54737 - protein, 60 aa, Zea mays
  Coding DNA Sequence Number=SeqID_12958
MGMGYRKFAIRRESDLKKVVEVVSELQSGGLVQWNFAAKLRELGRAFVKLFPSSVWDMEG

SEQ ID NO: 54738 - protein, 103 aa, Zea mays
  Coding DNA Sequence Number=SeqID_12959
MAGGAELAGVGVLLGKGLLQQLLQRRGRPIVVQGTPPVGERGSNASQAPPLAEAGSKSPAAPAPGADAPAPREGGGATSPSGWTGQSLGDKAEAPQDKRTRKE

SEQ ID NO: 54739 - protein, 54 aa, Zea mays
  Coding DNA Sequence Number=SeqID_12960
  Subcellular localization annotation: CTP_CleavageSite=30; ConfidenceScore=5.06e-01
MGLGVFGSFCRGWFAPWGGVRSSKTMMSCRCGLAANPQSAACEGRVLLRFVFTL

SEQ ID NO: 54740 - protein, 109 aa, Zea mays
  Coding DNA Sequence Number=SeqID_12961
  Subcellular localization annotation: CTP_CleavageSite=62; ConfidenceScore=5.58e-01
MESTLLVNPRWSTYMRVSLPFGSHKNQPNPFTLSLCSARVTRELCYRPPTSTARSTVAVELPAASVAPPELRHRRPEASLRLRRCTVTPAFPLKPLDLGHPSEIGRFKP

SEQ ID NO: 54741 - protein, 72 aa, Zea mays
  Coding DNA Sequence Number=SeqID_12962
MSRAFDDYYIKDCGVISAPELGSKSIGSGCCIAFSGAVASSPTPTTPSRFTRGEEADSAAEEEGSKNAADES

SEQ ID NO: 54742 - protein, 102 aa, Zea mays
  Coding DNA Sequence Number=SeqID_12963
MVVAPWVRLNKEYMYKSRKSLIRLSHQIMQYIKREREGRRMVCQRDNMVFNGHHCVSFQENNGEEGEERKRQGASWGTDGLQTPSMATLERIMGEGVMEQKR

SEQ ID NO: 54743 - protein, 916 aa, Zea mays
  Coding DNA Sequence Number=SeqID_12964
  Gene Ontology: Mol. function=kinase activity; Cellular component =proton-transporting two-sector ATPase complex; Biological process =ATP synthesis coupled proton transport
  Homolog annotation: Hit_ID=Q9LIW7; Match level="QueryCoverage=94%, HitCoverage=93%, E-value=0.0, Identity=66%"; Hit description=Similar to an Arabidopsis thialiana chromosome BAC genomic sequence
  Pfam annotation: Domain name=DUF827; Domain location=109-449; Score= -114.4; E_value=0.064; Accession=PF05701.2; Description=Plant protein of unknown function (DUF827)
  Pfam annotation: Domain name=Filament; Domain location=458-730; Score= -184.6; E_value=0.098; Accession=PF00038.11; Description=Intermediate filament protein
  Pfam module annotation: Pfam domain module=DUF827::Filament; Domain location=109-449::458-730
  Subcellular localization annotation: CTP_CleavageSite=74; ConfidenceScore=5.87e-01
MDVAIGRSGPNESPVSRGRPSTPSSNHRPSTPSSNHRPSTPGGTRRSSVGTPSTPRSRSNGAGPFKSEPNSPPSAAAQKPRLSFDRSPRSGDTKPVVERRVPKIGTTPEKHLRREAELQARLESAQEDLKKAKDQLAFILGERDRLVGELNEAKRVADETHEKLQDALMAKRWAEEATEIEKFRADELEQAGIDEAQRREDEWQREIECVRGQHAADLESLVNTTEEVERLRRDLSMANEAKKAALGHADDAMKIAEVNAEKVEILSNEVVRLKGLLDSSAASEESKSREAELLVKNLESEVSSLKGKLEEAKVLEDRLADAEKMIEELKSEIANAQKVEEDIRQQLEEWKQKSVSLEMKLEEVTLSEKFKSDSLVSTTEELYKIQSILQDRESEIEVLKGKTTALEIEVTRLLADVTDSNEHLDASQQEVFGLQTTIDVLKNKLEAAELAASEALDNERTATTKIEVLTEEKTNLISELDDARDREEREKRAIEDLTAALDKVTGEAQEAHDRCQKKEDDYEHALAQIGDLKMALKSMEETYEVMLDESEQDITGLRETVEKLEAEVSKYREECESKELDLITATKQSEQEIAALKEEAEHVCASLRGAEQELEAVNEEKERLEGKLARTESAVAEANDAVQEAKAENERLQEKLAHVESEVAEANMAAEESKNEIERLQEKLTYTESAVAEANKTVQEAKAESSQLKERLLDKENALQSITQENDEFRMREADAMKKIEELSALLAEAMTKKHPEEEEKLVVVDEAHNSGREAIRSVAENEDTEETDHKKPKLEADAVDTNSNGEPKHDEKDDSKVEEEELKTELSLQESDRASSEKEAQSENRRQETEPSNDELDPKKDSSTESANGTAVPEDTAATTTKAATSPTKPQQPQQKKNKPLLKKFGSLLKKKNSK

SEQ ID NO: 54744 - protein, 71 aa, Zea mays
  Coding DNA Sequence Number=SeqID_12965
MAVMGSTSNKRYLCQVLDFGIENDKYETRLIPERPTCNGSGEMARVACTLRGKRLDGGVSVLSVGVNPVWS

SEQ ID NO: 54745 - protein, 203 aa, Zea mays
  Coding DNA Sequence Number=SeqID_12966
  Pfam annotation: Domain name=DUF295; Domain location=126-185; Score =25.7; E_value=0.00017; Accession=PF03478.8; Description=Protein of unknown function (DUF295)
MLAPPVLEMSMETEHDVRPMPPVLGRRLEQFPYGGMVLATDVCYRHPCHLVDPFTGSRAPLPDLPIPFSEKEPVGCFSDEPRLLCARVTDDGTRFSWCHRAGDSDSVVFTKAYRARHRDSQRPPRWRPVLDIGDRAVFVDGAHGFTVTADPTGAKANRVYVILAHQLTHPCGRLAVAYDVGFTDLTRPERMGRLNLNTGEVEP

SEQ ID NO: 54746 - protein, 156 aa, Zea mays
  Coding DNA Sequence Number=SeqID_12967
  Subcellular localization annotation: CTP_CleavageSite=63; ConfidenceScore=5.06e-01
MWWRPLMRSLLRLCLAPWPTRRWCQSRCGSTRQGEVTVKLSVVPGRASRLALSRLPWPGRLARASYSGDQPHHRPPTFHVIVDSDYVWVRFLPCSSRYSTVHEKRGNIASPASQARTSLHVRMRTTNHEVRVAAGMSAGGSFVHVHSENGVIDFYR

SEQ ID NO: 54747 - protein, 120 aa, Zea mays
  Coding DNA Sequence Number=SeqID_12968
MARWVLLCLGRAPGTLGRHGHSPIIPEARRREGPIWCSDFIVVRDRSGAPALPPVRDRSGAPTLNFSVLVLHAGKKDGISTFLPTQARSQVDIEIKLIAPVPTSDASSITPCVSLSAFLK

SEQ ID NO: 54748 - protein, 53 aa, Zea mays
  Coding DNA Sequence Number=SeqID_12969
  Subcellular localization annotation: CTP_CleavageSite=30; ConfidenceScore=5.01e-01
MGTVVPGPSHRARWAGTGTARLSRKHVVVRDRSGAPALPPVRDRFGAPTLGLK

SEQ ID NO: 54749 - protein, 472 aa, Zea mays
  Coding DNA Sequence Number=SeqID_12970
  Gene Ontology: Mol. function=pyridoxal phosphate binding; Cellular component=chloroplast; Biological process=cysteine biosynthetic process from serine
  Homolog annotation: Hit_ID=Q9XEA9; Match level="QueryCoverage=99%, HitCoverage=100%, E-value=3e-83, Identity=78%"; Hit description =Cysteine synthase
  Pfam annotation: Domain name=PALP; Domain location=39-450; Score =246.8; E_value=4.5e-71; Accession=PF00291.15; Description=Pyridoxal -phosphate dependent enzyme
MEAGAGRRGIPSLLKSPAARADESGGATSPQQEHIASDITQLVGWTPLVELKRIAQKDNVDARVVGKLECYQPLCSVKDRSALRMIEDAEERGLISPGATTLVEPTSGNMGIALAYIDLARGYRFVAVMPAEYSLDKQILLRYLGADLVLTDPALGFQGQLDKLEQLRKEIPNAHVLDQFANAANPEAHFRWTGPEIWKDTAGKVDIFVAGSGTGGTVSGVGRLTGSRSPRGRRLDNDQSAAGQQRVDGRRLDNDESAAGGWTTCESASRRLDFGRRWGEGPATYGSAPAVRRSGLRAPGERRCELQRCSGVWAWAAPPPRLAAAGAGGYRIEEGSPVGDPPLYLKTKNPAVKVVCVEPAESPVISGGKPSRHKIQGVGPGFVPKNLDTSVTDEIVTVTAEDAMANARRLAREEGLLVGISSGANLAACLKVASRQENRGKMIVTVFPSGGERYMSSDLFADAREECVAMTF

SEQ ID NO: 54750 - protein, 354 aa, Zea mays
  Coding DNA Sequence Number=SeqID_12971
  Gene Ontology: Mol. function=pyridoxal phosphate binding; Cellular component=chloroplast; Biological process=cysteine biosynthetic process from serine
  Homolog annotation: Hit_ID=Q5VND2; Match level="QueryCoverage=99%, HitCoverage=100%, E-value=1e-149, Identity=75%"; Hit description =Putative cysteine synthase
  Pfam annotation: Domain name=PALP; Domain location=36-332; Score =339.5; E_value=5.8e-99; Accession=PF00291.15; Description=Pyridoxal -phosphate dependent enzyme
MDGEEVGRRGIPTLLKPSSSSSDGSAGEQEHIASDVTQLIGWTPLVELKRIASEAGIDARIVGKMEAYQPLCSIKDRSALRMIEDAEERGLISPGVTTLVEPTSGNMGLGLVLFAIQRGYRLIAVMPAKYSLDKQILLRFMGAELYLTDPALGFPGMFDKVEQLRKQLPNVHVLNQVTNKANSEAHFRLTGPEIWKDTAGKVDVFVAGSGTGGTVSGVGKYLKMQKPGVKIICVEPAESPVISGGAPGKHKIQGVGPGFLPEVLDTSVIDETVTVSTEEAMANARRLAREEGLLVGISSGANLAACLKLPWLKVASRQENKGKMIVTVFPSGGERYINSDLFADVREECIAMTF

SEQ ID NO: 54751 - protein, 203 aa, Zea mays
  Coding DNA Sequence Number=SeqID_12972
MPPKLTSEESVAVVVGRRRKNWEHILAFTSITTVPPSPSPVNLAAAPAPDILASALALREWKAPFREPPRPRPPSSGSPRSNSMGLAPRRCEIGHPPPTPSPAIQGCYAPILAPPRHRCLFPARVMPVVVPRPSVPIHRCGMEPKLSSVGVRDLRRVVIPTPVLVVLLDARHDLHRVIIPTPVRTPYPQHRSASRTRSMRLSI

SEQ ID NO: 54752 - protein, 84 aa, Zea mays
  Coding DNA Sequence Number=SeqID_12973
  Gene Ontology: Mol. function=lyase activity
  Homolog annotation: Hit_ID=Q5VMX8; Match level="QueryCoverage=72%, HitCoverage=50%, E-value=1e-25, Identity=88%"; Hit description =Lactoylglutathione lyase-like
VDSGLEQAQTFELKVLYVDQLCNLASQRVYSSMLSFTVPDINSAVSKLMALGAELDGPIKYEIHGKVAALRCIDGHMLGLYEPA

SEQ ID NO: 54753 - protein, 274 aa, Zea mays
  Coding DNA Sequence Number=SeqID_12974
  Pfam annotation: Domain name=DUF295; Domain location=180-239; Score =21.6; E_value=0.0018; Accession=PF03478.8; Description=Protein of unknown function (DUF295)
METEHGGHEEESAMLPCVAFASEHGYKFFSLAHMRMLNSADVRPMPPVLGRRLVPSPYGGMVLATDVCYRHPCHLVDPFTSSRAPLPDLPIPFSEKEPVGCLSDEPRLRCARVTDDGLGVGLARTKIPAPPGFGDVDYAYLAPSTDDAILLVHRAGDSDGVVFTKAYRARHRDSQRPPRWRPVLDIGDRAVFVDGAHGFTVTADPTGAKANRAYVILAHQLTHPCGRLAVAYDVGFTDLTRPERMGRLNLNTGEVEPMWGRPHWIIPWNESGRR

SEQ ID NO: 54754 - protein, 84 aa, Zea mays
  Coding DNA Sequence Number=SeqID_12975
  Gene Ontology: Mol. function=lyase activity
  Homolog annotation: Hit_ID=Q5VMX8; Match level="QueryCoverage=94%, HitCoverage=71%, E-value=4e-24, Identity=66%"; Hit description =Lactoylglutathione lyase-like
MAAATLRWVLQLHRDVPRAARFYSEGLDFSVNVCTLRWAELQSGPLKLALMHTNYSKTSPFLGEDLVPDIESERALQAEVDSGL

SEQ ID NO: 54755 - protein, 207 aa, Zea mays
  Coding DNA Sequence Number=SeqID_12976
  Gene Ontology: Mol. function=pyridoxal phosphate binding; Cellular component=chloroplast; Biological process=cysteine biosynthetic process from serine
  Homolog annotation: Hit_ID=Q9XEA9; Match level="QueryCoverage=92%, HitCoverage=53%, E-value=8e-75, Identity=73%"; Hit description =Cysteine synthase
  Pfam annotation: Domain name=PALP; Domain location=39-207; Score= -6.6; E_value=2.6e-08; Accession=PF00291.15; Description=Pyridoxal -phosphate dependent enzyme
MEAGAGRRGIPSLLKSPAARADESGGATSPQQEHIASDITQLVGWTPLVELKRIAQKDNVDARVVGKLECYQPLCSVKDRSALRMIEDAEERGLISPGATTLVEPTSGNMGIALAYIALARGYRFVAVMPAEYSLDKQILLRYLGADLVLTDPALGFQGQLDKLEQLRKEIPNAHVLDQFANAANPEAHFRWTERLPEATIGGAPRI

SEQ ID NO: 54756 - protein, 226 aa, Zea mays
  Coding DNA Sequence Number=SeqID_12977
MHATNISYTELLTASAILKFNLNVEFEDILEKRFRFAVPVRTFGVVYLFLSRFFLAAEDREGRAAARNIDDREAPSSATPSAILPDGILAARTKKRGLHSIPSISAYLYVQFQVEKGLKDMVHIVATKTEIKNKWDKLKEFKAWKKLMRQTCTGHSKLWELQNMEELEICFGSITSIGFDHWSPHMATASTIAEQGGTPHEAINCDTQEDGDTNECEVSPVNPNGK

SEQ ID NO: 54757 - protein, 704 aa, Zea mays
  Coding DNA Sequence Number=SeqID_12978
  Gene Ontology: Mol. function=ATPase activity, coupled to transmembrane movement of substances; Cellular component=integral to membrane; Biological process=transport
  Homolog annotation: Hit_ID=Q9M1C7; Match level="QueryCoverage=99%, HitCoverage=56%, E-value=0.0, Identity=53%"; Hit description =Multidrug resistance-associated protein 9
  Pfam annotation: Domain name=ABC_membrane; Domain location=181-410; Score=-2.3; E_value=0.0015; Accession=PF00664.13; Description=ABC transporter transmembrane region
  Pfam annotation: Domain name=ABC_tran; Domain location=482-665; Score= 141.9; E_value=1.7e-39; Accession=PF00005.17; Description=ABC transporter
  Pfam module annotation: Pfam domain module=ABC_membrane::ABC_tran; Domain location=181-410::482-665
MSGGQKQRIQIARSVYEDADIYLFDDPFSAVDAHTGSQLFKDCVMGILKDKTVLYVTHQVEFLPAADLILVMQDGKIVQKGKFDELLQQNIGFEAIVGAHSQALESVINAESSSRIQSGNQKSADSEDEFDTENETDDQLQGITKQESAHDVSQDISDKGRLTQEEEREKGGIGKKVYWTYLRAVHGGALVPVTIAAQSFFQIFQVASNYWMAWASPPTTATTPTVGLGLLFSVYIALSMGSALCVLFRSLLVSLIGLLTSERFFKNMLHCILRAPMSFFDSTPTGRILNRRYYIPTARELARLSQIQRAPILHHFAESLAGASSIRAYAQKDRFRKANLGLVDNHSRPWFHNVSAMEWLSFRLNMLSNFVFAFSLTLLVSLPEGFINPSIAGLAVTYALNLNSQLASIIWNICNTENKMISVERIMQYSRIPSEAPLIVDHYRPPNSWPDAGTINIRSLEVRYAEHLPSVLRNISCTIPGRKKVGIVGRTGSGKSTFIQALFRIIEPRGGTIQIDNVDILKIGLHDLRGRLSIIPQDPTMFEGTVRGNLDPLNEYPDHRVWEILDKCQLGDIVRQNPKKLDSIVVENGENWSVGQRQLFCLGRVLLKRSNVLVLDEATASVDSSTDAVIQGTIREEFRKCTVLTIAHRIHTVIDSDLILVFSEGRIIEYDTPSKLLENESSEFSRLIKEYSRRSHGFSGTANN

SEQ ID NO: 54758 - protein, 413 aa, Zea mays
  Coding DNA Sequence Number=SeqID_12979
  Gene Ontology: Mol. function=ubiquitin-protein ligase activity; Cellular component=ubiquitin ligase complex; Biological process =protein ubiquitination
  Homolog annotation: Hit_ID=Q6ZGX9; Match level="QueryCoverage=99%, HitCoverage=99%, E-value=1e-137, Identity=62%"; Hit description =Putative immediate-early fungal elicitor protein CMPG1
  Pfam annotation: Domain name=U-box; Domain location=3-78; Score=68.5; E_value=2.1e-17; Accession=PF04564.6; Description=U-box domain
MEEPPQLFLCPISMELMEDPVTVLTGVTYDRSSIERWFFKYGKATCPATMQRLNSFDLTPNHTLKRVISTWLDHASSPSSSSSSTPLCNKLEREKLPSVFASIEATPFKVTALKNLRRCMDGDVAAQKDFVAYGGIQVLGRVMTQALAESCAGGDFSSFRTCEEAGAVLATLPLSDDASVELVLKPECMKPVVAVLQRGSAESRLHAMAILAKISRAIGADRDWTPGVDVDDLVKSLLELLSDGASAKLSYRALDVLLDVTARSRGARRAKAVEVGAVCVLVELLPDAERRIAERALLLLKRLCKCPEGRLAFVEHALAVSAVAQTLLRVSRLASGLAVSVLWLVACAVTPAERVLDDMLMSGGVAKLLALLQVENSASTKEKAAKLLSVHGAFWRQYPCFPTDLRDYLKFLN

SEQ ID NO: 54759 - protein, 477 aa, Zea mays
  Coding DNA Sequence Number=SeqID_12980
  Gene Ontology: Mol. function=transferase activity, transferring glycosyl groups; Cellular component=nucleus; Biological process =biosynthetic process
  Homolog annotation: Hit_ID=UPI0000E48E72; Match level="QueryCoverage =82%, HitCoverage=99%, E-value=1e-98, Identity=48%"; Hit description =PREDICTED: similar to Alg2 protein
  Pfam annotation: Domain name=Glycos_transf_1; Domain location=266 -450; Score=182.1; E_value=1.4e-51; Accession=PF00534.10; Description= Glycosyl transferases group 1
GFRWVDPIASGSAEAHEAFVKDVEDGENEGWGCSGGVGAGMAAVVAMHPCQTEDGGGQGQSMGGAWWHQQVQKGVAVAARMQHILPHYGQGGAERLIVDAACQLAAHDHDVHVFTSHHDKKRCFEETLSGLFPVTVHGDFLPRHVFYRFHAVCAYLRCIFVALCVLLRWPFFDVILVDQVSVVIPLLKLMASSKIIFYCHFPDLLLAQHTTMLRRLYRKPIDMIEESTTGMADLILVNSKFTAATFARTFSGLHARGIEPGVLYPAVSVEQFHEPHAYKLNFLSINRFERKKNLDLAISAFALLRSAAWTLPGDALQEATLTVAGGYDKRLKENVEYLEELKRLALTEGVSGQVNFVTSCSTSERNELLSNCLCVLYTPKDEHFGIVPLEAMAAHKPVIACNSGGPVETVVNEVTGFLCDPSPAEFSKAMLKLVNDHDLAVRLGEQARDHVVQKFSTKTFGDLLNSYVLNIYHERME

SEQ ID NO: 54760 - protein, 106 aa, Zea mays
  Coding DNA Sequence Number=SeqID_12981
MEKRRNTDRAAGSYEQGREGEEKGRNYRGEGEAREADKMGREEFEFDAFFNPVGGGMEKDVRLQILTRGPRYFRAHESVSQASYMIVTGPGRHRRKRDRSTGREEL

SEQ ID NO: 54761 - protein, 347 aa, Zea mays
  Coding DNA Sequence Number=SeqID_12982
  Gene Ontology: Mol. function=DNA binding
  Homolog annotation: Hit_ID=O82166; Match level="QueryCoverage=36%, HitCoverage=44%, E-value=1e-45, Identity=75%"; Hit description =Putative AT-hook DNA-binding protein
  Pfam annotation: Domain name=DUF296; Domain location=111-229; Score =204.3; E_value=2.8e-58; Accession=PF03479.5; Description=Domain of unknown function (DUF296)
MAGLDLGTAATRYVHQLHHLHPDLQLQHNYAKQPEPSEDDPNGGGGGNSNNGGPYGEHDGGSSSSGPAGDAPGGSGGNGEMVVRRPRGRPPGSKNKPKPPVIITRESANTLRAHILEVASGCDVFESVSTYARRRQRGVCVLSGSGVVTNVTLRQPSAPAGAVVTLHGRFEILSLSGSFLPPPAPPGATSLTIFLAGGQGQVVGGNVVGALYAAGPVIVIAASFANVAYERLPLEEEEAQAAPPGLQMQPPGGGVDGAGGMGGGPFPPDPSAAAGLPFFNLPLNNMSGGGSPLPPGADGHGWAGLREHEDIKKKAMDGTMVKGGLQKVQLIVFELYKGVTCLCVQQQ

SEQ ID NO: 54762 - protein, 58 aa, Zea mays
  Coding DNA Sequence Number=SeqID_12983
MAAAGEVAGASSGTRTKRLKIAVIHPDLGIVALPRFGFSYSFIGLSLTHLSSKSKSKE

SEQ ID NO: 54763 - protein, 236 aa, Zea mays
  Coding DNA Sequence Number=SeqID_12984
  Gene Ontology: Mol. function=ATPase activity, coupled to transmembrane movement of substances; Cellular component=integral to membrane; Biological process=transport
  Homolog annotation: Hit_ID=Q8GU62; Match level="QueryCoverage=85%, HitCoverage=17%, E-value=1e-34, Identity=67%"; Hit description=MRP -like ABC transporter
MERGGLHYWPALAGILPNKQVQQLFIQGGFLDDPSGSTILHHMQEWQDLYSPCFWMVTFALIQLMFIMSILAQFLFKKFRWWRQRLKGSAPESNKQHQEHKITDIKLDISYKACKACCLLILGSHVLRAVFLQLHERISDCKYPPFIICEVRGKTGIRFTDSSVTEALLNPSVGQQAEVKRPCPYGRANILELVTFSWMNPVFSIGYKKPLEKNEVPDVDGKDAAEFLSDSFKKII

SEQ ID NO: 54764 - protein, 283 aa, Zea mays
  Coding DNA Sequence Number=SeqID_12985
  Gene Ontology: Mol. function=protein binding; Cellular component =nucleus; Biological process=chromosome segregation
  Homolog annotation: Hit_ID=Q84Z07; Match level="QueryCoverage=89%, HitCoverage=90%, E-value=1e-115, Identity=72%"; Hit description =Putative WD repeat protein
  Pfam annotation: Domain name=WD40; Domain location=183-234; Score =18.7; E_value=0.021; Accession=PF00400.22; Description=WD domain, G -beta repeat
  Pfam annotation: Domain name=WD40; Domain location=66-104; Score =33.3; E_value=8.5e-07; Accession=PF00400.22; Description=WD domain, G-beta repeat
  Pfam module annotation: Pfam domain module=WD40::WD40; Domain location=183-234::66-104
MHGVEITNEVLKSVKIGLTFQGCLKTINSKKYGVELVCFTDNPNIVLYSSKNGWDESLRLLSLNDNRFLRYFKGHLDRVVCISFCSEKENFLSGSLDRTVLLWDQRAEKSQGLLRVQGRPAVSYDDQGMVFAVAYGGHIRMFDARKFEKGPFEIFSVGNNDSEAHVIKFSSDGRRILLTTKAGRVHVLDSFHGNSIASCNVKPVVTNSTLEASFSPDGNHIISGSGDGSVYAWNVRSGKVARWGSTDDEPPLIRLFALCRYDAMPVFSSGDAPIYDLPSSLAQ

SEQ ID NO: 54765 - protein, 552 aa, Zea mays
  Coding DNA Sequence Number=SeqID_12986
  Gene Ontology: Mol. function=polynucleotide adenylyltransferase activity; Cellular component=nucleus; Biological process=RNA polyadenylation
  Homolog annotation: Hit_ID=Q5Z7G3; Match level="QueryCoverage=88%, HitCoverage=65%, E-value=1e-152, Identity=57%"; Hit description =Putative poly(A) polymerase
  Pfam annotation: Domain name=NTP_transf_2; Domain location=69-154; Score=19.2; E_value=0.0011; Accession=PF01909.13; Description =Nucleotidyltransferase domain
  Pfam annotation: Domain name=PAP_RNA-bind; Domain location=356-499; Score=83.0; E_value=9.3e-22; Accession=PF04926.5; Description =Poly(A) polymerase predicted RNA binding domain
  Pfam annotation: Domain name=PAP_central; Domain location=6-355; Score=490.6; E_value=1.8e-144; Accession=PF04928.8; Description =Poly(A) polymerase central domain
  Pfam module annotation: Pfam domain module=NTP_transf_2::PAP_RNA -bind::PAP_central; Domain location=69-154::356-499::6-355
MASQPKKISSEPISLVGPTPADIEATAQLEKLLREAGMYESAEESAVRAEVLRDLQGIVDLWVKQLMLKHGYPDAMVDEATAFVLPFGSYRLGVLGGGSDIDALVVGPSFVDRDQDFFGVLAGVLAETEAVTELHPVPGAHVPVMKLRFRGVQVDLVYASVNLPVVPRNLDLSDRHVLRGLDHVTARSMNGVRVADEIVRLVPDAAAFRTTLRCVKLWAKSRGVYSNVSGFLGGVAWAILVARVCQLYPNAVPSMLVSRFFKVFSHWRWPIPVMLCDIEHDDELGLPVWDVRRNLPDRSHLMPVITPAYPCMNCTYNVSRATHRVIKEQIQAGDVACQKIAAGGGRDWGALFQPSPFFSTHKSYLQVDAAVAGGAEELREWKGWVESRLRQLVAKVERDTFGELLCHQNPRAYDAEPHGLRRASSFFVGLSKPQQQHKPHPPEGYPPFFDLRATVLEFQQDVYSYKFWRPGLELVVKHVRRNKLPAYVMQKIGGRNIHELKRKRADDDSSPSSPPLCSSSSASSGDGDSVQGPSSRAELHPRKAMLFDPSPS

SEQ ID NO: 54766 - protein, 56 aa, Zea mays
  Coding DNA Sequence Number=SeqID_12987
MMMSALILHGELLLMSSNDASECRICGGSGLDYCLRCHGTGEYREPMGFHFTVQRK

SEQ ID NO: 54767 - protein, 113 aa, Zea mays
  Coding DNA Sequence Number=SeqID_12988
MSMSYPVLSLASCTTWAIKVEVILNAQGFLDCVSPLSDGKDGEALDNYARKVNGMAKKFVGLGSTLDDVAMEHFARDCHKPKEEVMADTVDDKEEQTMLWRLEVGDAGFRVMA

SEQ ID NO: 54768 - protein, 312 aa, Zea mays
  Coding DNA Sequence Number=SeqID_12989
  Homolog annotation: Hit_ID=Q8S7W2; Match level="QueryCoverage=17%, HitCoverage=29%, E-value=4e-22, Identity=92%"; Hit description =Putative endonuclease
  Subcellular localization annotation: CTP_CleavageSite=64; ConfidenceScore=5.07e-01
MTDRRRQGLERTQPNPQKDRAQEGGSVAGGAVHGARQGRCASASASRARVNKTGVAVPVPRRVRNRAGVGTTTRRTERDGSCVFLGAGRQQMERRDGACSAACRWRTPHPARLALPRGNLGARSPQRQSRCPPPPHNTPVSHAIRPRPSRLDLIGLALVAGAKGKGEEEPGGVRSSKMLQLLMAAAFSAAPLTLYVPPVRSLILFVEAMEVVCRDCGPYSHDVVAHFRVALSRVLAGLAQPISGRLRWIDLKATRLRYPNLSSYRRVHTVGFQDGTWILLNFLPMEMSGEGQIQGAAKSNEVDISEWRQSSK

SEQ ID NO: 54769 - protein, 126 aa, Zea mays
  Coding DNA Sequence Number=SeqID_12990
  Pfam annotation: Domain name=GRP; Domain location=31-113; Score= -26.0; E_value=0.035; Accession=PF07172.2; Description=Glycine rich protein family
MGKSKKGGSSSHHSGDKRKPEPTPPSEDFGDSERLLGDCREVWTYIRAVERTGLEGSDESEYSSDEENSSDPSEEGSGGDGSDGNDDGGDGDGGGGKGGGGNGKGGSGDGDDGSKGSSNGSNKASG

SEQ ID NO: 54770 - protein, 130 aa, Zea mays
  Coding DNA Sequence Number=SeqID_12991
MGVEFGCRGPHGDDPRQWRRHEQANEDPGVQQVKSAEQELVEGVDRPIPTTPAVEPYLAVTARTSRSQPRPSPDLPRCRMHISYSLHSIDCNLVDGEYILVPEQGVAQEVAPDPAPEPAPALEGKPRFYA

SEQ ID NO: 54771 - protein, 812 aa, Zea mays
  Coding DNA Sequence Number=SeqID_12992
  Gene Ontology: Mol. function=protein dimerization activity; Cellular component=chromatin; Biological process=electron transport
  Homolog annotation: Hit_ID=Q2QPA8; Match level="QueryCoverage=85%, HitCoverage=87%, E-value=0.0, Identity=69%"; Hit description=HAT family dimerisation domain containing protein
  Pfam annotation: Domain name=DUF659; Domain location=249-401; Score =207.3; E_value=3.6e-59; Accession=PF04937.6; Description=Protein of unknown function (DUF 659)
  Pfam annotation: Domain name=hATC; Domain location=600-691; Score =50.0; E_value=7.8e-12; Accession=PF05699.5; Description=hAT family dimerisation domain
  Pfam annotation: Domain name=zf-C2HC_plant; Domain location=41-97; Score=91.6; E_value=2.4e-24; Accession=PF07567.3; Description =Protein of unknown function, DUF1544
  Pfam module annotation: Pfam domain module=DUF659::hATC::zf-C2HC _plant; Domain location=249-401::600-691::41-97
MTTRRPSRKRNEDSANSADNPSSVASSSITQSTAATIKSDDPAWKHCYCPDLKKKHSLKCNYCDKLINAGITRVKYHLANIGGFNVSKCKKVPTPVKEDMVALLTKNCDAKEKKRKEKQRERDEIDLDNSGGDNSSEEESEHGNDVIVLKSTKGGSSSRLATTGGTIDKFYKPESIEESVQKNKRGLSTSQKIQTQLTTQKREERRDRACEYICQFFYEAGIAHNTVTLPSFAHMVEAIGAFGRGLRGPSSYEMSGPFLKNAKKRCLDRFKSHQESWQLTGCTIMTDAWTDRKGRGVMNLVVHSAQGVCFLDSVDCSAVKKDGKYIFDLVDRCIQEIGEEHVVQVVTDNASVNTAAASLLAAKRPSIFWNGCAAHCLDLMLEDLAKIGAVEETISSAKHVTAFLYAHTRVLDLMRKFLGKDLVRSGVTRFATAYLNLKSLQDNKKDISRLFRSDELNELGYLKKAKGKKANKVVRSEGFWKNVDMAVNFFEPLANVLRRMDSDVPAMGFLHGCMLEAKKEIAMRFDNNENSFKVAWDIIDKRWDNKLKTPLHLAGYYLNPYFYYPNKSEIELDGSFRAAVIACITKTVEDEETQDNIIEELNVYQEQQGTFGHDIAVRQRRNKNFNPAKWWLNHGTSTPNLRLLATRILNLTCSSSGCERNWSDFEQVHTKKRNKLLHDRMRDLVFIKYNSRLRQKRENKSKDPLEREMNDVLEDDANEFITGLVPNANSDKDEEHGGAQVGETIHESQLSQPQPKRKRLVRPRKKKIRSLHSLLYGGLENEAVASSSESEDNGDGDISMHQYSDSDDLGDE

SEQ ID NO: 54772 - protein, 96 aa, Zea mays
  Coding DNA Sequence Number=SeqID_12993
MPVSGACNARRLVPRFIFLVALVANCSVNSGLAMIFVGPCTRSSLPYYGYISLVEAPLEPEVLATDVVSRHNNFTERRTPGGNVLNVWLSTLAVRV

SEQ ID NO: 54773 - protein, 121 aa, Zea mays
  Coding DNA Sequence Number=SeqID_12994
MNSNQEGRNGCGTWASRGVGWCGAGAARLQAQGRGIAAWAGAVAAQSWSGHGHEAAGVWWLRSAASTGAPGVGRGLAESCCAAAAGAAGGSTPEESAVAFFSDETATATSVREKQQSRLEN

SEQ ID NO: 54774 - protein, 118 aa, Zea mays
  Coding DNA Sequence Number=SeqID_12995
MASTALFTDELLWRVKGMVGRTDYTTLVPMRTDQGYVSLVNYSVSPSASSPFPLISPLSSLSRGLRGYRTTRHLVLVDVAGREARRFVTKEKKKKDVDKKQTRKKMMARDTSEKHLRA

SEQ ID NO: 54775 - protein, 539 aa, Zea mays
  Coding DNA Sequence Number=SeqID_12996
  Gene Ontology: Cellular component=nucleus; Biological process =regulation of progression through cell cycle
  Homolog annotation: Hit_ID=Q6K7F3; Match level="QueryCoverage=99%, HitCoverage=68%, E-value=0.0, Identity=72%"; Hit description=Cyclin -like protein
MGVVSREVLSACERLCFICPSLRTRSRHPVKRYKKLLAEIFPRTQDEEPNDRKIGKLCEYISRNPMRVPKITFYLEQKCYKELRAERYGSVKVVIAIYRKVICSCQEQLPLFANSLLTIVETLLEQNRQDDLRKLACQTLFDFINNQVDSTYMFNLENQIPKLCHLAQEMGEKEKICILHAAGLQALSSMIWFMGEHSHMSAELDNVVSAVLENYESPYANADNDAAIEDRRIQWVDEVLKAEGHEPPAVTILTRVPSWKVIRTVHEKNQQVQIFGQGFVYITLLEYPGKQQQCDEFWKLYFVILIITICGHLLKDLHCVSYWICRLSWRNLIHHCMPGQNAHILLSMLVKHLEHKNVLKQPDMNLDIIEVTSRLAGHSKAQSSTALMASISDMVRHMGKSMQSLASDAGPGDNMVKWNSRYGKAVDECLVQLSRKVGDAGPILDTLAVVLENISSSMIVARSTIFAAYRTAQIVASLPNLSHQSKDAVTLMLSVRQANLLLSSLWTQALSPENVPRNYEAISHTYSLMLLFSRAKIVD

SEQ ID NO: 54776 - protein, 80 aa, Zea mays
  Coding DNA Sequence Number=SeqID_12997
MAELVEELPRANPWRVEEFMVRPRGELDAMEAFVGRGGDHDRRREKQRRRAIPASETGRERLISVGAAPNVNLLAAQWRW

SEQ ID NO: 54777 - protein, 703 aa, Zea mays
  Coding DNA Sequence Number=SeqID_12998
  Homolog annotation: Hit_ID=Q9ARU3; Match level="QueryCoverage=46%, HitCoverage=93%, E-value=1e-117, Identity=56%"; Hit description =Putative xylosyltransferase I
  Pfam annotation: Domain name=Branch; Domain location=55-234; Score =186.9; E_value=4.7e-53; Accession=PF02485.11; Description=Core-2I -Branching enzyme
  Pfam annotation: Domain name=WD40; Domain location=572-610; Score =34.4; E_value=4e-07; Accession=PF00400.22; Description=WD domain, G -beta repeat
  Pfam module annotation: Pfam domain module=Branch::WD40; Domain location=55-234::572-610
  Subcellular localization annotation: CTP_CleavageSite=46; ConfidenceScore=5.47e-01
MGAADKWLLPLVSVSVVSLLLFLSALSGFSASSALFARLPPPSYVRRGAAAPPSFAYLLAGGRGDGRKLLRLLLAVYHPRNRYLLHLSADAPDSERAELAAAAARAAPAARAFGNVDVVGRPTAGTPMGSSGLAATLRAAAAMLRLDAEWDWFITLSAADYPLLTQDDLIHVFSSVPRHLNFIDHTSDIGWKEHFVEYCVFGWENLPRTLLMYFTNVMLPLEGYFHSVACNSDFHNFTVNNDLRYVVWDDPPQMEPHFLNVTHYDELVGTGVPFARKFKEDEPLLDMIDDKVLRRWRHRPVPGAWCTGKRRWFSDPCSQWSNVNIERRRKLLQMLGLAGDPALARLEMGRSVSYDDGPVPVRPAPVSPPISRSRSDGGAVSASATKPPLGGRSPGSSEATPEGEEEEEEEEADPRCLIRNLDDGSEFVVKEGPELREVGTGRQLTMEEFVDPCVGRSPIVQELMRRENVASSGSSTPVQRSNSDSSNGATRHQRRRRHSSWLRGIRNVAGSVVASSRDRRSSDDKDTCSDKGGRRSSSATDDSQDSTGAVRHGPVRVKVRQYGKSYKDFSGLFMNQEIQAHDGSIWSIRFSPDGWYLASAGEECVIHVWEVSEFDRKHEENGACNLFVAMVCNGSPEPTLAVASSVDGSNREKKRRARFLEGHRSVSSDRLMLPEHVFALSEKPIRTFMGHSEDVPHDQFSLL

SEQ ID NO: 54778 - protein, 171 aa, Zea mays
  Coding DNA Sequence Number=SeqID_12999
MPLSPPWNSEIEGSCNSGIDDQFPGPPLNVTSIQVIMNFVYLAIGTELASTHRSYAGPTIAFACCFMGLGSLVVQLFASAIGLLDLEGGGHGEGSHKTPIFSALTHVVQRSGGIILVIIPSGVTQLGIVSGFWLITCVQANDTDVELNNALFVVSSRECPVISKYRDVVHT

SEQ ID NO: 54779 - protein, 320 aa, Zea mays
  Coding DNA Sequence Number=SeqID_13000
  Gene Ontology: Cellular component=nucleus; Biological process =regulation of progression through cell cycle
  Homolog annotation: Hit_ID=Q6K7F3; Match level="QueryCoverage=94%, HitCoverage=29%, E-value=5e-95, Identity=62%"; Hit description =Cyclin-like protein
  Subcellular localization annotation: CTP_CleavageSite=45; ConfidenceScore=5.20e-01
MLLLERTALTNSTQKLKLLEEGFLPPSRRRSLFTLATSMLVFFSKAFNVPALIPVVKHVLTESTVDPFLCLIEDCRLQALDSAAQSCKLYGSKEDDDQALKSLSNIDMNEHQSKETSVSLILDSLEDLSESELSTIRKQLIEEFSADDICLGSHFTETPSKSAAQNGKLHHKSMEVIPFGFVFEDDTLVEASDSLVEPHLRHLPCNSVLDVDRLLNSVLETSQHVGRMSVSTDQDLPFKEVANQCEALLIGKQQKLSICMSVREKKVLNFQDGESSIEKSSQQDPQAYTFLCTADEQWHLNSCKLPVLCPYDRFLATSGC

SEQ ID NO: 54780 - protein, 118 aa, Zea mays
  Coding DNA Sequence Number=SeqID_13001
SYAGPTIAFACCFMGLGSLVVQLFASAIGLLDLEGGGHGEGSHKTPIFSALTHVVQRSGGIILVIIPSGVTQLGIVSGFWLITCVQANDTDVELNNALFVVSSRECPVISKYRDVVHT

SEQ ID NO: 54781 - protein, 81 aa, Zea mays
  Coding DNA Sequence Number=SeqID_13002
MYIDGSYLKTGSDTGVVLTSPQGHKLRRFNIEADKPSTITSERKPVLDGVFASNLYEPIVKIKQSEEELGKAPDDQVALEA

SEQ ID NO: 54782 - protein, 73 aa, Zea mays
  Coding DNA Sequence Number=SeqID_13003
MANVVEGLLPEIGAQILAVDEWGGTVVERQVRRAIPPSRNAKQHPPRPRTRSQRSRTTPQPHAEAPTTAPRGL

SEQ ID NO: 54783 - protein, 135 aa, Zea mays
  Coding DNA Sequence Number=SeqID_13004
MGHTRSLLPLALSFLSSANGVSPPFDLCGDLDDDDIDEPVPKDRRLPAAAPMSNGLNDHLLRFTRSLQRPAQNPNPSPNPPPSPPPATSEEQVEKVKLDGVSMARWRLPLPSTSASTAEFVASTAEFDLVEPTTK

SEQ ID NO: 54784 - protein, 77 aa, Zea mays
  Coding DNA Sequence Number=SeqID_13005
  Subcellular localization annotation: CTP_CleavageSite=44; ConfidenceScore=5.30e-01
MGRPLHAPCKGRGLAVAASLRGFIKKPFSFLQGQRCGRRAPSPCAMQGKRHESSMMTPEEGERFSDDASKTVSTNVL

SEQ ID NO: 54785 - protein, 181 aa, Zea mays
  Coding DNA Sequence Number=SeqID_13006
  Gene Ontology: Mol. function=carbohydrate binding; Biological process= carbohydrate metabolic process
  Homolog annotation: Hit_ID=Q1SPM1; Match level="QueryCoverage=35%, HitCoverage=12%, E-value=8e-10, Identity=44%"; Hit description =Glycoside hydrolase, starch-binding
  Pfam annotation: Domain name=CBM_20; Domain location=102-168; Score= -22.8; E_value=0.023; Accession=PF00686.10; Description=Starch binding domain
  Subcellular localization annotation: CTP_CleavageSite=49; ConfidenceScore=5.08e-01
MESATAAVRSASLARARPAPLVHGRARGAGRVVGAGLAARARRRALVAVASHQEHHEPLPPRAQEGGAVAVATQADEAEVHAIDAPAAAAETSSSQLAAGKTVRVRFVLKRQCTFGQSVCLVGDDPALGLWDLSNAFPLKWAESHDWTLEKEDKKPAVATDASVQVDWVKTDEANPQKLVE

SEQ ID NO: 54786 - protein, 697 aa, Zea mays
  Coding DNA Sequence Number=SeqID_13007
MTIDFLRARLLSERSVSRAAKERADHLAKRSIVTEPVAAVQVVELEEQLRTVTAQRRKAERAAAEVLAILDSQGFGRLSDAADDSGSEYEADTGDPNAVERDGGGGNAAEDALSGSELGAPAAAAAASAAQAGGLSWRGRAASPECERRRPQHQQHKGRQLRQRHGHGHGHRRGYFYCRAADSSPKYHPGQSCRKIKRKELRSQTEEEEGNDNAVESTEDGQERSDCTVCTDQPADVDGEVNQDGHGSSSNGRGEDRDDLAMVYEKDGEMERVLEKQAELIGQFEAQENAQREWEEKFSLSRDSVMDNVNLLNNKLNQAENACGRRETARVVDKEVVCEQARSSDNNFHCINDPSECLPNGPVSELPQNVAKDSVTEHRKFDGFGHDCVVTAAAVISSHGELQVRKDVLTTKSYPEGSGNNLGKSALPPQGSCGSRLNAGHRNGQGDESSDSGSSYHVNARSSEQYINTSSVGSQLSDTPKSEVSEWSSSCFHNHTDNQLDTQLHQSSNKDVGGVLEALRRAKMSLRAKLSWPSLASKNILALEAPDDLPVNGMELSLCRTAHVSQEIFALPTPTDYLNKVLPHDDVKVPIGPAGLFRLPIDSFPRDEMTTRDGYGSWFSLTSVSPPYVSPSYHADHIMPALSLSQYGSGLSLNPYYDPHSSMLLSMPTAGGRSVPVSDFRIGDGSFLREVPRPDNY

SEQ ID NO: 54787 - protein, 386 aa, Zea mays
  Coding DNA Sequence Number=SeqID_13008
  Gene Ontology: Mol. function=4 iron, 4 sulfur cluster binding; Cellular component=nucleus; Biological process=base-excision repair
  Homolog annotation: Hit_ID=Q9SJQ6; Match level="QueryCoverage=90%, HitCoverage=29%, E-value=2e-72, Identity=41%"; Hit description =Protein ROS1
MSGLEKVRYWSVPVRLRAFTTQVDTNVGRICVRLGWVPIQPLPESLQLHLLELYPILETIQKYLWPRLCKLDQQTLYELHYQMITFGKVFCTKRQPNCNACPMRSECKHFASAFASARLALPAPQEESLVKLSNPFAFQNSSMHAMNSTHLPRLEGSIHSREFLPKNSEPIIEEPASPREERPPETMENDIEDFYEDGEIPTIKLNMEAFAQNLENCIKESNNELQSDDIAKALVAISTEAASIPVPKLKNVLRLRTEHYVYELPDAHPLLQQVPCRTAMRGSFPLNGTYFQVNEVFADHRSSHNPIHVEREMLWNLQRRMVFFGTSVPTIFKGLRTEEIQQCFWRGFVCVRGFDMETRAPRPLCPHLHIIARPKARKTAATEQVL

SEQ ID NO: 54788 - protein, 164 aa, Zea mays
  Coding DNA Sequence Number=SeqID_13009
MTDALADLGSPVDNRILILNILRGLNQHFKHINTIIRRYSPFPNFVKVRDDLLLEEIHLDTLGPATTLTVVYSNNMSSAPKSPSLTSSHPPGSGTENGIGNTNSGNNRNKGNNRHNNNGSHGSSSGTSATSPMGVGVTNGKASPPGQHKSTMTRAHYYVLLTRH

SEQ ID NO: 54789 - protein, 129 aa, Zea mays
  Coding DNA Sequence Number=SeqID_13010
MGTGLSVPSAQLLGRGAQGRSFAGEWEGAAAAALGVDALLGEKTDRGGGTRASRPAQPSPGHGERAARRRAVERRKGGRAHLGEAQRGAAHASSATRTATAAALWAGCGSEGGDGEAESEVEARKGGGG

SEQ ID NO: 54790 - protein, 171 aa, Zea mays
  Coding DNA Sequence Number=SeqID_13011
  Subcellular localization annotation: CTP_CleavageSite=81; ConfidenceScore=5.70e-01
MLRPLHQGASPWGTVSEHCPPSTSPTSRRPLYASTAPGVCSIAPGIRRSAPASSSSSAPPPVRAVVPLPPAHEVVMWLLLRAAPNQRREPPLPHIPRSYLRRSPSAPLGAARYRPPALTTPRALPLMLTLGRRDALLAYWRTCSDGCSDITRKSLFVVGEIGGNDYNLPLH

SEQ ID NO: 54791 - protein, 123 aa, Zea mays
  Coding DNA Sequence Number=SeqID_13012
MSGLACNPFVAATSHLISLSHIAHHDREPTHKPPPHADAPSLATFPARALLLPRLVLVLAAPPSPHRDPIEVTTPSTSEQQCPPSSTSSPQTSKPAKPPRCAPASPHHSTTYHRARRICQVPP

SEQ ID NO: 54792 - protein, 71 aa, Zea mays
  Coding DNA Sequence Number=SeqID_13013
MGAPLLLLPLLCCCCFALLLQVQGRGGYDVVFCPRGVQVTRPPACFLVSLSCSRHCGSVYHGRKVKPLAKF

SEQ ID NO: 54793 - protein, 36 aa, Zea mays
  Coding DNA Sequence Number=SeqID_13014
MGEEMGERDMTTLFAYSPVQDEGLAYTAAFDRTLTR

SEQ ID NO: 54794 - protein, 814 aa, Zea mays
  Coding DNA Sequence Number=SeqID_13015
  Homolog annotation: Hit_ID=Q336V3; Match level="QueryCoverage=14%, HitCoverage=22%, E-value=2e-31, Identity=60%"; Hit description =Cytochrome P450 family protein, expressed
MEPNLQSALEEQTKILRALSARLAVQEAWWRSWESKVAHHSVSIHDLEVAVATVPSATLRRNRTSTTASPSKDGTRFTEEDDDNHPATLEPLLTDTTTAAEVDSIANTDDVEADSLASASTVGVATSQAAEMQLHVGWARWLEGQADYLRHDRMLHSNLDSLTSSNHPLLQDASATNNSPTQYSTECFSHDIVLLRTISAAPTSEDRALQQRRLECLVAWPEWRRIGGRNYIMLEHHPNRMFDACDRFWHCVFALCDFGSVQGLQRKLERLCLAGSAPDLEVLAVLSGLRARSLSDQRAANHTRTSMRSISTTATPFRLCSTRSGYIASGTSTGTTCSTRSQSWISSEFEHSSIPTPNQKVFNLSSDVLNKRDPWVGTFDHIFTELGQPQSLEAVRLLCHLRHQLPDCSQLEFTYEVFAAQKVFEELSLSSPATWVNIGKLLASLCWKIPWPPPHIQVGLGCGSEALRSLPWLSPTIASTNEERIFIISEDGKVDGVVDQTMDEQIAAAVFMPACIEASLNDGMNAGKTREAFADHQYSEYDSRLKDKDQKILFEDEIDLSLFNYKFDSYTTDSPAIDAEVELRSTDLWPYWKVDCLCKIIPRQLLAENAMMLIRNTVDKLIMKHKEIQVETEQIAGEDDVNEGDPSILRFLLASRDKSADMERSQELLETLVILIVKSVKDPRSVVCKTALMTCADIFKAYGALMVHSIDPSLVQQLLLTASQDKRFVWETATTTFISLTSWIFPLLLKPTMLPYLKNKNTGTWPKASRLPLTDRGCCTLAATTLSIIAPATPDRGGCRRHMALQRAGKECVS

SEQ ID NO: 54795 - protein, 358 aa, Zea mays
  Coding DNA Sequence Number=SeqID_13016
  Gene Ontology: Mol. function=receptor activity; Cellular component =mitochondrion
  Homolog annotation: Hit_ID=Q5Z9P3; Match level="QueryCoverage=95%, HitCoverage=53%, E-value=1e-126, Identity=75%"; Hit description =Receptor-like protein kinase-like
  Pfam annotation: Domain name=DUF668; Domain location=75-160; Score =161.7; E_value=1.9e-45; Accession=PF05003.3; Description=Protein of unknown function (DUF668)
MVLCPPESIMILHSELKRQRKLVKNLKKKSLWSRTLEEIVEKLVDIVIFLHKQIRDSFNETGTDFCASEQTQNKRLGSCGLALHYANIINQIENIVSRPLSLPPSARDNLYHGLPITVKSALRSRLQTYNPEEERTVAQIKAEMQKTLRWLLPIAENTISCFLLIHSPGHTKVLDGSASGQILVAAPPNMHPPCSQERHEQEIRLPAQRHPHPDAPSRRQGENRALHAGAGGAPPPPGDPGEEQRLRDQQIVEARRVVPVPQGGGNGPPTGDGDSAQHVAGEQPHGLEPAVGLRARGAGPPELQEDGLRQEPELRASAWPPTEQGPQELGPVPEPRQLPGDGVRQDPRRAAARPGQGS

SEQ ID NO: 54796 - protein, 87 aa, Zea mays
  Coding DNA Sequence Number=SeqID_13017
  Subcellular localization annotation: CTP_CleavageSite=52; ConfidenceScore=5.49e-01
MAPLPHCFASTPRHKTSIQLRKRKRKNSEQDWAHSSPNRPTTRTRSPTMGGRATTPVNLYRPLYPIIPARMCSTPNYTIGATLGINN

SEQ ID NO: 54797 - protein, 102 aa, Zea mays
  Coding DNA Sequence Number=SeqID_13018
MAHLQPLFLVDQPYTSHELPSFENENDEEQVVEVPIQGEVPLATIKPKLRSKASTEEMPKKEAPKVEDKQDSPKKVEMGTKEAEAIKEAQRLKELEGTYITS

SEQ ID NO: 54798 - protein, 47 aa, Zea mays
  Coding DNA Sequence Number=SeqID_13019
MKKLQRARRRFIRLPDMVQVDGPGWAIVPHPQPKHDTYIATSCRAGP

SEQ ID NO: 54799 - protein, 98 aa, Zea mays
  Coding DNA Sequence Number=SeqID_13020
  Gene Ontology: Mol. function=receptor activity; Cellular component =integral to membrane
  Homolog annotation: Hit_ID=Q8H399; Match level="QueryCoverage=97%, HitCoverage=21%, E-value=3e-26, Identity=55%"; Hit description =Putative membrane protein PTM1
MVAVSLGWITFEVHFKSMDEYNERWRATWVIPTVWQLIFSLLCAFCLMWTPSQSATRPGPLSYVDNLAISVYKDATIIILRTDSDVYAKAAGDGGKRV

SEQ ID NO: 54800 - protein, 198 aa, Zea mays
  Coding DNA Sequence Number=SeqID_13021
  Subcellular localization annotation: CTP_CleavageSite=25; ConfidenceScore=5.10e-01
MAQNGERSGILTGGSSLSGPPSTLVARTARAPWPELATPHGRRRHEAVAIGRGSRFDGAVLVPAITGDQSMGQRKLGREKRKSGGEIHLGWGGNGGEAGPDGGGARSRTTTEHNQRRVQAQEVWQRGSSDRLEKRMCAARVSGQRRRCYRCIEATHRHGCTADGRHGGILAQSTPHETMKTEGELGKKIQGLGVGGLA

SEQ ID NO: 54801 - protein, 140 aa, Zea mays
  Coding DNA Sequence Number=SeqID_13022
MPSQAAPPAPQPLHRPSVLHAATARLYFGDAIMTKRHMRRSAKEQAHAWSEEKRGGRAMRVAQCCAELDAADARSAQLSASVVRCRASQSIASGAALSKDVEGPQQNEIHTGPKYNISYVNQIFHISLWLDPTVKILLVT

SEQ ID NO: 54802 - protein, 97 aa, Zea mays
  Coding DNA Sequence Number=SeqID_13023
  Subcellular localization annotation: CTP_CleavageSite=83; ConfidenceScore=5.35e-01
MAVVGGIYSPNHQNSRWGGLLSMGAPDSPVRQPRHPTVRVLMVSTVGALTAWATGQSGAALDSHCSLSVVSRPLESTVALASRCSAGTPDSLVTHRT

SEQ ID NO: 54803 - protein, 173 aa, Zea mays
  Coding DNA Sequence Number=SeqID_13024
MAGTSISARAKKARGDGGWPGGSRFNGAEVWRRGSSDGLEKRMRAAWVSGQWRSERGRGKWGCARTCRGGRGAGLELGGDVGATISTCMRAVHAGKKLKEGEGLASGAHGTAVQACEHTTGQSADKMAPQNSERERGRGARVGADKMAPQNSERERGRGVWVGADMEHIMHSG

SEQ ID NO: 54804 - protein, 151 aa, Zea mays
  Coding DNA Sequence Number=SeqID_13025
  Subcellular localization annotation: CTP_CleavageSite=58; ConfidenceScore=5.37e-01
MARPRLRRGSPAPGPFGRRLRRGPARGTACPCPGVASPAPPRATPPDAAPQPRPPSRRARHGAARVRLGRGGAVRPLPLHGVALAQRGPGPARLQLARPRCPCVALRVRGSAPACARPIRDASARPCARVLAWCARCFGTARRALSALVYP

SEQ ID NO: 54805 - protein, 97 aa, Zea mays
  Coding DNA Sequence Number=SeqID_13026
  Subcellular localization annotation: CTP_CleavageSite=54; ConfidenceScore=5.57e-01
MKAVFALHFCTSSLAFCSSSRIICLTLACMVKHWRLASARNLSWSSSGMPRTSSSSMISSPSSGVKPGEGLKVGFQSCKCERCPLVWAGSPGDVTCY

SEQ ID NO: 54806 - protein, 95 aa, Zea mays
  Coding DNA Sequence Number=SeqID_13027
MGGAVVTSGEAEFCLRWELSGRGLGLRGELPEAEDVFFRLTAEKIKGRKVAIFTAVYEGYLGIEPHWDLAEAFCIGLHALASHCLDEDPNLIILQ

SEQ ID NO: 54807 - protein, 152 aa, Zea mays
  Coding DNA Sequence Number=SeqID_13028
MVARSPKMRQTRTPDKLGSSGRARMGPKSLANSLADYRPQEQDQRRKNDEEKGHGIGLNQLVTTRARQTGMAITGEAKLANNMAELGEIERGDVHLTSGWGSGEKAERGPDGTEVLWETEGCPELLTARWNSPRQRARRGLDGDHKTGGRAP

SEQ ID NO: 54808 - protein, 216 aa, Zea mays
  Coding DNA Sequence Number=SeqID_13029
MVLLGRTVSWIETQWFAVGHERETDKQISAGSDRFEERNTLLPGMALYVSGVTGGVYRAVSLLQKISENPGGTPNGEPWPEGRKARKGVAPLLESASASPSPSLEDFADSEYSEEVSSKYDRSPIPASSDDSDDSIGLSVAELAYARSIERAGLGGSDDSEDASLEEVEDSSDLEEGSDNEGDSDEGDDGNSDDGDGGEGSSDDGDGDGGGRVPLA

SEQ ID NO: 54809 - protein, 59 aa, Zea mays
  Coding DNA Sequence Number=SeqID_13030
MASPYDRQWGSEHNTSSTEAGCREWESQLVGKVCDLCIVLEPGISVVLMVKSGLGILFD

SEQ ID NO: 54810 - protein, 53 aa, Zea mays
  Coding DNA Sequence Number=SeqID_13031
MAWSSSSSSHTKRRNRACAAYAHWRPVLERHHTNRPPDRSYMITRLKNTFSIV

SEQ ID NO: 54811 - protein, 68 aa, Zea mays
  Coding DNA Sequence Number=SeqID_13032
MAELGQKVSLEKLCPKQGLQIKISCLASQHEGIIPENEEATHLDGMTLIESFGSTHGVNGYGRFSVSK

SEQ ID NO: 54812 - protein, 501 aa, Zea mays
  Coding DNA Sequence Number=SeqID_13033
  Homolog annotation: Hit_ID=Q9LKW7; Match level="QueryCoverage=9%, HitCoverage=11%, E-value=2e-13, Identity=80%"; Hit description =Calcium/proton exchanger CAX1-like protein
  Pfam annotation: Domain name=PPR; Domain location=141-175; Score=4.3; E_value=2.3; Accession=PF01535.11; Description=PPR repeat
  Pfam annotation: Domain name=PPR; Domain location=208-242; Score =14.1; E_value=0.16; Accession=PF01535.11; Description=PPR repeat
  Pfam annotation: Domain name=PPR; Domain location=243-277; Score =28.9; E_value=1.7e-05; Accession=PF01535.11; Description=PPR repeat
  Pfam module annotation: Pfam domain module=PPR::PPR::PPR; Domain location=141-175::208-242::243-277
  Subcellular localization annotation: CTP_CleavageSite=22; ConfidenceScore=5.06e-01
RGCSARASLLHLRPNRDQMPPRASLLLRRRLSARPPHRDHPEVAALLGVLNSAPPSSTSLSHALSRAFPSPSDAFPLCRLPHLLPLLPSPLLSLRFLLWRLTPSSPLPSQHALSSLATSLPDLSYSVPLLLSSSPRPLQLPHYALLLNISAHASLFPASLAVLRHMRSFDLVPSAACFHHALRAAGSASDVSAVLEIMSASGACPTVPVIVAAVHKLASAGEFEVAYRLIDKMPEFGCVPNAVVYTAVLDGMCSFGNVDAALRLMKAMEGSEFGANCAPTVRVVDAYDVVERVIGDGSVSKRSFVFLRFNPWSSPEPQSGSVGRPAAVPRAPVLPRPNPSLLPPPPPPAPLASKLLTRFTAATSISTTSATTTGTSPSTASDSSPRLTTFLLGRHRCSRRGTELPHSHGLRRHCPPRICLRLFRQRRRQGDICPPPRPPHYLNMTSSSLCKKSDLALLHMVPCAPLCRLLDNIHEVLLATRLTLLFPAVLLAFATQIFHFS

SEQ ID NO: 54813 - protein, 190 aa, Zea mays
  Coding DNA Sequence Number=SeqID_13034
  Gene Ontology: Mol. function=nucleoside-triphosphatase activity; Cellular component=cytosolic ribosome (sensu Eukaryota); Biological process=electron transport
  Homolog annotation: Hit_ID=Q93YY0; Match level="QueryCoverage=45%, HitCoverage=55%, E-value=1e-36, Identity=65%"; Hit description=68 kDa protein HP68
  Pfam annotation: Domain name=ABC_tran; Domain location=28-161; Score=- 52.1; E_value=0.0071; Accession=PF00005.17; Description=ABC transporter
MVALLASEYAKRNYKQACLVLFRVQQIGGVTGIALGATVFFSVYMLVVFAMRIMSICFSLQLLLRKATENKDGIQLLNAAIEKACYTESEDKTYDLNFMQEPADIYMIDEPSAYLDSEQRIVASKVIKRFILHVKKTTFIVEHDFIMATYLADKVIVYEGRPSIDCTANAPQSLVSGMNKFLSPYVVLIV

SEQ ID NO: 54814 - protein, 401 aa, Zea mays
  Coding DNA Sequence Number=SeqID_13035
  Gene Ontology: Mol. function=protein serine/threonine kinase activity; Cellular component=cytoplasm; Biological process=protein amino acid phosphorylation
  Homolog annotation: Hit_ID=Q1ERH6; Match level="QueryCoverage=76%, HitCoverage=98%, E-value=1e-65, Identity=43%"; Hit description =Mitogen-activated protein kinase kinase
  Pfam annotation: Domain name=APH; Domain location=119-330; Score= -10.8; E_value=0.034; Accession=PF01636.13; Description =Phosphotransferase enzyme family
  Pfam annotation: Domain name=Pkinase; Domain location=117-377; Score =197.1; E_value=4.2e-56; Accession=PF00069.15; Description=Protein kinase domain
  Pfam annotation: Domain name=Pkinase_Tyr; Domain location=117-377; Score=19.2; E_value=1.2e-13; Accession=PF07714.7; Description =Protein tyrosine kinase
  Pfam annotation: Domain name=RIO1; Domain location=130-290; Score= -90.8; E_value=0.028; Accession=PF01163.12; Description=RIO1 family
  Pfam module annotation: Pfam domain module=APH::Pkinase::Pkinase _Tyr::RIO1; Domain location=119-330::117-377::117-377::130-290
MPDEKPRPRAGECGYATDSPSGAATELHTHPPLGHGSPRPYIEAPSRVIACLPPFFSRQLLTPEATTANKPMALVRQRRQLPHLTLPLDHFALRVPPQPQPTAAPSTSTSDARLSDYERLSVLGHGNGGTVYKARHRRSAQPVALKLFADGDTSAAREAEILMLAADAPHVVRLHAVIPSAAGEAPAALALELMPGGSLSGLLRRLDRPMGERPIAAVARQALLGLAAVHALRVVHRDLKPSNLLVGADGEVKIADFGAGKVLRRRLDPCASYVGTAAYMSPERFDPEAYSGDYDPYAADVWSLGVAILELYRGHFPLLPAGQRPDWAALMCAICFGEAPEPPAAASEEFRDFVARCLEKKAGRRASVAELLEHPFVAEREAAGAQEALAALVKEAEQLDL

SEQ ID NO: 54815 - protein, 110 aa, Zea mays
  Coding DNA Sequence Number=SeqID_13036
MVFEAGLGCYQPHSVEWHSSRSGAGGAVLLLGRARVRIRCQAILALNAPAIRSVVVTIWPRLLLGEDWALGEPKLCADGGYQLRLGVLGVPLIMVLDKFYLGFVLQPTFL

SEQ ID NO: 54816 - protein, 331 aa, Zea mays
  Coding DNA Sequence Number=SeqID_13037
  Pfam annotation: Domain name=zf-CCHC; Domain location=225-242; Score =16.7; E_value=0.0017; Accession=PF00098.13; Description=Zinc knuckle
MVSNNYGLCKGKAHCSTQRQGLTLGCDGITARQARLWHEQGGEHRVGPPAATGTAKNFKIFANLNCELTTKIEQLESKAPSSTIDDSLVKKNEKLKAKLASSQDVIENLLEKIEILSIHNNKLENIGSTPEAPKIYIPEIIKRDAYTSCLYSINVNSNPCNQVLFKNVVIETCLDEIATKNELLNQEVVYLGKALYDKKDKTKQTQHSQYNTTSGVNKHVEGETMVCLLCHKEGHKSYQCKAKTRGDKKKRPTSKISNTYTNKVDKKAVTPYLIKKKKNIKVIAIKSNKQAKRERGPNKSGCQRRLFQPLKALRKFGSREGSEKSEGLRRI

SEQ ID NO: 54817 - protein, 104 aa, Zea mays
  Coding DNA Sequence Number=SeqID_13038
MSLFSLSPYVDESSSVELIDGRTNAIGKGLSALSPTWRANCCGFLNRGTIRFVFGRGVSVDSLRMLKGTRYNEKLYSIREVFGLLLLGLVAPVVSSVGLCFLPS

SEQ ID NO: 54818 - protein, 137 aa, Zea mays
  Coding DNA Sequence Number=SeqID_13039
  Subcellular localization annotation: CTP_CleavageSite=63; ConfidenceScore=5.48e-01
MASERPGQPARRPLRACLASRPLPASSPVSVALSQLARRPTACLRGGVTSQAACGSATCGPIRPASPRSWIPGPLAKQRPRRCSCCMSCAQRVVDSPRRPPSSQGDDEDDGFDYDYGKEEGVEADLQEFQGFDEFDD

SEQ ID NO: 54819 - protein, 89 aa, Zea mays
  Coding DNA Sequence Number=SeqID_13040
MEAFSVSSLRWFCLAILFGCWGRKARCLTTLPLILVSSWLAVLAAIWNVIPMEAISELLPGYSFRVGMGGELPLYCAQPVFGVHGVKVA

SEQ ID NO: 54820 - protein, 88 aa, Zea mays
  Coding DNA Sequence Number=SeqID_13041
MESEREQGMVGEYPGYSVELAKGSCGEVGGATTCTELFGLGRSTVAGLVELVVVVEVVVVVVSPTALALFLGGPDVEDLEDSFLFAIA

SEQ ID NO: 54821 - protein, 138 aa, Zea mays
  Coding DNA Sequence Number=SeqID_13042
MAGRFIFIKLGDSFEVLPCRRGYSHAVAVDKNLMDAIKSVHITNRSGRSTDATTKARSIPGIMRHYNVMTAPATNPQPMGALSSNILVPTQYGDEYEGSEVFLPGDDCVEGLTMWCGDMAASSMSDEFHTRNNGCHCP

SEQ ID NO: 54822 - protein, 90 aa, Zea mays
  Coding DNA Sequence Number=SeqID_13043
MSLLREQFHRRRGTIPTKRSSTNFDPLWRSSIARTRTPIDGGNSVEPDPAWRNGGVAQIFGWLRGKKEVRQLRFLCPWSPSASRGCIAKI

SEQ ID NO: 54823 - protein, 100 aa, Zea mays
  Coding DNA Sequence Number=SeqID_13044
  Subcellular localization annotation: CTP_CleavageSite=34; ConfidenceScore=5.32e-01
MPKASAEFPSCITRRKQGPKSPTPKKRKSSKLDRAGRKPSELPKQIGETPSTLSISVTEILEVMTRPLPSSMLILLGSDLTSLLLTMKDKNAEEEAGRSP

SEQ ID NO: 54824 - protein, 318 aa, Zea mays
  Coding DNA Sequence Number=SeqID_13045
  Gene Ontology: Mol. function=RNA-directed DNA polymerase activity; Cellular component=intracellular; Biological process=RNA-dependent DNA replication
  Homolog annotation: Hit_ID=UPI00004C1733; Match level="QueryCoverage =99%, HitCoverage=23%, E-value=1e-169, Identity=93%"; Hit description= UPI00004C1733 related cluster
  Pfam annotation: Domain name=RVT_1; Domain location=56-225; Score =136.2; E_value=9e-38; Accession=PF00078.17; Description=Reverse transcriptase (RNA-dependent
MPGIPRDVAEPSLDIRDGARPVKQPLRRFDEEKRRAIGEEIHKLMAAGFIKEVFHPKWLANLVLVRKKGGKWRMCVDYTGLNKACPKVPYPLSRIDQILDSTAGCETLSFLDAYSEYHQIRMKESDQLTTSFITPFGMYCYVTMSFGLRNAGATYQRCMNHVFGEHIGRTVEAYVDDIVVKTRKASGLLSDLEVTFRCLKAKGVKLNPEKCVFGVPRGMLLGFIVSERGIEANPEKIAVITSMGPIKDLKGVQRVTGCLAALSRFISRLGERGLPLYHLLRKAECFTWTPETEEALGNLKALLTNAPILEPPAAGEAS

SEQ ID NO: 54825 - protein, 115 aa, Zea mays
  Coding DNA Sequence Number=SeqID_13046
  Subcellular localization annotation: CTP_CleavageSite=14; ConfidenceScore=5.36e-01
MTWPSGHSCGGRCRENSAARSVPTAGKATPATTNNKSRSTTEFSLGRNRKLHLARPHAPASGGGLRLARPQAPASRGGLRLARPPDSASTPVSGRIASSLDPGLGVKRSLRLDRP

SEQ ID NO: 54826 - protein, 95 aa, Zea mays
  Coding DNA Sequence Number=SeqID_13047
MAHAGAGEQAGEERPVLASAGDGSQREEQDALGWDGARERSHWPPGQDAHSHRGRRGALSAARRHEDGSQELGWVKTHGSPCLCKPIYTHRYQPF

SEQ ID NO: 54827 - protein, 45 aa, Zea mays
  Coding DNA Sequence Number=SeqID_13048
MSVRANSQQVHRTVWCPQKQKVADQGILCPRTVHYLVSSDSELRT

SEQ ID NO: 54828 - protein, 96 aa, Zea mays
  Coding DNA Sequence Number=SeqID_13049
MGQSGTAVHKVVESGLDLNVPLRCEKVSKEPLIFYQINPRSTPIQRTSPTGPKPYKTDLSFFIIVYDKIIVLIGTMERPPGKTVLPQGWYGTPLAD

SEQ ID NO: 54829 - protein, 91 aa, Zea mays
  Coding DNA Sequence Number=SeqID_13050
MEQGVNLRTFIHERSWETEPNNPVKHPNNPANVAIYAMVGARSVVGEKTTDTVGPRGPHDSDQGGCRRDGEGEMGRMIEWSLGRPKGFDPW

SEQ ID NO: 54830 - protein, 172 aa, Zea mays
  Coding DNA Sequence Number=SeqID_13051
MTLNLHEGEQPSESPNSWEKRRDICVSVITSYSPTILCTQQVRLRGKKLEYREPGLENMLERSVLEPEYLVFIVFVCRLKIVGLVCRLKMATGLPTTVLASSILIAHLVGGAEAAGMRTWKKIVRVRKKHTPCGRSTHTGVASLESQEKAHRTTLMNTAQYSMKRKRFGISG

SEQ ID NO: 54831 - protein, 93 aa, Zea mays
  Coding DNA Sequence Number=SeqID_13052
  Subcellular localization annotation: CTP_CleavageSite=34; ConfidenceScore=5.18e-01
MAQCSALQQQQQQQSLFVPSTLGYAGTDAVGTPRDVSGKARYAGGDASRKNGATAASTIASTTTTSSTLGQAPGIYKPQATYLRQLSGSITCG

SEQ ID NO: 54832 - protein, 333 aa, Zea mays
  Coding DNA Sequence Number=SeqID_13053
  Gene Ontology: Mol. function=hydrolase activity, hydrolyzing O -glycosyl compounds; Biological process=carbohydrate metabolic process
  Homolog annotation: Hit_ID=Q9LUG2; Match level="QueryCoverage=88%, HitCoverage=36%, E-value=1e-101, Identity=53%"; Hit description =Alpha glucosidase-like protein
MASVATTSCDLLVRTALRPLLHLTPSVAQLRLAGKAEGVLFEDAGDGYAFTQGDYLLTYYIAELHSSVISTDGVDGEVIHLTMPSESVVSSLVATSEFEHKKRMEMIQPIPDIEEPSGQEGAELSKIPVDLKSGDWFLKIVPWIGGRIISMAHIPSDSQWLHSRIEINGYEEYSGAEYRSAGCTEEYKRQISILKDNPKIVQIDSSIQARSVGAGSGGFSRLVCLRVHPTFTLLHPTEVVVAFTAINGSKQEISPEAGEITFEGDLKPNGEWMLVDKCVGLSLVNRFNPREVSKCFVHWGTGDVNMELWSEERPVSNETPLRICHQYEVQQTT

SEQ ID NO: 54833 - protein, 310 aa, Zea mays
  Coding DNA Sequence Number=SeqID_13054
  Gene Ontology: Mol. function=nucleic acid binding; Cellular component= nucleus; Biological process=DNA replication
  Homolog annotation: Hit_ID=O24183; Match level="QueryCoverage=63%, HitCoverage=39%, E-value=1e-69, Identity=57%"; Hit description =Replication protein A1
  Pfam annotation: Domain name=Rep_fac-A_C; Domain location=200-305; Score=6.6; E_value=2.1e-07; Accession=PF08646.1; Description =Replication factor-A C terminal domai
MCNLLKLKDSKLDLDSVELQTNCDGIPGYKQRKMSTNPDEPKSHARTDFLLNNELEVRKFWDENKVFQADPGNESPSPEEKFFGNFPYPYMNGLLHMGHAFSLSKLEFGAAYHNDLATRTGQELLDMVDSSPIVAIKSLKVSDFQGVSLPTIGRSTLEINPDLLEAKNLMSWYVSEGKDISLAPISAEAGATRAGGFKYMYSDRVFLSHITSDPAMGQEKVTEVFGSGYWCEGCQKNDSECSLSADELDWIRKEWARHRLQEGDNSYVLKLKEATWVPHMFRVSVTQDEYMNEKRQRITVRGEALVDFAA

SEQ ID NO: 54834 - protein, 115 aa, Zea mays
  Coding DNA Sequence Number=SeqID_13055
  Subcellular localization annotation: CTP_CleavageSite=56; ConfidenceScore=5.25e-01
MRNEKSRLSTNGPTATSAPPPACLYKMAGVLPTINTHVKRSWDMHVLVRFSSRYLRVALSSYHRKFRSSWQWKSHNRTMELVASSGVALGLALICNKALFPVRVPITIMLMPRVP

SEQ ID NO: 54835 - protein, 147 aa, Zea mays
  Coding DNA Sequence Number=SeqID_13056
MKESHGQEGGGVGLDEVEALSGSASAAEGWEGGMVDVEFCASAAEGWAASLFQKRVESSTFCNRKEIPRKKIHYKTKFTAITTGDLWFFHQSQKKLTKNIPYYSIKQASKSMNHEVDWIGGAFTYPLRKGIFGFEGTPAWKEIISPN

SEQ ID NO: 54836 - protein, 827 aa, Zea mays
  Coding DNA Sequence Number=SeqID_13057
  Gene Ontology: Mol. function=transferase activity, transferring glycosyl groups; Cellular component=membrane; Biological process =cellulose biosynthetic process
  Homolog annotation: Hit_ID=Q9LLI3; Match level="QueryCoverage=99%, HitCoverage=76%, E-value=0.0, Identity=93%"; Hit description =Cellulose synthase-7
  Pfam annotation: Domain name=Cellulose_synt; Domain location=7-821; Score=2124.4; E_value=0; Accession=PF03552.5; Description=Cellulose synthase
MDESRQPLSRKIPLPSSQINPYRMIIIIRLVVLGFFFHYRVMHPVNDAFALWLISVICEIWFAMSWILDQFPKWFPIERETYLDRLSLRFDKEGQPSQLAPIDFFVSTVDPLKEPPLVTANTVLSILSVDYPVDKVSCYVSDDGAAMLTFEALSETSEFAKKWAPFCKRYNIEPRAPEWYFQQKIDYLKDKVAANFVRERRAMKREYEEFKVRINALVAKAQKVPEEGWTMQDGTPWPGNNVRDHPGMIQVFLGQSGGLDCEGNELPRLVYVSREKRPGYNHHKKAGAMNALVRVSAVLSNAPYLLNLDCDHYINNSKAIKEAMCFMMDPLLGKKVCYVQFPQRFDGIDRHDRYANRNVVFFDINMKGLDGIQGPIYVGTGCVFRRQALYGYDAPKTKKPPSRTCNCWPKWKHKKKTTKPKTEKKKLLFFKKEENQSPAYALGEIDEAAPGAENEKAGIVNQQKLEKKFGQSSVFATSTLLENGGTLKSASPASLLKEAIHVISCGYEDKTDWGKEIGWIYGSVTEDILTGFKMHCHGWRSIYCIPKRPAFKGSAPLNLSDRLHQVLRWALGSIEIFFSNHCPLWYGYGGGLKFLERFSYINSIVYPWTSIPLLAYCTLPAICLLTGKFITPELNNVASLWFMSLFICIFATSILEMRWSGVGIDDWWRNEQFWVIGGVSSHLFAVFQGLLKVIAGVDTSFTVTSKGGDDDEFSELYTFKWTTLLIPPTTLLLLNFIGVVAGVSNAINNGYESWGPLFGKLFFAFWVIVHLYPFLKGLVGRQNRTPTIVIVWSILLASIFSLLWVRIDPFLAKDDGPLLEECGLDCN

SEQ ID NO: 54837 - protein, 140 aa, Zea mays
  Coding DNA Sequence Number=SeqID_13058
  Subcellular localization annotation: CTP_CleavageSite=28; ConfidenceScore=5.39e-01
MAGAWPPARHALDSLATAPLLLPARPPTAASLPTRPRRRAELSAPRTCYALDKLFESENHYRSRGFESAIGTLFMKIVLFLAQVRLLITRCGGQEPSRPQVDVTGGLLRIVKLIDESEDGWTKQVSEQKLIAKWSSPNKH

SEQ ID NO: 54838 - protein, 64 aa, Zea mays
  Coding DNA Sequence Number=SeqID_13059
MEEKEIGCMRQIRSCVSAVGPWRMQAEMSQGRLDDRGRRRRASRATPRRSIRNGPLFPRDPRRP

SEQ ID NO: 54839 - protein, 113 aa, Zea mays
  Coding DNA Sequence Number=SeqID_13060
  Gene Ontology: Mol. function=intramolecular transferase activity, phosphotransferases; Cellular component=chloroplast; Biological process=carbohydrate metabolic process
  Homolog annotation: Hit_ID=Q53QR8; Match level="QueryCoverage=71%, HitCoverage=13%, E-value=3e-27, Identity=77%"; Hit description =Phosphoglucomutase/phosphomannomutase, C-terminal domain, putative
MPAPSTGSPLRVILKSIFLLSCMLLTERVDLWYEFNYNSGQLAPKTIIDQIYGNTLSISEIKTADIPDNVLSSVGVVSDGEFTIEVIDHVLDYLELVDNVFDFQLIKDLLFSA

SEQ ID NO: 54840 - protein, 103 aa, Zea mays
  Coding DNA Sequence Number=SeqID_13061
MVSIGKGLREEDEREATSCGQRRTVAQRAQRGVGGASAGRPPLEAEQGGAKARWPGSPGRGELGAKRRPWEGAGERAAMELEQRKAARVDKGAGAVAVEKDQG

SEQ ID NO: 54841 - protein, 144 aa, Zea mays
  Coding DNA Sequence Number=SeqID_13062
MAIERRNGIMPKFTLSNMRILMIMKIHRPTSGLEKKRKRSPKGADKESKKTTDVEAEEDEASKIDEEPPSGPIEVKIPISKGGKSSKGKEILYEEEVESPHILGLGSAAFGSSSSSKKDGATKSAKKSAKDDRSSGHKKTEEGP

SEQ ID NO: 54842 - protein, 69 aa, Zea mays
  Coding DNA Sequence Number=SeqID_13063
MAMMGSTSEKMYLCQPYLDFLNQHTLESLFFSRVRKRQIFVASALRWCQKKNTRNEVWEERIVHIELFV

SEQ ID NO: 54843 - protein, 202 aa, Zea mays
  Coding DNA Sequence Number=SeqID_13064
  Homolog annotation: Hit_ID=Q6QP54; Match level="QueryCoverage=56%, HitCoverage=38%, E-value=4e-08, Identity=51%"; Hit description =Putative kinase
MARLSRYALGQFGPVTDRLALMSDRQSTELPRQCHIWSNSLDTPSDCSAQSRAVRALMIDRLGLELNLDAGRRTPPCPTQGSDSASTPEDGLRLAQPRARTQPRPRKTNSASPDPGLGLSLGLERWSPPRPTLGLGLSLGLGTRSPPRPTPGLGLSLDIGRRTPPRPTPGLGLDLDLGGAFASPDLGLGPATSQGRPSLPYP

SEQ ID NO: 54844 - protein, 164 aa, Zea mays
  Coding DNA Sequence Number=SeqID_13065
  Gene Ontology: Mol. function=transferase activity; Cellular component= membrane
  Homolog annotation: Hit_ID=Q10M35; Match level="QueryCoverage=51%, HitCoverage=18%, E-value=5e-27, Identity=80%"; Hit description =Secondary cell wall-related glycosyltransferase family 47, putative, expressed
  Pfam annotation: Domain name=Exostosin; Domain location=2-163; Score=- 71.4; E_value=0.00014; Accession=PF03016.6; Description=Exostosin family
MNSRCITHGGAERLQGIRPAVQKVVLAIMTERQIWCLAGASALHDLVLKLDHFGSFLEVSARSKKRIAKLVEVVASMQLIRQELCYFLKDRKMCISHVLSVAGNGIEQATQGMRSSKFCLNIAGDTPSSNRLFDYIVSHCVPVIISDEIELRLRMSSTTRSLVS

SEQ ID NO: 54845 - protein, 137 aa, Zea mays
  Coding DNA Sequence Number=SeqID_13066
MEAKAVKIDGKYLTKTETPKSWDIRGSNVRLNRVFELNNLWYGLYPEEGSTDVRDVKGQKRKGGIRRGGVDEGCSKGKAKMPPMKKKKKVEAKNKGLTRVVRLTEISDRFAEELAETCAEPREEQFKGVFDWMYKEG

SEQ ID NO: 54846 - protein, 121 aa, Zea mays
  Coding DNA Sequence Number=SeqID_13067
MGTTSSGGKNPSARLNLLTFRASVPLERKNDGKDLAPAIRRGTISTAQASTKVIGGFDPKAEARFRIGESLNRSEVLTPQATAEGPPLAETMMTKGVLLALKTGNSVTSEFRTHISPHGCS

SEQ ID NO: 54847 - protein, 691 aa, Zea mays
  Coding DNA Sequence Number=SeqID_13068
MDQDTPTLKPGWMQHDKAAGAPNIWTIASSHSDYQAAGGSSRSHSSEHYRNHGSQQSSSRRSSGSNGSRQPDRDAIGKSRDYFNFGKSKDRDRQRDFDSRDWESRSAGAVRDDFKSFSTCKSERDRMNHARSKADTWSKASGSTSRNNAVSSSTGTVVNSVRNAALGTSISNASVRTSVRNTSISNAVSNASNAASITFEREFPQLSSEDKNGRQGISKIPSAGISTSIQNVPLVSSDGWSSMLADLPLLSDPKKSLATSSLLHIAPSKQTEVVPNTGTALSMAETVMQAPLRISIGPELSTEAQKIEERTLKQLTLRPITPPASKSSALSSLKIKGTRLGDHPTGPSKTSQLLKIQSANTSSRAPVKADVSKLSQPGSFQVLSREQNGTAHTAKDCPVKPVSPPTPLASLETQKKTVASQKLKFGTNESLLPLQGPSRDRKSNARDKVRFFEMLRTKSSNGSSTAFEPGSQPSPSSLVDVKQDSSLNLGNDFHVFCSEIKCTEHRRCFCEEANSSDGSQRHLSDTEEHIASLKLSVMGGMPQQPLVERREANSSSEPADTGDEGFQSFLSDSAEVSLSSTLADSDDGWNRSQSGNEEASSLSEDTESDDDFHPADISPEDKRFMMLLGWKEDEIVQVTPLDFDEIADTVKGCEELKKKLQSMQFNEEVKSILLHIELDEKQQQQHKSTGD

SEQ ID NO: 54848 - protein, 442 aa, Zea mays
  Coding DNA Sequence Number=SeqID_13069
  Gene Ontology: Mol. function=galactosyltransferase activity; Cellular component=membrane; Biological process=protein amino acid glycosylation
  Homolog annotation: Hit_ID=Q9ZS49; Match level="QueryCoverage=82%, HitCoverage=92%, E-value=1e-157, Identity=76%"; Hit description=Avr9 elicitor response protein
  Pfam annotation: Domain name=Galactosyl_T; Domain location=187-385; Score=215.1; E_value=1.6e-61; Accession=PF01762.12; Description =Galactosyltransferase
  Subcellular localization annotation: CTP_CleavageSite=92; ConfidenceScore=5.28e-01
MKGKGGPVDRRSSARWRLLVLCAFSFGIGMLFTDRSNRLKFGRSRFSRGLPRQSTGLKFGRSRFSRGLRCRCIWVGRGSGQHRIPVAIPCLNAGGKSKSSNLYQKIATQRGWKHGEDKDIMGEVTKTHEAIQSLDKSISTLQMELAAKRSTLELLRSSGSPVTSETNQPRKKAFVVIGVNTAFSSRKRRDSVRETWMPQGEKLQQLEEQKGIVIRFTIGHSATSNSILDKAIDSEDAQHHDFLRLDHVEGYHELSAKTKIFFSTAVGIWDADFYVKVDDDVHVNLGMLATTLARHKSKPRTYIGCMKSGPVLADKNVKYHEPEYWKFGEEGNKYFRHATGQIYAISKDLATYISINRPILHKYANEDVSLGSWFIGLEVNHIDERNMCCGTPPDCEWKGQAGNVCVASFDWSCSGICKSVERIKDVHARCGEGDSAVWSALV

SEQ ID NO: 54849 - protein, 107 aa, Zea mays
  Coding DNA Sequence Number=SeqID_13070
  Gene Ontology: Mol. function=RNA-directed DNA polymerase activity; Biological process=RNA-dependent DNA replication
  Homolog annotation: Hit_ID=UPI00004C1734; Match level="QueryCoverage =51%, HitCoverage=15%, E-value=2e-18, Identity=78%"; Hit description =UPI00004C1734 related cluster
MTFFVEDLARNGFVGAGGGWTGECSDDVWCRREAVAALGPRRRRGGGVAMCEAYVDDIGVKTKKIHNLVSDLETTFACLRTKSIKLNPEKCVFGVPRGMLLGFIVSE

SEQ ID NO: 54850 - protein, 136 aa, Zea mays
  Coding DNA Sequence Number=SeqID_13071
MGGGGGGEGIATGRGRLVPHQHVGVVHLEVEEVLFWHPSMAERWCALAHDLGDGGTDADHQWGAGAIIYAGWEWGWGGDRCGTGWLVPHRRVGVVHLEVEEALYWHPAMAERWCALAQLHVVVVKVDLTVHLVYAR

SEQ ID NO: 54851 - protein, 75 aa, Zea mays
  Coding DNA Sequence Number=SeqID_13072
MAKIPNHRRRSSYSLQLMDDDTIIPCITLILDGNLTQGPYDLIFNGKSISGDYSLKGQMNEGKSMEQSNWTVKGD

SEQ ID NO: 54852 - protein, 80 aa, Zea mays
  Coding DNA Sequence Number=SeqID_13073
MNLDELLEKKCSTPVGRGGGGSDQSDAAPLSPHTSSDLQPPCAQQLIWLLLRARNYLLKAGKVVGKGEPLHKKRYSRIFC

SEQ ID NO: 54853 - protein, 106 aa, Zea mays
  Coding DNA Sequence Number=SeqID_13074
MDITGGATGVLAAREGLGAGFCEGRLQHGYYAMHIGSKRGSMAGDRGMAERPATGSRPRKTDLVIRCWWLARLRNGPHTTEGKGSARATYGPACEELAGCGGDPHV

SEQ ID NO: 54854 - protein, 106 aa, Zea mays
  Coding DNA Sequence Number=SeqID_13075
MDITGGATRVLAAREGLGAGFCEGRLQHGYYATHIGSRHGSMAGDRGMAERPATGSRPRKTDLVIGCWWLARLRNGPHTTEGKGSARATYGPACEELAGCGGDPHV

SEQ ID NO: 54855 - protein, 219 aa, Zea mays
  Coding DNA Sequence Number=SeqID_13076
MARTPDTARPFVHLVLLLGAISPPSPRCCACLYHGDVPKHVTEANLLVLFCEVATVEEVIIIKDKATKVSQGVDLPGPRSRLVALPSPRLLPLGSPQCCDLHYSLQGSCAPLGVGFGSNREEKNVEKDIRVAAKRNDMGSAKKQPDLYDTNRPGWGTRPHGRPYLDSEAKDSALVIFTVTVPEENVKVDRPTRIRKPNRGIADTKYHDQFPKELLSNDN

SEQ ID NO: 54856 - protein, 77 aa, Zea mays
  Coding DNA Sequence Number=SeqID_13077
MELREQGQALGVRRARGTSSQKKQVVSWRAATGISSSCDWIRYSPRLPLSLLRPSLRYPLSCPPSSVRPLEPIGTRD

SEQ ID NO: 54857 - protein, 1029 aa, Zea mays
  Coding DNA Sequence Number=SeqID_13078
  Gene Ontology: Mol. function=protein serine/threonine kinase activity; Cellular component=integral to membrane; Biological process=protein amino acid phosphorylation
  Homolog annotation: Hit_ID=Q2R440; Match level="QueryCoverage=96%, HitCoverage=95%, E-value=0.0, Identity=39%"; Hit description=Leucine Rich Repeat family protein
  Pfam annotation: Domain name=LRRNT_2; Domain location=17-58; Score =42.0; E_value=2.1e-09; Accession=PF08263.3; Description=Leucine rich repeat N-terminal domain
  Pfam annotation: Domain name=LRR_1; Domain location=113-135; Score =12.7; E_value=1.2; Accession=PF00560.23; Description=Leucine Rich Repeat
  Pfam annotation: Domain name=LRR_1; Domain location=137-160; Score =6.1; E_value=21; Accession=PF00560.23; Description=Leucine Rich Repeat
  Pfam annotation: Domain name=LRR_1; Domain location=162-184; Score =16.5; E_value=0.099; Accession=PF00560.23; Description=Leucine Rich Repeat
  Pfam annotation: Domain name=LRR_1; Domain location=186-208; Score =10.0; E_value=3.8; Accession=PF00560.23; Description=Leucine Rich Repeat
  Pfam annotation: Domain name=LRR_1; Domain location=210-232; Score =17.2; E_value=0.059; Accession=PF00560.23; Description=Leucine Rich Repeat
  Pfam annotation: Domain name=LRR_1; Domain location=234-257; Score =5.3; E_value=30; Accession=PF00560.23; Description=Leucine Rich Repeat
  Pfam annotation: Domain name=LRR_1; Domain location=259-281; Score =9.7; E_value=4.4; Accession=PF00560.23; Description=Leucine Rich Repeat
  Pfam annotation: Domain name=LRR_1; Domain location=283-305; Score =7.4; E_value=12; Accession=PF00560.23; Description=Leucine Rich Repeat
  Pfam annotation: Domain name=LRR_1; Domain location=307-335; Score =3.4; E_value=67; Accession=PF00560.23; Description=Leucine Rich Repeat
  Pfam annotation: Domain name=LRR_1; Domain location=337-360; Score =6.6; E_value=17; Accession=PF00560.23; Description=Leucine Rich Repeat
  Pfam annotation: Domain name=LRR_1; Domain location=362-384; Score =13.1; E_value=0.99; Accession=PF00560.23; Description=Leucine Rich Repeat
  Pfam annotation: Domain name=LRR_1; Domain location=386-408; Score =10.2; E_value=3.6; Accession=PF00560.23; Description=Leucine Rich Repeat
  Pfam annotation: Domain name=LRR_1; Domain location=410-432; Score =9.9; E_value=4; Accession=PF00560.23; Description=Leucine Rich Repeat
  Pfam annotation: Domain name=LRR_1; Domain location=434-456; Score =5.8; E_value=24; Accession=PF00560.23; Description=Leucine Rich Repeat
  Pfam annotation: Domain name=LRR_1; Domain location=458-480; Score =8.9; E_value=6.1; Accession=PF00560.23; Description=Leucine Rich Repeat
  Pfam annotation: Domain name=LRR_1; Domain location=482-504; Score =15.1; E_value=0.25; Accession=PF00560.23; Description=Leucine Rich Repeat
  Pfam annotation: Domain name=LRR_1; Domain location=506-528; Score =14.7; E_value=0.33; Accession=PF00560.23; Description=Leucine Rich Repeat
  Pfam annotation: Domain name=LRR_1; Domain location=530-552; Score =7.4; E_value=12; Accession=PF00560.23; Description=Leucine Rich Repeat
  Pfam annotation: Domain name=LRR_1; Domain location=554-576; Score =5.3; E_value=29; Accession=PF00560.23; Description=Leucine Rich Repeat
  Pfam annotation: Domain name=LRR_1; Domain location=578-600; Score =18.7; E_value=0.021; Accession=PF00560.23; Description=Leucine Rich Repeat
  Pfam annotation: Domain name=LRR_1; Domain location=602-625; Score =12.0; E_value=1.6; Accession=PF00560.23; Description=Leucine Rich Repeat
  Pfam annotation: Domain name=LRR_1; Domain location=89-111; Score =16.0; E_value=0.14; Accession=PF00560.23; Description=Leucine Rich Repeat
  Pfam annotation: Domain name=Pkinase; Domain location=723-1002; Score= 115.0; E_value=2.1e-31; Accession=PF00069.15; Description=Protein kinase domain
  Pfam annotation: Domain name=Pkinase_Tyr; Domain location=723-1017; Score=57.0; E_value=5.8e-16; Accession=PF07714.7; Description =Protein tyrosine kinase
  Pfam module annotation: Pfam domain module=LRRNT_2::LRR_1::LRR_1::LRR_ 1::LRR_1::LRR_1::LRR_1::LRR_1::LRR_1::LRR_1::LRR_1::LRR_1::LRR_1: LRR_
  Pfam module annotation: Pfam domain module=Pkinase_Tyr; Domain location=17-58::113-135::137-160::162-184::186-208::210-232::234 -257::259-281::283-305::307-335::337-360::362-384::386-408::410 -432::434-456::458-480::...
  Pfam module annotation: Domain location=482-504::506-528::530 -552::554-576::578-600::602-625::89-111::723-1002::723-1017
MAPRSVSLLLLLTLVVAADDEAALIAFKAAAIFGGDTLASWNSSGAGGFCGWVGVTCGGGAKHRRVVALSLPLHGLSGSLSPAVGNLSFLRTLNLSSNALSGGIPDSLGRLRLLRELDLSSNAFSGEVPANLSSCTSLVLMRLRFNQLTGSVPYELGEKLMNLVVLSVWNNSLTGTIPASLANLSSLSILSLGFNQLHGTIPPGIGAIQALQHLDLNDNHLSGEPPHSLYNLTSLERFQLSDNMLHGRIPDAIGIRFHSMQMLEFYANQFTGSIPVSLFNLTTLQMLDLSENRLGGYVSGAVGRLVALQSLLLYGNLLQADDKEGWEFITSLSNCTQLVEFEIGLNAGLTGQLPSSIANLSSLQTLRFDGSGISGSIPSAIGNLLNLQVLGMSSTFISGVIPESIGRLGNLTEMDLFSTDLSGIIPLSIGNLKGLNVFDAHHCNLGGPIPASIGNMSNLLTLDLSKNSLDGSISNEIFKLSSLLYLNLSYNSLSGHLPSEMSSLGNLNQLVLSGNRLSGEIPESIGECTVLQYLILDNNSIDGSIPQTLSNIKGLNALNLSMNKLTGVIPSNIGTIQDLQVLYLAHNNLSGPIPSLLQNLTALSELDLSFNNLQGEVPKEGIFRYSTNFSIIGNSELCGGLPQLHLAPCQTDPMKKNRKGQLKHLKIALATIGALLILAFFIALLQFIKKKLIRNRNQPLPPIVEEQHGRVSYHVLANGTNGFSEANLLGKGSFGAVYKCTLQPEETVTAVKVFNLQQSGSTKSFVAECEALRMVRHRCLIKIITCCSSMNHQDQEFKALVFEFMPNGSLEGWLHPNSDILTMTNTLSLEQRLDIAVDIMDALNYLHNHCQPPIAHCDLKPSNILLAEDMSARVGDFGISRILPENASKILQNSNSTIGIRGSVGYVAPEYAEGSTVSTIGDVYSLGILLLEMFTGRSPIDDMFGDTVDLHNYAKHALSERILDIVDSTIWLHVESTDSTIRSRIKDCLVSVFRLAISCSKLRPGDRTVMSDAAAEMHAIRDTYHMFCC

SEQ ID NO: 54858 - protein, 205 aa, Zea mays
  Coding DNA Sequence Number=SeqID_13079
MYPIAKEESVLIHRFLFLLTQHPKLAHSTTLGQLTEYLRMNTQRSGPHPNSREPRASPKRLKPHPDQGTSPETLLNEDTRRGGGKELSQGRAVPLLPHRLRPSAAMYPATHGVGHGGKPGLGLHGTMCLSINHEQDVYLPAPAVDTTTKRHVPHNGSRAIEAGPLTLCTTWVAAIMVPTVAREEPRKRVTNGGDGTTSLEHPYTR

SEQ ID NO: 54859 - protein, 107 aa, Zea mays
  Coding DNA Sequence Number=SeqID_13080
MATSGLTSRHGRIGTRCRYLAGSSCWDPGSEGEGHVAEGACVVEREGEAEASRFWEVYDVLPCPLKYMGHYRDPDAKVSTAGLSDPTSHQRYVSDVVPDKDPSVPLP

SEQ ID NO: 54860 - protein, 685 aa, Zea mays
  Coding DNA Sequence Number=SeqID_13081
  Gene Ontology: Mol. function=protein serine/threonine kinase activity; Cellular component=integral to membrane; Biological process=protein amino acid phosphorylation
  Homolog annotation: Hit_ID=Q2R440; Match level="QueryCoverage=98%, HitCoverage=94%, E-value=1e-157, Identity=37%"; Hit description =Leucine Rich Repeat family protein
  Pfam annotation: Domain name=LRR_1; Domain location=121-143; Score =0.4; E_value=2.3e+02; Accession=PF00560.23; Description=Leucine Rich Repeat
  Pfam annotation: Domain name=LRR_1; Domain location=145-167; Score =12.3; E_value=1.4; Accession=PF00560.23; Description=Leucine Rich Repeat
  Pfam annotation: Domain name=LRR_1; Domain location=169-191; Score =8.6; E_value=7; Accession=PF00560.23; Description=Leucine Rich Repeat
  Pfam annotation: Domain name=LRR_1; Domain location=193-215; Score =6.4; E_value=18; Accession=PF00560.23; Description=Leucine Rich Repeat
  Pfam annotation: Domain name=LRR_1; Domain location=217-239; Score =18.2; E_value=0.029; Accession=PF00560.23; Description=Leucine Rich Repeat
  Pfam annotation: Domain name=LRR_1; Domain location=24-46; Score=9.2; E_value=5.5; Accession=PF00560.23; Description=Leucine Rich Repeat
  Pfam annotation: Domain name=LRR_1; Domain location=240-263; Score =14.1; E_value=0.5; Accession=PF00560.23; Description=Leucine Rich Repeat
  Pfam annotation: Domain name=LRR_1; Domain location=48-70; Score =16.1; E_value=0.13; Accession=PF00560.23; Description=Leucine Rich Repeat
  Pfam annotation: Domain name=LRR_1; Domain location=72-94; Score=4.1; E_value=50; Accession=PF00560.23; Description=Leucine Rich Repeat
  Pfam annotation: Domain name=LRR_1; Domain location=96-118; Score =12.9; E_value=1.1; Accession=PF00560.23; Description=Leucine Rich Repeat
  Pfam annotation: Domain name=Pkinase; Domain location=361-663; Score =110.6; E_value=4.7e-30; Accession=PF00069.15; Description=Protein kinase domain
  Pfam annotation: Domain name=Pkinase_Tyr; Domain location=361-655; Score=57.4; E_value=5.4e-16; Accession=PF07714.7; Description =Protein tyrosine kinase
  Pfam module annotation: Pfam domain module=LRR_1::LRR_1::LRR_1::LRR _1::LRR_1::LRR_1::LRR_1::LRR_1::LRR_1::LRR_1::Pkinase::Pkinase_Ty ; Domain location=121-143::145-167::169-191::193-215::217-239::24
  Pfam module annotation: Domain location=72-94::96-118::361-663::361 -655
MQGLMLADTGIVGSIPLEIGNLFNLQFFSVSNTSVSGAVPDSIGKLVNLVELNLYNTNLSGLIPSSIGNLSELAALVAFNSNLEGPIPKSIGRLKNLYALDISSNRLNGSIPVEIFQLPLLSRYLGLLHNSLSGTLPAEVGSLINLNILALSRNQLSGEIPGSIGDCTVLQELGLDDNLFEGAIPQSLSNIKGLTGLNLSMNKLSGVIPEAIGSMRNLQQLYLAHNNLSGTIPIILQNLTLSELDLSFNNLQGEVPKEGIFKILANLSITGNNDLCGGVTELRLPPCHINVVKSNKKEKLKSLTIGLATTGALLFLAFAIAAQLICKKLRQRQTRSFQPPKIEEHYERVSYQTLENGTNGFSEANLLGKGSFGEVYKCTFQDEGNIAAVKVFRLEQTRSIKSFVAECEALRRVRHRCLIKIITCCSSINHQGQEFKALVFEFMPNGILNDWIHSKSAMPTLRNSLSLEQRLNIAVDIIDALDYLHNHCQPPIVHCDLKPSNILLAEDMSARVGDFSISRILPESASKALQNSNSTIGIRGSIGYVAPEYGEGSSVSTIGDVYSLGILLLEMFTGRSPTDDMFSGSLDLHRFSGDALPERIWEIADTTMWIHTGAFDSTTRYRIEKCLASVFALGISCSKKQPRERTLIHDAATEMNAIRDSYLHISRSPMVECGVDNSAVICNDN

SEQ ID NO: 54861 - protein, 164 aa, Zea mays
  Coding DNA Sequence Number=SeqID_13082
MWKFRGRKKGTMWRFLLVDATELAHKANTRFQFYVSYVKDFGKQVTEVAKLVPQQEAHQIQRDPGRLGLALSADITKHTGCLLGHHQATWPSPSSPHLRLASRTGNSSSGIGSRASVHLITCYSLLTNIVSRKVCGQSPMVLIVQESHQYHSFFVILNVCYIYN

SEQ ID NO: 54862 - protein, 115 aa, Zea mays
  Coding DNA Sequence Number=SeqID_13083
  Subcellular localization annotation: CTP_CleavageSite=59; ConfidenceScore=5.71e-01
MRKDAPTRRSTPPLPPSPTLTRTPPFRPGRRRLGLRPRPTSTRCRYPHPHTSLRPWDVVVAYFSVIFVIVVRPWGSNASSSNIQEHTDMKMDDDGDDYTFDAAQPLHYLRFVGDA

SEQ ID NO: 54863 - protein, 271 aa, Zea mays
  Coding DNA Sequence Number=SeqID_13084
  Gene Ontology: Mol. function=calcium ion binding; Cellular component =membrane; Biological process=homophilic cell adhesion
  Homolog annotation: Hit_ID=UPI0000DA43ED; Match level="QueryCoverage =66%, HitCoverage=98%, E-value=6e-14, Identity=28%"; Hit description =PREDICTED: similar to keratinocytes proline-rich protein
MTLPVDVVGPCPRLGEVEAPPRSRSSLSSKVEVESEPPGRTRRRPSAEARAESEPWGRARRSSSSFGAEPESEPWGRAKRSSSSSGAEPESEPWGRAEQSSSSSGAEPESEPWGRAERSSSSFGAEPESEPWGRAERSSSSSGAEPESEPWGRAERSSSSSGAEAESEPWGPVERSSSSSGAEPESEPWGRAERSSSSSGPSPSPSSGVGSRSGAGGAVLLSDRSVERRSDCGHFGSVDWRACVRIKLCADGGYQLRFRSLEGTPNYGPRQ

SEQ ID NO: 54864 - protein, 173 aa, Zea mays
  Coding DNA Sequence Number=SeqID_13085
MGKSKKGGSSSHHSGDKWKHEPSPPSEDFGDSEYSEEEFSFESEGSPIYASPPASSDGSDDSQGIATEVWTYIQAVERSRLEGLDESEVSSDEENSSDSSEEESNGDGDNEGDSDDGGDGDCDGDDGKGDDGGDGDGDSGKGDGNGDGKGDDDGGGGKGDSGSSKASGKAPLV

SEQ ID NO: 54865 - protein, 183 aa, Zea mays
  Coding DNA Sequence Number=SeqID_13086
  Subcellular localization annotation: CTP_CleavageSite=59; ConfidenceScore=5.42e-01
MPMAQTTARVRPVVSKSQAHAQHCPSQPVNGTLDSFCNTAERKTKLTRLAPTRPTAVPREGEYVNGAKASMSRCDKRGGQHDSVMREFVERGKNALTRWVPRAVRSGARQQPDPLGFAAAATTNAEIPGWKMHSSGRGATDAGKATPHGSDQTLAFTDRQADRWARLLALHQVELEFRINFLM

SEQ ID NO: 54866 - protein, 215 aa, Zea mays
  Coding DNA Sequence Number=SeqID_13087
  Homolog annotation: Hit_ID=Q6QP51; Match level="QueryCoverage=26%, HitCoverage=25%, E-value=2e-07, Identity=54%"; Hit description =Putative growth-regulating factor 1
MARPPPSSLRNGDEGAYNKKSRQSLIILSLRAEARGLLSHQATAKLSTTSTNQLKNSEPDHGNNAIHLRSDYCTNHQGETGDSLSLSLGLRRRSPPRPTSGLGLGLGLGRSHILARPQPQPREKSPPRPTLTSDQLRHWGYIIIIPLASYLRIRRNKTGVPSGLLRQQWAGNGYPPDSGYPVWIHELYIHVLLAQLPSLAKVIPFHPCGGTCFPS

SEQ ID NO: 54867 - protein, 64 aa, Zea mays
  Coding DNA Sequence Number=SeqID_13088
MERREMKEMGARREHARGHGRELEGFAEERIRNRVRDGGYWINKNGDDDRIDTLPQTFSCRGSN

SEQ ID NO: 54868 - protein, 113 aa, Zea mays
  Coding DNA Sequence Number=SeqID_13089
MGVVVGPNCAKASRDDVKLQEPGDAVTQPEQIEAPGTWAGQRVGGSSRRARQGPEHSALRSSAEERRPWETREGGSRLGREIRAGVRRSRQPWEGADELGEMGRREARAQPWS

SEQ ID NO: 54869 - protein, 113 aa, Zea mays
  Coding DNA Sequence Number=SeqID_13090
MGVVVGPNCAKASRDDVKLQEPGDAVTQPEQIEAPGTWAGQRVGGSSRRARQGPEHSALRSSAEERRPWETREGGSRLGREIRAGVRRSRQPWEGVDELGEMGRREARAQPWS

SEQ ID NO: 54870 - protein, 100 aa, Zea mays
  Coding DNA Sequence Number=SeqID_13091
  Gene Ontology: Mol. function=GTPase activity; Cellular component =intracellular; Biological process=small GTPase mediated signal transduction
  Homolog annotation: Hit_ID=Q5VQ69; Match level="QueryCoverage=63%, HitCoverage=9%, E-value=1e-28, Identity=95%"; Hit description =Putative GTP-binding membrane protein LepA
MVFFGLYPADGSDFEALSHAIEKLTCNDASVSVTKETSNALGMGFRCGFLGLLHMDVFHQRLEQLGLLKDKFFQLDEGQISAKDYLKDKIRIPEERIDTH

SEQ ID NO: 54871 - protein, 358 aa, Zea mays
  Coding DNA Sequence Number=SeqID_13092
  Gene Ontology: Mol. function=transcription regulator activity; Cellular component=nucleus; Biological process=regulation of transcription
  Homolog annotation: Hit_ID=Q1T110; Match level="QueryCoverage=56%, HitCoverage=57%, E-value=1e-22, Identity=35%"; Hit description=Helix- loop-helix DNA-binding
  Pfam annotation: Domain name=HLH; Domain location=151-200; Score =35.9; E_value=1.4e-07; Accession=PF00010.16; Description=Helix-loop -helix DNA-binding domain
MDMEHQLLHLERFMASSPGFFTVDSGQDPAHFPNGGLFVEQVGATGGVGGDDGGWVEDLMQLGEELFGGRGDANGTDDGMGDDHYYQQWQCDDGGSPDGGPPPSVSLDGDASPPSGEQEQGTVELASERHPHREAEDGDDDVLGATRKRRDRSKTIVSERKRRVRMKEKLYELRALVPNITKMDKASIIADAVVYVKNLQAHARKLKEEVAALEARPRSPTGQHSGPAGAGRRRHQQQQQERRRDAGRSAGSGARVTHVGAVQVGEGRFFVTVECERRDGVAAPLCAAAESLACFRVETSSVGGRSGPDRVVSMSTLTLKGRGQLGDAAAIGEASVKLWMMAALVKEGFRPAATVQIS

SEQ ID NO: 54872 - protein, 1271 aa, Zea mays
  Coding DNA Sequence Number=SeqID_13093
  Gene Ontology: Mol. function=binding; Cellular component=plastid chromosome; Biological process=positive regulation of transcription, DNA-dependent
  Homolog annotation: Hit_ID=Q69K58; Match level="QueryCoverage=82%, HitCoverage=81%, E-value=0.0, Identity=38%"; Hit description =Putative PPR protein
  Pfam annotation: Domain name=PPR; Domain location=1023-1057; Score =28.3; E_value=2.6e-05; Accession=PF01535.11; Description=PPR repeat
  Pfam annotation: Domain name=PPR; Domain location=1058-1092; Score =16.4; E_value=0.086; Accession=PF01535.11; Description=PPR repeat
  Pfam annotation: Domain name=PPR; Domain location=1093-1127; Score =25.6; E_value=0.00018; Accession=PF01535.11; Description=PPR repeat
  Pfam annotation: Domain name=PPR; Domain location=1128-1162; Score =5.7; E_value=1.6; Accession=PF01535.11; Description=PPR repeat
  Pfam annotation: Domain name=PPR; Domain location=219-253; Score =36.3; E_value=1.1e-07; Accession=PF01535.11; Description=PPR repeat
  Pfam annotation: Domain name=PPR; Domain location=291-325; Score =44.2; E_value=4.6e-10; Accession=PF01535.11; Description=PPR repeat
  Pfam annotation: Domain name=PPR; Domain location=326-360; Score =46.2; E_value=1.1e-10; Accession=PF01535.11; Description=PPR repeat
  Pfam annotation: Domain name=PPR; Domain location=361-395; Score =29.2; E_value=1.5e-05; Accession=PF01535.11; Description=PPR repeat
  Pfam annotation: Domain name=PPR; Domain location=396-430; Score =51.6; E_value=2.6e-12; Accession=PF01535.11; Description=PPR repeat
  Pfam annotation: Domain name=PPR; Domain location=431-465; Score =36.8; E_value=7.5e-08; Accession=PF01535.11; Description=PPR repeat
  Pfam annotation: Domain name=PPR; Domain location=466-500; Score =31.7; E_value=2.6e-06; Accession=PF01535.11; Description=PPR repeat
  Pfam annotation: Domain name=PPR; Domain location=501-535; Score =30.2; E_value=7.3e-06; Accession=PF01535.11; Description=PPR repeat
  Pfam annotation: Domain name=PPR; Domain location=536-569; Score=7.6; E_value=0.93; Accession=PF01535.11; Description=PPR repeat
  Pfam annotation: Domain name=PPR; Domain location=673-707; Score =13.2; E_value=0.21; Accession=PF01535.11; Description=PPR repeat
  Pfam annotation: Domain name=PPR; Domain location=708-742; Score =23.3; E_value=0.00089; Accession=PF01535.11; Description=PPR repeat
  Pfam annotation: Domain name=PPR; Domain location=778-812; Score =36.6; E_value=8.9e-08; Accession=PF01535.11; Description=PPR repeat
  Pfam annotation: Domain name=PPR; Domain location=813-847; Score=9.3; E_value=0.6; Accession=PF01535.11; Description=PPR repeat
  Pfam annotation: Domain name=PPR; Domain location=848-882; Score =25.5; E_value=0.00019; Accession=PF01535.11; Description=PPR repeat
  Pfam annotation: Domain name=PPR; Domain location=883-917; Score =29.7; E_value=1e-05; Accession=PF01535.11; Description=PPR repeat
  Pfam annotation: Domain name=PPR; Domain location=918-952; Score =20.3; E_value=0.0068; Accession=PF01535.11; Description=PPR repeat
  Pfam annotation: Domain name=PPR; Domain location=953-987; Score =33.7; E_value=6.5e-07; Accession=PF01535.11; Description=PPR repeat
  Pfam annotation: Domain name=PPR; Domain location=988-1022; Score =16.3; E_value=0.087; Accession=PF01535.11; Description=PPR repeat
  Pfam annotation: Domain name=TPR_4; Domain location=1057-1082; Score =4.1; E_value=12; Accession=PF07721.5; Description=Tetratricopeptide repeat
  Pfam annotation: Domain name=TPR_4; Domain location=218-243; Score =10.2; E_value=2.3; Accession=PF07721.5; Description=Tetratricopeptide repeat
  Pfam annotation: Domain name=TPR_4; Domain location=325-350; Score =11.8; E_value=1.5; Accession=PF07721.5; Description=Tetratricopeptide repeat
  Pfam annotation: Domain name=TPR_4; Domain location=777-802; Score =3.3; E_value=15; Accession=PF07721.5; Description=Tetratricopeptide repeat
  Pfam module annotation: Pfam domain module=PPR::PPR::PPR::PPR::PPR::PP R::PPR::PPR::PPR::PPR::PPR::PPR::PPR::PPR::PPR::PPR::PPR::PPR::PP ::PP R::PPR::PPR::TPR_4::TPR_4::TPR_4::TPR_4; Domain
  Pfam module annotation: Domain location=1093-1127::1128-1162::219 -253::291-325::326-360::361-395::396-430::431-465::466-500::501 -535::536-569::673-707::708-742::778-812::813-847::848-882::883 -917::918-952::953-987::...
  Pfam module annotation: Domain location=988-1022::1057-1082::218 -243::325-350::777-802
  Subcellular localization annotation: CTP_CleavageSite=31; ConfidenceScore=5.30e-01
MTVTSSPLPFLSSSSSLTCHLRRAGTATATAASSASEDFDYPLADPSLRWPHLRFPYLPAPRFPATVAAAPPVPARPPQEVEDPVATSGSASSLVEPLDARAHRGRVKKLSKLALRRAQDWRARVAGLADAVLELPPGAPVDDVLDGARASPDEVAFVVRAVGESSWRRALDAFEWLARSSAPASRAVAVVLGVLGRARQDSIAEEVFLRFAGEGATVQVFNAMMGVYARSGRFDDARQLLDTMHDRGIDPDLVSFNTLINARSKSGCLAAGVALDLLFEVRQSGLRPDVITYNTLISACSQSSNLEDAVTVFEDMIASECRPDLWTYNAMVSVHGRCGKAEEAERLFRELVEKGFMPDAITYNSLLYAFAKEGNVDKVEHTCEQLVKAGFKKNEITYNTMIHMYGKMGRLDLAVGLYDEMRAMGCTPDAVTYTVMIDSLGKMNRIAEAGKVLEDMTDAGLKPTLIAFSALICAYAKGGRRADAENTFDCMIASGVKPDRLAYLVMLDVFARSGDTEKMLCLYRKMMNDNYRPDDDMYQVLLVALAKEDKCEEIEEVIQDMELLCRMNLGIISTMLIKARCVSQGAKLLKKACLQGYKPDIKSLRSIMNAYVMTEKHEEGLSLLECICEHVSFSQDLISECSIMLLCRKQTSISAYEQYSQRLMLKYPDQNCNLYEYLITCLIEAEFFSEACQVFCDMQFIGIEASKSIYESIISTYCKLGFPETAHRLMDDALQSGIPLNILSCRVIIIEAYGKIKLWQQAEILVKGLRQASGIDRRIWNALIHAYAESGLYEKARAVFDNMIKTGPLPTVDSVNGMMRALIVDGRLDELYVVVEELQDMNFKISKSTVLLLLDAFAKAGDVFEVMKIYNGMKAAGYLPNMHLYRSMISLLCHHNRFRDVELMIAEMEGAGFKPDLAILNALLNMYTAAGNFDRTTQVYRSILEAGLEPDEDTYNTLIVMYCRSFRPEEGFTLLNEMGKRGLTPKLQSYKSLLAASAKAELREQADQIFEEMRSKSYQLNRSIYHMMMKIYRNAGNHSKAENLLAVMKEDGIEPTIATMHILMTSYGTAGQPREAENVLNNLKSSSLEVSTLPYSTVFDAYLKNGDYNHGTTKLLEMKRDGVEPDHQVWTCFIRAASLCEQTADAILLLKSLQDCGFDLPIRLLTERTPSLLSEIANYLEELEALEDSAALNFVNAVEDLLWAFECRATASRIFQLAVERSIYRDNVFRVAQKDWGADFRKLSAGAALVGLTLWLDHMQQSNWNTENLTT

SEQ ID NO: 54873 - protein, 100 aa, Zea mays
  Coding DNA Sequence Number=SeqID_13094
MEFVAGRWPWRVAPTWQRKNRTSERAREHERLARGPLLSAHAGMSGFRDPPVSAQRYNQGVRAVNRATWAARCQRETGLNLRLAAQDIDDFSPSFLLCKS

SEQ ID NO: 54874 - protein, 209 aa, Zea mays
  Coding DNA Sequence Number=SeqID_13095
MVRIQQIEAVSSDLIIDTHFESDAGHSGDSTVARWCRSGVPRPDTSDDELPSQGRAMRRRRQSKTVTGFLTTRRAVGTIVHGDGRDHDGGEITPHSEDGDPATLRLIGGGWLTPAELLIGGVIHGDMGHDEQGVRREGLREGNPSFMSLEARNRGVLVCTRGGANSAARLARVVTVAMDGVTGGAQVVVTCVRNPETDTRGPLVSKPMW

SEQ ID NO: 54875 - protein, 147 aa, Zea mays
  Coding DNA Sequence Number=SeqID_13096
  Homolog annotation: Hit_ID=Q6QP51; Match level="QueryCoverage=45%, HitCoverage=30%, E-value=9e-15, Identity=64%"; Hit description =Putative growth-regulating factor 1
MQEACNRAMVVHPFDSVTSGGPARKPGPTCHGSGKGIFRKGILLGQGNGPRALLLFRGSKVAPSGVRKPPKSTRALSPLLIRDSKASPSKGFDSRPRARRVRDDPGYVCYMAKARATLPRLSRLGLAQLVRVCGLARYQVVELGGPA

SEQ ID NO: 54876 - protein, 123 aa, Zea mays
  Coding DNA Sequence Number=SeqID_13097
MGNKNGPPWNLVRLDDYYTIHIEWPNCPDSLMNFPSSPMGRLMHDIELEQLVLYDVVLGLLVSGGHDTANEDVHEARGDEEDPRFVLLEWAAVEPPPRVRRTGHRATWERFLVAVASLMRKAV

SEQ ID NO: 54877 - protein, 46 aa, Zea mays
  Coding DNA Sequence Number=SeqID_13098
MGCSKPSYRAHATDPRSVEANPEVVHCPSLVASPRCPHQLVIKGDP

SEQ ID NO: 54878 - protein, 135 aa, Zea mays
  Coding DNA Sequence Number=SeqID_13099
  Subcellular localization annotation: CTP_CleavageSite=33; ConfidenceScore=5.42e-01
MPHVLFQYADNRIRKTLSTFYSTSQSSTQPPPPAARVVPDGCRCRGPIPALGGAHRQRRSPVPTVAATTAPSQRSATRNKHLAARRRRIPSYGGIPIPVTTVPSRCDVVPPPCRPTPPPLLTLPGVHSSPPSPLP

SEQ ID NO: 54879 - protein, 48 aa, Zea mays
  Coding DNA Sequence Number=SeqID_13100
MEYTLLTDLEPHKKHATIQVCITRKWLFRGANDNAPLQHVDMILSDQK

SEQ ID NO: 54880 - protein, 57 aa, Zea mays
  Coding DNA Sequence Number=SeqID_13101
MARVRGDCLGIVVPVPCSSQNEVALSQLGAVDSFPADASTHVVSGCFHASNVILLGR

SEQ ID NO: 54881 - protein, 80 aa, Zea mays
  Coding DNA Sequence Number=SeqID_13102
MQGSCLTASAAKSTKDLPTLTTPLLPLPLSALTGLGAIYRKIQGLLHKNPETQSTVVKDCGLICVLARVSYAKGFSRRGI

SEQ ID NO: 54882 - protein, 137 aa, Zea mays
  Coding DNA Sequence Number=SeqID_13103
MAMMGSTSKKMYLCQIWREPRPLSANQPGLMADVPRHQLASRHEGSSSGSNDPIGEFETRVERLRSKLHHGCRECARDSRHIAELSAEQWESDHLEQLMEDLMGGGGLDLFAAPPSMNLEDERSPKAGSGAAKDEED

SEQ ID NO: 54883 - protein, 144 aa, Zea mays
  Coding DNA Sequence Number=SeqID_13104
MTRHNPQGEYSGHKLEGKDTVEDGEIIGISAKSQLKLRALCIKNNHLQKQKAILEAKHQRVTMQAKIRQMILDEEQKARKLEQQIANIQGEGLYHLEHGPLIIPAAFQKDIQGEGPYHLQRGPLITPIAFQGVNYLDERSPLAP

SEQ ID NO: 54884 - protein, 116 aa, Zea mays
  Coding DNA Sequence Number=SeqID_13105
MREKCHCPPRGIMRVPSPETRMKPEKIRRDLRIVFVGLWSHWCKQGPRDCSLLIGAAMGVSALAGSWGRRCFCRGGVAAPPVLTGKEEGDKRLRLDPEYPSLESIWFIDIRMSGCC

SEQ ID NO: 54885 - protein, 87 aa, Zea mays
  Coding DNA Sequence Number=SeqID_13106
  Subcellular localization annotation: CTP_CleavageSite=64; ConfidenceScore=5.56e-01
MASLWLARASSQLARRAAGQEASSASCAPRLRPTHQFVAALGSPALDTSRRGFCSVRRFAGESSAAAAAAAVVDEEPESGFAAGDQQ

SEQ ID NO: 54886 - protein, 110 aa, Zea mays
  Coding DNA Sequence Number=SeqID_13107
MGPRNHDGVDDTPVAAPINSEQSLGPCLHQWLHRPANTVLGSRRIFSSFIRVSGDGTRIIPRGGNGISLSWLCSAMALAAGDGQEDARSGEVAARSLMLRWAEVFTWDDK

SEQ ID NO: 54887 - protein, 321 aa, Zea mays
  Coding DNA Sequence Number=SeqID_13108
  Gene Ontology: Mol. function=inositol or phosphatidylinositol phosphatase activity; Cellular component=cytosol; Biological process= sulfur metabolic process
  Homolog annotation: Hit_ID=Q2QWT5; Match level="QueryCoverage=96%, HitCoverage=95%, E-value=1e-124, Identity=65%"; Hit description =Expressed protein
  Pfam annotation: Domain name=Inositol_P; Domain location=11-318; Score=190.8; E_value=3.4e-54; Accession=PF00459.15; Description =Inositol monophosphatase family
MSQATEVVGNPYAAELAAAKKAVALAARLCQRVQRSILHSDIQSKADKTPVTVADYGSQVLVCLVLKKELPSHSFSIIAEEDSKDLREDGAQEIIEHITTLINETIVNDGSYNMSLSKEDVLSAIDGGKSEGGPSGRHWILDPIDGTKGFIRGDQYAVALGLLDEGKVVLGVLGCPNLPLKSTNKNNSSSFGDRIGSLFFATIGCGAQVEALEGSEPQKKLGVRAPPVRMDSQAKYGALARGDGAIFLRIPHKSYIETVWDHAAGSIIVTEAGGMVKDAAGNDLDFCKGRYLDRDRGIIATNKHLMPLVLKAVQEAMKEEQ

SEQ ID NO: 54888 - protein, 111 aa, Zea mays
  Coding DNA Sequence Number=SeqID_13109
  Subcellular localization annotation: CTP_CleavageSite=54; ConfidenceScore=5.76e-01
MPASTAAKSAAAHLARPQARMPSAAKPSATAPPTRPHATKSATAHLARPQARTPAAAKPSVSPLRVAHPPETQQQSDQQKAKTLAMPSQKGLQTGKGLGTPPGGTPNGSNG

SEQ ID NO: 54889 - protein, 70 aa, Zea mays
  Coding DNA Sequence Number=SeqID_13110
  Subcellular localization annotation: CTP_CleavageSite=40; ConfidenceScore=5.39e-01
MAFGVAIVNHHQAPPSAITKLERATSYPSRLTFNITRGVSGGEASPSEPPGVEATSMEPLDTTHGHRVLE

SEQ ID NO: 54890 - protein, 623 aa, Zea mays
  Coding DNA Sequence Number=SeqID_13111
  Gene Ontology: Mol. function=RNA-directed DNA polymerase activity; Cellular component=mitochondrion; Biological process=RNA-dependent DNA replication
  Homolog annotation: Hit_ID=Q8S463; Match level="QueryCoverage=89%, HitCoverage=28%, E-value=0.0, Identity=86%"; Hit description =Putative prpol
  Pfam annotation: Domain name=RnaseH; Domain location=1-116; Score= -20.4; E_value=0.0046; Accession=PF00075.14; Description=RNase H
  Pfam annotation: Domain name=rve; Domain location=335-494; Score =119.7; E_value=8.1e-33; Accession=PF00665.16; Description=Integrase core domain
  Pfam module annotation: Pfam domain module=RnaseH::rve; Domain location=1-116::335-494
MKTRAGAGLLFISPLGKHLRYVLRLHFSASNNVAEYEALVNGLRIAIELGVRRLDARGDSQLVIDQVMKNSHCRDPKMEAYCDEVRRLEDKFYGLELNHIARRYNETADELAKIASGRTTVPPDVFSRDLHQPSVKIDDTSEPEVPSAQSEAPTAQPEAPSAQSEAPLAHPEAPSARPKAPSVQSEVPSAPEGEALRVEEEQSGVAPNRNWQTLYLQYLHRGELPLDRAEARRVARCAKSFVLLGDEKELYHRSPSGILQRCISVAEGQELLREIHSGACGHHAAPRALVGNAFRQGFYWPTAVADATKIVRTCEGCQFYAKHTHLPAQALQTIPITWPFAVWGLDLVGPLQKAPGGYTHLLVAIDKFSKWIEVRPQNCTRSEQAVAFFTNIIHRFKVPNSIITDNGTQFTGRKFLDFCEDHHIRVDWAAVAHPMSNGQVERANGMILQGLKPRIYNDLNKFGKRWMKELPSVVWSLRMTPSRATGFTPFFLFYGVEVVLPTDLEYGSPRTRAYTDQSNQASREDSLDQLEEARDKALLHSARYQQSLRRYHARGVRSRDLQMGDLVLRLRQDARGRHKLTPPWEGPFVIAKVLKPGTYKLANSQGEVYGNAWNIQQLRRFYP

SEQ ID NO: 54891 - protein, 811 aa, Zea mays
  Coding DNA Sequence Number=SeqID_13112
  Homolog annotation: Hit_ID=Q1PEB4; Match level="QueryCoverage=35%, HitCoverage=39%, E-value=1e-71, Identity=52%"; Hit description =Hydroxyproline-rich glycoprotein family protein
  Pfam annotation: Domain name=Extensin_2; Domain location=172-509; Score=-138.2; E_value=0.067; Accession=PF04554.4; Description =Extensin-like region
MAPIILHRALSFSIPLLHRRDVSSPLQASDVSNRPEGLALLTRIAEDTDCCDSGPPLPDHSPLEKSLISKILRLRGVLDLPCRSSCDALDQLLLDTLGVLKVAYPKCLSGVSGNHTSSVREGLVHLHQVLVLVQDCYSKIKQLPNSGSEKQTIMESESLDHVGKRVIEMLDQVTPVVKEMFSSMESSSSAQAAAAAAAWPEDLPERRTLPPVLCRTTSHHPSDGDEVAMHTGRCKVEAPAPGHETDEGVCTREEDGQTSSREPLSAPIPTAEFLPLQPTLSSVSPHLLSAPPPSPMPVVGLSMLLQSWEATQDGHATAAAVVPPAGVAQPAEAAPTAHKDTTPVGTSMEVEGSTSSVLLEAGQPEPCVDSPNGSTQAPAQGGNAAVPNVPPPPPPVPAHRGRSQEGPSMDEPGPAVTDTPPRPPCEMQGEPPALPPAAAKVLPSPSPSPSPPPLPAHRGRFQEGASMDEPGQAVTDTPPRPPCEVQGGPPAPPPAAAKVSPAPPPPPGSISAAVRGKKAASKLKRSTQMGSLYRRLRDRVEGSGSTHGDRMRQNRKRPRTVGASKSDAGGQGMADALAEMAKRSTYFRQIEEDAEKYAAVILELKDAIGSYQSKDMSELVRFRQHVERQLVCLTDETQVLARFEGFPSKKLEALRTAAALYSKLDGTASRLQCWKHTAGPVSAQLDRLESYFNKVKDEVDMVERNRDEEMKRLQSQGVHFDFGVLVRIKEGMVDLSSACMELALKESQDARETPTPTRAKWASSHGDGESRMLWRVFQLAFRVYNFAGGQDERADRLTSILAHEIEERALL

SEQ ID NO: 54892 - protein, 152 aa, Zea mays
  Coding DNA Sequence Number=SeqID_13113
MGKSNKRKREPTPPSEDFGDSEYSEEEFSSESEGSPAPVSPPASSDDSDNSQGIVAEVWTYIRAVERSGLKGSDESEYSSDEEDSSDSSEEGGGGDGGDDDDDGGDGDEATTAVMAAAGAATAAARAATAAAAGAATRPVARCHWSLDVSIG

SEQ ID NO: 54893 - protein, 95 aa, Zea mays
  Coding DNA Sequence Number=SeqID_13114
MDSCNSCLRRRRERAIFGNPPMQELCFSPVKEGYSSLVLLQQEPHTTYLHGINHRAQITIQDSNVLEKLTLELKRASSLVSDILPSQKFNKSHLT

SEQ ID NO: 54894 - protein, 84 aa, Zea mays
  Coding DNA Sequence Number=SeqID_13115
MKGVGGEARLAGQGPAPDLARDDDDAGAGRSLKAKRRTPTKGGSHGEQGTEQRGCSCPAPILTRGKWGSGAEHHGSEAWLVTWE

SEQ ID NO: 54895 - protein, 146 aa, Zea mays
  Coding DNA Sequence Number=SeqID_13116
MAEQRLCRSPGSNFTHTSRLPRMAATFACSQCLSERPGHASNLRTAVECAAHGAMWVRRHEFSQASDTGEHKAMVAPLPSGSTGLHALSVKEGPRPWVFIRSIDMEGGEDRADRSVPRVRDITRWAWTRVREWADREKRNGLSLED

SEQ ID NO: 54896 - protein, 141 aa, Zea mays
  Coding DNA Sequence Number=SeqID_13117
  Homolog annotation: Hit_ID=Q6K884; Match level="QueryCoverage=79%, HitCoverage=19%, E-value=5e-10, Identity=52%"; Hit description =Transducin-like
MTPALLSNYSFRDTPLLGGSGVDNLISELQYMQNFEQVGASSSVPVTTGSFDGSRLHDTSGHHLMTSLPSVGRPLLGTHAAEAPAISLSVGSEQTTSLLGGGTELPCTRNGYPCFTLWAIFGCLCCMCAATQLWWPWKSVA

SEQ ID NO: 54897 - protein, 547 aa, Zea mays
  Coding DNA Sequence Number=SeqID_13118
  Gene Ontology: Mol. function=transferase activity
  Homolog annotation: Hit_ID=Q8RYJ1; Match level="QueryCoverage=78%, HitCoverage=83%, E-value=1e-129, Identity=57%"; Hit description =Putative glycosyltransferase
  Pfam annotation: Domain name=DUF563; Domain location=126-392; Score =244.7; E_value=1.9e-70; Accession=PF04577.5; Description=Protein of unknown function (DUF563)
MDDAPAAIVKAKGGRGAFLAHFFIVLPVVTLCVVVYAPRYFSGPPPYYGGGANDVGGISAPRPSSMTRTSSSSSAHLGGLGYVAGRRDADEDDQQLGVGDGGALPQQVVLDNQVGSPCSSLPNHTICCDRSDYHSDVCFMAGDVRTDAASLALLLFPPRAASSAPEPPAAEERIRPYTRKWDAYITKTIHEVTLRVARPEEAAAAAHRCDVRHDAPVLVVTAGGYSHNMFHVFNDGFLPLWLTAQHLRRRAVLAVLSYSPRWAGTYGEILAGLSRYHAIDLLRDKRTHCFPGAVVGTRYHDYLAVNSTRLRDNKTIADFHDFLAGVYSDDDVRNDKAAGGSSSSRRPEMAWYERRRPRLGIVSRKGRRVVENQAAVAQLAASVGFDVDIMETANGAPLSAVYASVSSYDALVGVHGADLTTFLFLRPGRAALAQIAPLGITMLSRNLFGVPAARMGLHYVQYDVSARESSLSRRYPLDHVVVADPARARREQGKQEWELVEHVYLRGQNVSLDLGRFRETLARIHSRLKEQQQGHASRSSPDASPQI

SEQ ID NO: 54898 - protein, 70 aa, Zea mays
  Coding DNA Sequence Number=SeqID_13119
HFESLTASEDFDRRIFQVEDDMMNEEEVDDLVGLESSMTRMDGAKEAGGEGLSAPQDSSGEDPATASAPV

SEQ ID NO: 54899 - protein, 115 aa, Zea mays
  Coding DNA Sequence Number=SeqID_13120
MRQGSECGCGRCSKETWGVWAGDVVGDLGVHARWSTVVRGEGRTYRAVPQCSEGERVRGGKRFIALTKQSREAETERGGASEQATDVDNLAPLGRGRESARGKETTADRWIPPVR

SEQ ID NO: 54900 - protein, 140 aa, Zea mays
  Coding DNA Sequence Number=SeqID_13121
  Gene Ontology: Biological process=cell wall catabolic process
  Homolog annotation: Hit_ID=Q10SU7; Match level="QueryCoverage=56%, HitCoverage=17%, E-value=1e-09, Identity=51%"; Hit description=LysM domain containing protein, expressed
MGVKQVLVRPRYGDGDGDDDGGTSSSSSTGRCDEDVVDQSPPPMSSARYLLHRVCRSTHSREWPSSTASSRTNAVHFFLALFYLGSPSVADGKRANGLNADLQMFAHKTLRVPLHGSHQPAAAPPSLPSYSPRNHADRVA

SEQ ID NO: 54901 - protein, 610 aa, Zea mays
  Coding DNA Sequence Number=SeqID_13122
  Homolog annotation: Hit_ID=Q1RYE3; Match level="QueryCoverage=45%, HitCoverage=33%, E-value=2e-13, Identity=24%"; Hit description=IMP dehydrogenase/GMP reductase
  Pfam annotation: Domain name=DUF827; Domain location=51-511; Score =155.8; E_value=1.1e-43; Accession=PF05701.2; Description=Plant protein of unknown function (DUF827)
MEEANVHGTSGRPSTAPSDASPDSAVPSTSHQGSRSCEAQLDEMQEPDVDSVKGAVGKFGVGGVLDWREKRKNVQNELDKVQDEVTEYQKRVQEAESGRAQALEELGTAVSAADELARGLDRARAEQAQARQQAELAELQLEELRRGVAAQAKAELGAAMDRSAAALADLRAARAEVESLEKEHARAAAEAGAAVARAREAAAASREAGKAVEDLAAELAALKGELESSRAAHVEAEEKTRSLAVAWEDDKTRWQIELEEAEREDKRLREVEMKAEAASQLMASLKTELFACAVEGTPGQEEKPAASTQSMQEKTEKELDDVKASIEWAKDEVKCLRVAAASMRDELEKEKAELTALRRREREGLSPASIPYPEEELRRVTTEVAAAEAGAKADDDDSKMAERVGQARREAEEAKAKAQSAREKVARAREDAGVAKAALAAMEARLEAVTREILAADTSERRRQRRPDSMRVVEAVKLVEEAKDAEARKLEKVARLAKRTEQRRQALEAATLEADEAEFEKLSAERELRQWRAEHEQQRAPGETGSPRPDLAEISVLDDPAAGDGRGNPHIVSPRGGYMSAADAEDEDARQRKTFFPRIVMFLARKRAQT

SEQ ID NO: 54902 - protein, 297 aa, Zea mays
  Coding DNA Sequence Number=SeqID_13123
  Homolog annotation: Hit_ID=Q60D21; Match level="QueryCoverage=38%, HitCoverage=33%, E-value=5e-17, Identity=40%"; Hit description =Putative kinase interacting protein, identical
  Pfam annotation: Domain name=KIP1; Domain location=30-102; Score =45.1; E_value=2.4e-10; Accession=PF07765.3; Description=KIP1-like protein
MQEAAAGAYPSYMEPEPEPEQTGASATVGVMGCRSPTCPPWLQAAIADIDQRVRALAVDDAAPPTEHSFAERAEEYYQKRPQLLALLADLHRRYLCLADRYCHHQHKREQPSLPASASSDCGSSDVDDRCSDAGSSLSFQAQHAPPRPDSPPTKRRSCWWRSGGRVGGARRAGGRGGRPAESARGSSCRGAWWRCWSRSAWCCWARTRAWGSARRRPRTRPGGGPTWATRAAPAEEGPASCSGSPRPPAPSCWAKAEALQAGVRVGASERQCLEGHGAWKAKFSASTQRNDGFRTKH

SEQ ID NO: 54903 - protein, 384 aa, Zea mays
  Coding DNA Sequence Number=SeqID_13124
  Homolog annotation: Hit_ID=O81385; Match level="QueryCoverage=49%, HitCoverage=93%, E-value=9e-66, Identity=65%"; Hit description =Germin-like protein 7
  Pfam annotation: Domain name=Cupin_1; Domain location=247-375; Score =78.9; E_value=1.6e-20; Accession=PF00190.13; Description=Cupin
  Pfam annotation: Domain name=Cupin_2; Domain location=282-337; Score =23.3; E_value=0.00087; Accession=PF07883.2; Description=Cupin domain
  Pfam module annotation: Pfam domain module=Cupin_1::Cupin_2; Domain location=247-375::282-337
MANCSPLRRCGSAIFHRGRRWALLRRREKDDAEGASRKKLDEAEGSALPLISPPCQCHNMQHAPIPAHHHRQPWRLSGPGPVCRWGLALPWLEQQDTEIVASRISDIGGRASASASASAADASTATALAAPGGQAPTDQYTPASYLDVRSCQENPRSWVCSETFGPGHSTVKSQRDFALIHLPLDGRRNRGRCSPPSAAPTRTRCRTFCVAVAPGGHNNASSSSSTYPGFPCKPASTVVSDDLFFAAHAGGASTDNPDGARGVTPGNVEAFPGLNTLGLSINRVDLAPGGVNPLHTHPRGRFYSKVVRAGESFVIPRGMVHFQYNVGKGAARAMTVFNSQLPGVVLAAQTLFGADPEIPDDVLAKSFQVDADTIKLLKSKFQKG

SEQ ID NO: 54904 - protein, 427 aa, Zea mays
  Coding DNA Sequence Number=SeqID_13125
  Gene Ontology: Mol. function=electron carrier activity; Cellular component=nucleus; Biological process=electron transport
  Homolog annotation: Hit_ID=Q7X5W7; Match level="QueryCoverage=90%, HitCoverage=62%, E-value=1e-149, Identity=68%"; Hit description =Homeobox transcription factor Hox7-like protein
  Pfam annotation: Domain name=RpoE2; Domain location=251-290; Score= -17.1; E_value=0.024; Accession=PF04035.4; Description=Archaeal DNA -directed RNA polymerase subunit E'' (RpoE'' or RpoE2)
MGVFDSAASCEKADVSCSLTKERTIIAFFSGRRNRKESCIMCPECIHHNQSGRRKNQDYTTDPGRNDLPIAAHGPQVVLLGSDRREDDPGHRRVYFESSEDGHWEELLSLLSILDSRGTREAHLLTSMEKRQACLFEAMKKHVEGGKAARLPASSDSYCSQTSSGDGTSPKTSSVDGASSVSDIENTSVPTSLKDSNLDSSSAVVIESGRGGDEKISMWERLQAFDKWIWTSFYSILTAVKSGKKSFKESLLRCGSCHDLYWRDEKHCRICHSTFEVGFDLEEKYAVHVATCREPELSHEVPNHKFLPSQLQALKAAIHAIEASMPEAAFTGSWMKSAHKLWVKRLRRTSSLPELLQVLVDFVGAMDVDWLYKSSSARLRTNLDDIIVDFQTMPQTTSAVALWVVQLDALIAPYLDNAMARQLVNAR

SEQ ID NO: 54905 - protein, 385 aa, Zea mays
  Coding DNA Sequence Number=SeqID_13126
  Homolog annotation: Hit_ID=Q1SG00; Match level="QueryCoverage=29%, HitCoverage=56%, E-value=7e-28, Identity=54%"; Hit description =Fibronectin, type III-like fold
MPSPPRPLASLCRARLVLFLVPALLLLLPSTARSAGDESARALSVGEELVAETMPLRHGRRVYRIHGLRPSAWYEIPSSFSIRLVDDWGSKNRRLLNTEKIIFKAESSSPVYVLVTVEPEGVVAKPNVPERELALFNIVCDELMLGIPHFAWWAGIAALLCIVLAALAPLVLPLHKLLSCEGTELSESSTCFRCRDNNNRQGKAPSVARATELRWLRSPMKRNPCRPNRIWRKPLREIHEIWRRYQYSTLLYQGTVAGSRGARIGSAEPLECADGNLRSSIPFFSCPREDVGGSDSRGLLPRTGGMKARSEGEKNTYRRPARASPDSDMRAVRRQEGRHRPSDPHEHEARLARQPRTAQYSDAPPSPAAPACVGVETIPATQYRR

SEQ ID NO: 54906 - protein, 76 aa, Zea mays
  Coding DNA Sequence Number=SeqID_13127
MDPNDADDSLYEAWEHQNLLLWHELIFDWSVDHVSMEEGDTGSLDMGDGLGRGVGHGDVIHSYPSRTLWCQKPLLP

SEQ ID NO: 54907 - protein, 169 aa, Zea mays
  Coding DNA Sequence Number=SeqID_13128
  Pfam annotation: Domain name=zf-CCHC; Domain location=101-118; Score =19.2; E_value=0.00066; Accession=PF00098.13; Description=Zinc knuckle
MNPNEDKVENVNNKIPTPIVVKRKDESHRYLLIGMKNNKRTRKMFGYKIKPPQPQAKAPKLVNTQTGKSNQAQLFNMQATDQPSSASNQAKLTHREVKARGACFYCKEEGHFICQCPKKRLDRLAKKAFKQNSTSDNAEEIVFTLAKYKLIQTSDESGRLLDIRVKPRE

SEQ ID NO: 54908 - protein, 108 aa, Zea mays
  Coding DNA Sequence Number=SeqID_13129
MELGYLKSYGSHILRFAKETMRFGHKCKKATLVIIWPLLRKFDPKSGCEVVKHLIQQLVPPIAHQSALIPKFPQIGFRHREKDLAVANVSQEHFGRSILRAVTVNRVM

SEQ ID NO: 54909 - protein, 168 aa, Zea mays
  Coding DNA Sequence Number=SeqID_13130
MGETEPSQVLCRRDGARGEWGEAWPSARGHCTGRACGQGRLGRSQEPLAHGGQATGGERTGWLDAEHATAQHWSREQGLGGLPAGQRGTHVAAPMRTPEGRFLAGCRARAGEAQPPAMGSTGRRPAASMRDVVAASVGVCEEHVAMAGRGMGEERVGSERKKDLVHTW

SEQ ID NO: 54910 - protein, 227 aa, Zea mays
  Coding DNA Sequence Number=SeqID_13131
MTMTNSDKQESERRVSIEKNVGSEGEEKRLIETPLTHGQRGCYVGEGVGSLPVGVGDMAGRRGGSMGAARSGLLCGSCVWSASRRAGARTAAGAGASVRRARLRAGLVLGGARVRPGSVSSAWWLAGLARPDEVTSGVAPRLRVEHSRGGEKEKGGRVGPAVVFNLGLSLMCRDERRRAGFDGQGTTRSSVSVWAELRLGDANGKYELRRVSTDSGDDGDKLRRARE

SEQ ID NO: 54911 - protein, 156 aa, Zea mays
  Coding DNA Sequence Number=SeqID_13132
MNSIDGAVGFNREERGGVKGEWKRLIETPLTHGRRGCYAGEGVESLAGRGRGRGKASRRLHERGAVGASVWELRAVGVASGWGSGSCRRRGVGAQGASADGLDPRRGASGQGRRRAPGGWRVGRVLTRSRRVWLLGCAWKRTGEERRKREAGWGPM

SEQ ID NO: 54912 - protein, 461 aa, Zea mays
  Coding DNA Sequence Number=SeqID_13133
  Gene Ontology: Mol. function=RNA-directed DNA polymerase activity; Cellular component=intracellular; Biological process=RNA-dependent DNA replication
  Homolog annotation: Hit_ID=UPI00004C1733; Match level="QueryCoverage =99%, HitCoverage=42%, E-value=1e-150, Identity=80%"; Hit description= UPI00004C1733 related cluster
  Pfam annotation: Domain name=RnaseH; Domain location=298-422; Score= -22.3; E_value=0.0069; Accession=PF00075.14; Description=RNase H
MAAGFIKEVFHPEWLANPVLVRKKGGKWRMCIDYTGLSKACTKVPYPLPRIDQIVDSTAGCETMSFLDAYSGNAGVTYQRCMNHVFGEHIGRTVEAYVDDIIVKMRKASDLLSDLEATFRYLKAKGIKLNPEKCVFGVPRGMLLGFIVSERGIEANPEKIAAITNMGPIKDLKGLPLYHLLRKAECFTWTPEAEEALGNLKALLRNAPILVPPAVGEALLIYVAATTQLVSTAIVVERREEGHALPIQRPVYFISEVLSETKIRYPQIQKLLYAVILTRWKLRHYFESHPVTVVSSFPLGRSSSAEKPRGQARGLLFISPLGKHLRYVLRLHFPASNNVAEYEALVNGLRIAIELGVRRLDARGDSQLVIDQVMKNSHCRDPKMEAYCDEVRRLEDKFYGLELNHIAQRYNETADELAKIASGRTTVPPDVFSQDLHQPSVKTDDAPEPEKASAQPEAPSA

SEQ ID NO: 54913 - protein, 160 aa, Zea mays
  Coding DNA Sequence Number=SeqID_13134
MQYNGSSSLISCEKQTIRIEFLSLQGRWPGQGRRRSGTAGPRNVAAGLNRAARGEEDFLLPCLKGAPRGEKVAPWEAPSRGKKGEGRHGWELGGHGRSLRTHRNRGKKWWGKKGRTPWGGAMEALLLRAGEEEGRRRHGQGAPSLRAGCCAWEEEGLLRE

SEQ ID NO: 54914 - protein, 95 aa, Zea mays
  Coding DNA Sequence Number=SeqID_13135
  Subcellular localization annotation: CTP_CleavageSite=68; ConfidenceScore=5.39e-01
MAPLSLLPPTWSFPWRHLLSPWRPLQARQQEVLLPTCSPVQASSDVPSPGFLAANAARMPSARHNLVVDAAFRALPVRRNEPCGQPPATSPILLR

SEQ ID NO: 54915 - protein, 276 aa, Zea mays
  Coding DNA Sequence Number=SeqID_13136
  Gene Ontology: Mol. function=hydrolase activity; Cellular component =nuclear envelope; Biological process=methylglyoxal catabolic process to D-lactate
  Homolog annotation: Hit_ID=Q10LW8; Match level="QueryCoverage=99%, HitCoverage=99%, E-value=1e-129, Identity=81%"; Hit description =Hydroxyacylglutathione hydrolase, putative, expressed
  Pfam annotation: Domain name=Lactamase_B; Domain location=11-174; Score=94.0; E_value=4.7e-25; Accession=PF00753.17; Description =Metallo-beta-lactamase superfamily
MKIIPVPCLDDNYAYLIVDESTKKAAAVDPVEPEKVLKAAGEVGAYVDCVLTTHHHWDHAGGNEKMRLQVPGIKVFGGSLDNVKGCTDQVENGMKLSLGKDIEILCLHTPCHTKGHISYYVTSKEGEDPAVFTGDTLFIAGCGKFFEGSAEQMYQSLIVTLGSLPKSTRVYCGHERHTVLFMALPHLLLVELQYTVKNLKFMLTLEPENEKTKQKLEWAEKQREANQPTVPSTIGDEFEINTFMRVDLPEIQAKFSVNSPVEAMREVRKTKDNWRG

SEQ ID NO: 54916 - protein, 486 aa, Zea mays
  Coding DNA Sequence Number=SeqID_13137
  Homolog annotation: Hit_ID=Q10LW9; Match level="QueryCoverage=99%, HitCoverage=99%, E-value=3e-88, Identity=42%"; Hit description =Bromodomain containing protein, expressed
MSGKGKRRSARLLKLEEQKNDGGAVCFLDPWQIIRNSISDSLPSQTSVGQIIEYILDELEMRDRHELFAMPDDIQVTDYAELVSRPGDFATLRQKNRDGMYTALEQFEGMALLDQAKLVFMSLRSNQMFSESELAAWRQRHADQMQQPITPEGREGGGRGPPRHTAAAPLLQPSAATPRKRSAAETKKQEDARTGGNATGNQRGRPRGARETKATAPTPPGKRARKADTLFRSIGDAAATAGFNGGRGLVARRRLTYNDEAAADQGWREIAATPVFQGRHVTLRDQPQEQTFRGSLQRFVRHAGLKARVAAEFRSLECVARARHCPVPQCWNGFAPSAGFLPPSPRPPGAAAAEPGTSSDQQAAAPECKLETDEVLKLFVLMGTPAAFLSRAKKMFGQDEPEKSAQPAKAADDARARAGAATTAETGHGKKSSASEPSAAACGPFAPPKLVPGRLGFGQFAASSARPFKLNSKPSASNDSGKKKLQ

SEQ ID NO: 54917 - protein, 412 aa, Zea mays
  Coding DNA Sequence Number=SeqID_13138
  Gene Ontology: Mol. function=ATPase activity, coupled to transmembrane movement of substances; Cellular component=integral to membrane; Biological process=transport
  Homolog annotation: Hit_ID=Q658I3; Match level="QueryCoverage=70%, HitCoverage=39%, E-value=1e-148, Identity=91%"; Hit description =Putative mitochondrial half-ABC transporter
  Pfam annotation: Domain name=AAA; Domain location=155-331; Score= -35.3; E_value=0.098; Accession=PF00004.19; Description=ATPase family associated with various cellular activities (AAA)
  Pfam annotation: Domain name=ABC_tran; Domain location=153-337; Score= 205.4; E_value=1.3e-58; Accession=PF00005.17; Description=ABC transporter
  Pfam annotation: Domain name=Dynamin_N; Domain location=156-322; Score=-46.6; E_value=0.1; Accession=PF00350.13; Description=Dynamin family
  Pfam annotation: Domain name=SMC_N; Domain location=137-341; Score= -132.6; E_value=0.067; Accession=PF02463.9; Description=RecFRecNSMC N terminal domain
  Pfam module annotation: Pfam domain module=AAA::ABC_tran::Dynamin _N::SMC_N; Domain location=155-331::153-337::156-322::137-341
  Subcellular localization annotation: CTP_CleavageSite=29; ConfidenceScore=5.03e-01
MLPRLPFHCDLLSSAVLCLLCGRWPETPSGSTSVQTGCANLSPVLPEALFLEKRRRTASRYIKKKEKVMVNGLLFQLSLPLNFLGSVYRESRQSLIDMKSMFQLLEEKPAIKDEPHAQPLQFKGGCIEFENVHFGYVPERKILDGATFTVPAGKSVAIVGTSGSGKSTILRLLFRFFDSTSGSIRIDGQDIRGVTLGSLRKCLGVVPQDTVLFNDTIKHNIQYGRLSAKDEEVFDAARRAAIHDTIMNFPDKYDTVVGERGLKLSGGEKQRVSIARVFLKEPSILLCDEATSALDSTTEASILNSLKSLSSDRTSIFIAHRLTTAMQCDQIIVLEDGKVVEQGPHDFLLSQGGRYAELWYQQNSTDAMDSAAASVEKLYRCQKKTSDFPRSLQGLLAVPGSWSTLTIVDRVK

SEQ ID NO: 54918 - protein, 147 aa, Zea mays
  Coding DNA Sequence Number=SeqID_13139
  Gene Ontology: Mol. function=protein serine/threonine kinase activity; Biological process=protein amino acid phosphorylation
  Homolog annotation: Hit_ID=Q10E10; Match level="QueryCoverage=79%, HitCoverage=10%, E-value=3e-36, Identity=69%"; Hit description =Protein kinase, putative, expressed
MAPQRLNNIHFSKTLAGIPLLGRSYFTSRYSWNPSDGNIYEAYEFEDSSDNGSLSGSSSCLSNRQDDMTEDSDGLNEFESSANVNYSFSNFSFKNHASINYDMFTKGLKDDPPPRTETSKCEAWSVPIEAVPTSPGAEYSFAVTLFS

SEQ ID NO: 54919 - protein, 186 aa, Zea mays
  Coding DNA Sequence Number=SeqID_13140
MPALALAASAAGCRFLSRSACLGAWGAGIGGAAHGRGGRGRDDADLRLGRALPLRRASMECKYSFDKESVGCSARGTGSGGDRDPRALSLALQRVGSDRLGSPFGAAAGAAPADCCRPWLLTRPPRPRPAKLGHWSAVEKWSTRTGLLPLLLFGGQQETPHRSFSSSSGDHLLMKNPCVSPVDEKT

SEQ ID NO: 54920 - protein, 277 aa, Zea mays
  Coding DNA Sequence Number=SeqID_13141
  Gene Ontology: Mol. function=protein serine/threonine kinase activity; Cellular component=cytoskeleton; Biological process =protein amino acid phosphorylation
  Homolog annotation: Hit_ID=Q10E10; Match level="QueryCoverage=74%, HitCoverage=16%, E-value=1e-109, Identity=93%"; Hit description =Protein kinase, putative, expressed
  Pfam annotation: Domain name=Pkinase; Domain location=10-270; Score =126.4; E_value=8e-35; Accession=PF00069.15; Description=Protein kinase domain
  Pfam annotation: Domain name=Pkinase_Tyr; Domain location=57-270; Score=-49.8; E_value=2e-09; Accession=PF07714.7; Description=Protein tyrosine kinase
  Pfam module annotation: Pfam domain module=Pkinase::Pkinase_Tyr; Domain location=10-270::57-270
MSVSGVPTASQFDDIFAKGLPSTVFSEFRSSINLCNDKSCDCRGLDSFYAEVPLMQIVILLVLRKADMIRKNAVESILAERDILITVRNPFVVRFFYSFTSRDNLYLVMEYLNGGDLYSLLRNLGCLDEDVVRVYLAEVVLALEYLHSMHIVHRDLKPDNLLIAHDGHIKLTGFGLSKVGLINNTYDLSRPVVSGASLYGDDEPQMNEFEQMDHRARRQNRSAVGTPDYLAPEIILGTGHGCSADWWSVGVILFELIVGIPPFNAEHPQMRKEEDGK

SEQ ID NO: 54921 - protein, 140 aa, Zea mays
  Coding DNA Sequence Number=SeqID_13142
MADVGESLERTSWSGLPKRWCKVEVDAVAMRAYGVATRDEGGGARNRIGYMVAELSHRATTTRVKVLYDVGATRMMLRYKGPGRPVSPSEVTGKVPITGNNGRREGGAARWDKNSTRVRSGVVRGVGVSNLVGGSRSGLQ

SEQ ID NO: 54922 - protein, 121 aa, Zea mays
  Coding DNA Sequence Number=SeqID_13143
MENQIQGPIKGNEHALEKLIVLKGDPHMVGRHVDRGMAKDGRQGSRRRRGEVSARMPPVPPWCRRKGAAGSDIGVVAGTAGRGGGADTVQLWKGELSSEVEERLACGWSGGWMDVDGTTTA

SEQ ID NO: 54923 - protein, 113 aa, Zea mays
  Coding DNA Sequence Number=SeqID_13144
  Homolog annotation: Hit_ID=Q2R3L0; Match level="QueryCoverage=71%, HitCoverage=19%, E-value=6e-16, Identity=54%"; Hit description =Expressed protein
MDDERSDLIEESPTAARLATSALAKASPAPGKACLDPAPRNINGATLPPWGVMKIMHKKNPDIKKDRSELITFTTFMVQPLQSVPDLPEFALSLRPEGYELPRTDSIWENVNG

SEQ ID NO: 54924 - protein, 120 aa, Zea mays
  Coding DNA Sequence Number=SeqID_13145
  Gene Ontology: Mol. function=small conjugating protein ligase activity; Cellular component=ubiquitin conjugating enzyme complex; Biological process=protein modification process
  Homolog annotation: Hit_ID=Q10E03; Match level="QueryCoverage=89%, HitCoverage=93%, E-value=1e-43, Identity=60%"; Hit description =Ubiquitin-conjugating enzyme family protein, expressed
MPRLSLLMLWNQVPRNFRLLEELERGEKGIGDGTVSYGMDDADDIYMRSWTGTIIGPPNVEPSLFPMLGKWEREHTMEDILSSLKREMSTPQNRRLYQPHEGNEDQRVEQKGLSLRCAVM

SEQ ID NO: 54925 - protein, 266 aa, Zea mays
  Coding DNA Sequence Number=SeqID_13146
  Homolog annotation: Hit_ID=Q10E10; Match level="QueryCoverage=34%, HitCoverage=7%, E-value=2e-12, Identity=50%"; Hit description =Protein kinase, putative, expressed
  Subcellular localization annotation: CTP_CleavageSite=75; ConfidenceScore=5.76e-01
MVFKGRFFSSRHKSSESSSSPDGSNSPRTPTSAPASVSAASPASSSSSKSDKKKTKLETPKKRDKLFGSAATAPKSAASSAPSSLAGDGRKGPVLHHRDAGGGGGGGASAAALSPILASSLGLNRIKTRSRPLPQEGQRMAAALASSNLSHGQGQAEPSAGSAGDGGRKGVSSSADTSSSSRGIVKTTELAMRSAPGTNFGAGGKNAVKGCKRAMKLLEQPTEPGIPIHAIGHNTILSLNAGVGDNRLLLRGPGDKVDIQEGYTTT

SEQ ID NO: 54926 - protein, 174 aa, Zea mays
  Coding DNA Sequence Number=SeqID_13147
MENQIQGPIKGNEHALEKLIVLKGDPHMVGRHVDRDMAKDGRQGNRRRRGEERAEVLTLCSYGRGSCPRCGSGGEAHLRVEWRLDGRGQHHWRIEGGRRVRARRKGQCKKGTRGWFVRLRSRHGGSADRGLGEVVGSRKESRGGRGCGEAVCSQHGRASSHSKEGRAGHDLRGD

SEQ ID NO: 54927 - protein, 216 aa, Zea mays
  Coding DNA Sequence Number=SeqID_13148
  Subcellular localization annotation: CTP_CleavageSite=86; ConfidenceScore=5.35e-01
MEAAASADLHVALLRSVPLHASHRPFAADRSHASAPPSRVGATPNPVMGRLYSSATGRAVAPATRPRRRASPRLRAMPQLLVAGLPLAMERHWAPHSRLFPRHGAGLGRRRPLPCLLVSWRRSLLQCWSSPPRREIGFASPTINRLARPRHRLQQHGFLIFFDGATGVTCDVTGMPAYVAPLRLHVHLYRLVVATTDQEAPPLTSPSSSPPHTSST

SEQ ID NO: 54928 - protein, 243 aa, Zea mays
  Coding DNA Sequence Number=SeqID_13149
  Gene Ontology: Mol. function=zinc ion binding; Cellular component =nucleus; Biological process=regulation of transcription
  Homolog annotation: Hit_ID=Q53RP5; Match level="QueryCoverage=80%, HitCoverage=17%, E-value=6e-49, Identity=49%"; Hit description=FAR1 family, putative
  Pfam annotation: Domain name=SWIM; Domain location=29-66; Score=24.9; E_value=0.00029; Accession=PF04434.8; Description=SWIM zinc finger
MAACSRLLDDDKYAIAIGRFHGDLQFEQERIVISDPLNQTVSCSCGMFNRTGILCAHGLKVLDLMNIKILPTHYVLKRWTKATRNGSVQDKEGRNVVANPMLESQLRYKDLSHKFLNLAHKAVHSPECCLMIENALDCLGTQLEDKLNASTSTMSNPCNDQENVEPNVQQGDDLLRAAHLKKKEVKSKNSRRNKSWLDKFNKRKRKPTKKRSTVLFGLQQDCLYNSPQAVAWECWSHPLQDGD

SEQ ID NO: 54929 - protein, 61 aa, Zea mays
  Coding DNA Sequence Number=SeqID_13150
MAREATERVANMRTGGGGSGPGLPPCEISEFPCKYLGLPVSLGKLNTTQLHADGLEGRVDV

SEQ ID NO: 54930 - protein, 222 aa, Zea mays
  Coding DNA Sequence Number=SeqID_13151
  Gene Ontology: Mol. function=protein serine/threonine kinase activity; Cellular component=cytoskeleton; Biological process =protein amino acid phosphorylation
  Homolog annotation: Hit_ID=Q10E10; Match level="QueryCoverage=93%, HitCoverage=16%, E-value=1e-110, Identity=94%"; Hit description =Protein kinase, putative, expressed
  Pfam annotation: Domain name=Pkinase; Domain location=1-215; Score =118.7; E_value=1.7e-32; Accession=PF00069.15; Description=Protein kinase domain
  Pfam annotation: Domain name=Pkinase_Tyr; Domain location=6-215; Score=-43.4; E_value=8.3e-10; Accession=PF07714.7; Description =Protein tyrosine kinase
  Pfam module annotation: Pfam domain module=Pkinase::Pkinase_Tyr; Domain location=1-215::6-215
MALSSYVLRKADMIRKNAVESILAERDILITVRNPFVVRFFYSFTSRDNLYLVMEYLNGGDLYSLLRNLGCLDEDVVRVYLAEVVLALEYLHSMHIVHRDLKPDNLLIAHDGHIKLTDFGLSKVGLINNTYDLSRPVVSGASLYGDDEPQMNEFEQMDHRARRQNRSAVGTPDYLAPEILLGTGHGCSADWWSVGVILFELIVGIPPFNAEHPQMRKEEDGK

SEQ ID NO: 54931 - protein, 71 aa, Zea mays
  Coding DNA Sequence Number=SeqID_13152
MNVGEGVSTVYRRDSGFGVEQRTTRSSIDVEVQTPARLHGLRDRRRTTNNYVVMMLRAGGLVAEVLMHGEW

SEQ ID NO: 54932 - protein, 85 aa, Zea mays
  Coding DNA Sequence Number=SeqID_13153
MEELRRPDRGRYETVAAGARKGGTARLGRAGLETTVPEQTKDAATAGEWSNPTTTREGAEGAAMGDLLVQTWARLEQGHTAAGVA

SEQ ID NO: 54933 - protein, 71 aa, Zea mays; identical to SEQ ID NO: 54931
  Coding DNA Sequence Number=SeqID_13154

SEQ ID NO: 54934 - protein, 121 aa, Zea mays
  Coding DNA Sequence Number=SeqID_13155
MAGGGREQVGTRYTGEFGCALEWDSGVPWEPGARTKSEQGKQARRPWEASTRASRQGDDASREVGVQGSSGRALGQELEQERAPRAGGARSHGGTSAGRSPMGDAGRGRGKGKERLGGRKI

SEQ ID NO: 54935 - protein, 114 aa, Zea mays
  Coding DNA Sequence Number=SeqID_13156
MLNSIHGDESEWDDGEVRCYSRDHDEWDNGKPRVEYKERRRRAKIRDDTQTQLGRQPGAIENIWIRRAEARRNLMETMSGKRTAGRVEGRDGQGIEGEGAWHIGRWDERLVTCG

SEQ ID NO: 54936 - protein, 236 aa, Zea mays
  Coding DNA Sequence Number=SeqID_13157
  Gene Ontology: Biological process=cell cycle
  Homolog annotation: Hit_ID=Q2QVB9; Match level="QueryCoverage=80%, HitCoverage=28%, E-value=1e-52, Identity=82%"; Hit description =Expressed protein
MEQCIARLDVAMFNAILRESDDEIPTDPLSDPITDPKVLPIPSGKFSFGAGVQLKNALCPTFSSSIIKNILDVFLPDEFCPDPIQGSLLQALELEDHLEVNKGIRSIPCSASPILYNAPVSGAILSVIGDPRKSGSAILHKSNTSDDELDELSSPLTFISNTSSDPLAKLKRISNSTTARYRLLHENSKVECTFFTTSSIAYEDKVRICAMHWLTIRDGKNSTRGSWVLSDQSTIM

SEQ ID NO: 54937 - protein, 676 aa, Zea mays
  Coding DNA Sequence Number=SeqID_13158
  Gene Ontology: Biological process=cell cycle
  Homolog annotation: Hit_ID=Q2QVB9; Match level="QueryCoverage=96%, HitCoverage=72%, E-value=0.0, Identity=75%"; Hit description =Expressed protein
MVLGLRTKTRKDSAFHVDFNILIQEISPWPPSESLKSLRSVVLFWENGERNSGKTSTVAPSIGSGSTAGKIEFNEFINLQAIFQKEGSSKSGKWQKNLLELNLYEPRREKLKGQHLGSATLDLAEHAMFHEDTSVPVPLSSKRSFKNNAQPMVYLRIQPLDGDNSSVSSRDALSQEASVDKDSKEFVSATVSEEYTEDTEFASFTDEEEATPYLYRSGVTALTGSNRSHESLKGKDIRLTNNEGTSSSLDSQHEATVSCMKVRNEEVEKFPIQVQKQNGHPENLSLSSDLPREQSPSLPPHNAFRSGRKMSFAYGMTESNQRQFGERTYSTLTTDRARNARFSMRVPDVNGSIINKKVDSQDIAITHENKASVDDGLQVQEPIRISNNRNDNKVRELELKIELLEAELREAAAAEIGLYSIIAEHGSSVNKVHTPARRLSRHFVHALKNCSRDKMGSAARNTTSGLVLVAKACGYDIARLSFWLSNCVVLRAIVTETSRQSGTVNSSNYGDYNSKTTYRKNSASMWESLNRKKGKLLSPEFDNWEDVDTFIAALKKIESWIFSRIVETLWWQTFTPHMQSADITGGLRSTPNPKKGYGKIPVVGNQQQATISMDIWKKAFKEASERLCPVRAAGHECGCLPMLTKLDLVSCGATTISVGHAASTRSRRRRQTVRCD

SEQ ID NO: 54938 - protein, 254 aa, Zea mays
  Coding DNA Sequence Number=SeqID_13159
MAGAPLAQGAIRTRGRGVGELPRSGLTANMEKRGGIDRRRGLPRRRHPTAMTPDLAWTVFWDEGGCRFREGDEQDVMGTDLWVRRWLTVWGRRAPRALGCASPVRAGQAGWASTRAAGREQCSAGQGSSGRRGMGWGSSAAGRAFLLARELGSGKRATRWVGVTWAEQVGRIAGWRRSSGVGAGHGAGRGRERRGVRWAARQVEQAGRRCYTDHITGELEKLHICDKYYDTDQIHTASGSGAMKALSGDDMRPT

SEQ ID NO: 54939 - protein, 525 aa, Zea mays
  Coding DNA Sequence Number=SeqID_13160
  Gene Ontology: Mol. function=argininosuccinate synthase activity; Cellular component=chloroplast; Biological process=amino acid biosynthetic process
  Homolog annotation: Hit_ID=Q2QVC1; Match level="QueryCoverage=81%, HitCoverage=90%, E-value=0.0, Identity=94%"; Hit description =Argininosuccinate synthase
  Pfam annotation: Domain name=Arginosuc_synth; Domain location=131 -521; Score=701.2; E_value=7.2e-208; Accession=PF00764.9; Description= Arginosuccinate synthase
  Pfam annotation: Domain name=ExsB; Domain location=129-289; Score= -103.5; E_value=0.058; Accession=PF06508.3; Description=ExsB
  Pfam module annotation: Pfam domain module=Arginosuc_synth::ExsB; Domain location=131-521::129-289
MAAQTEADHTRCSGVGVDEVQATKTVDGWCWTADRPAKRGMHPSSCPLCDQEPESINHLLVSCVFARIFWYKLLRKFGLHSLAPQLGLTSLMVKKAIRCAMATGKEQGAISTASSGDQTKGGLRGKLNKVVLAYSGGLDTSVIVPWLRENYGCEVVCFTADVGQGAIELEGLEKKAKASGACQLVVKDLKEEFVSEYIYPCLRAGAVYERKYLLGTSMARPVIAKAMVDVAKEVGADAVAHGCTGKGNDQVRFELTFYALNPELKVVAPWREWDITGREDAIEYAKKHNVPVPVSKKSIYSRDRNLWHLSHEGDILEDPANEPKEDMYMMSIAPENAPSKPEYLEIGIIAGVPVSINGRDLSPASLLAELNEIGGKHGIGRIDMVENRLVGMKSRGVYETPGGTIMAAAVRELESLTLDRETMQWKDIIALKYAELVYAGRWFDPLRQSFDAFMEKVTATTTGSVTLKLYKGSVNVASRKSPYSLYREDISSFENGEIYNQADAEGFIRLYGLPTRVRAMLEKGI

SEQ ID NO: 54940 - protein, 755 aa, Zea mays
  Coding DNA Sequence Number=SeqID_13161
  Gene Ontology: Mol. function=protein-tyrosine kinase activity; Cellular component=integral to membrane; Biological process=protein amino acid phosphorylation
  Homolog annotation: Hit_ID=Q1SI44; Match level="QueryCoverage=96%, HitCoverage=95%, E-value=6e-91, Identity=47%"; Hit description =Leucine Rich Repeat, putative
  Pfam annotation: Domain name=LRRNT_2; Domain location=21-62; Score =56.0; E_value=1.2e-13; Accession=PF08263.3; Description=Leucine rich repeat N-terminal domain
  Pfam annotation: Domain name=LRR_1; Domain location=122-144; Score =15.2; E_value=0.23; Accession=PF00560.23; Description=Leucine Rich Repeat
  Pfam annotation: Domain name=LRR_1; Domain location=146-168; Score =16.1; E_value=0.13; Accession=PF00560.23; Description=Leucine Rich Repeat
  Pfam annotation: Domain name=LRR_1; Domain location=170-193; Score =12.8; E_value=1.2; Accession=PF00560.23; Description=Leucine Rich Repeat
  Pfam annotation: Domain name=LRR_1; Domain location=195-217; Score =17.4; E_value=0.053; Accession=PF00560.23; Description=Leucine Rich Repeat
  Pfam annotation: Domain name=LRR_1; Domain location=220-242; Score =6.2; E_value=20; Accession=PF00560.23; Description=Leucine Rich Repeat
  Pfam annotation: Domain name=LRR_1; Domain location=244-265; Score =6.7; E_value=16; Accession=PF00560.23; Description=Leucine Rich Repeat
  Pfam annotation: Domain name=LRR_1; Domain location=98-120; Score =14.1; E_value=0.5; Accession=PF00560.23; Description=Leucine Rich Repeat
  Pfam annotation: Domain name=Pkinase; Domain location=418-751; Score =43.7; E_value=3.6e-11; Accession=PF00069.15; Description=Protein kinase domain
  Pfam annotation: Domain name=Pkinase_Tyr; Domain location=411-751; Score=33.8; E_value=1.5e-14; Accession=PF07714.7; Description =Protein tyrosine kinase
  Pfam module annotation: Pfam domain module=LRRNT_2::LRR_1::LRR_1::LRR_ 1::LRR_1::LRR_1::LRR_1::LRR_1::Pkinase::Pkinase_Tyr; Domain location
MAVRRGIPTLLFLKTVAALALTAEGLALLTFKAAATDDPHSALSRWSESDQDPCRWPGVICANASSSAPSAAPRVVGLAVAGKNISGYIPSELGSLLFLRRLNLHGNRLSGVIPAALSNASSLHSLYLYGNRLTGGLPVALCDLPHLQNLDVSGNALSGELPLDLRGCRSLQRLVLSRNAFTGELPAGVWPEMPNLQQLDLSSNAFNGSIPPDLGELPRLAGTLNLSHNHFSGVVPPELGRLAATVTLDLRFNNLSGAIPQTGSLASQGPTAFLNNPGLCGYPLQVPCRAVPPPTESPTPPATTTPLPSTASSDRHQPIRTGLIALISVADAAGVALVGVILVYMYWKVKDRKGHRDGGGDDSSKSGLCRCMLWQHGGSDSSDASSGDGDGEGKYSGGEGELVAMDRGFRVELDELLRSSAYVLGKGGKGIVYKVVVANGTTPVAVRRLGGGGGGGADRCKEFAAEARAVGRVRHPNVVRLRAYYWSADEKLVVTDFVGNGNLTTALRGRPGQTVLSWSARLKIAKGAARGLAYLHESSPRRFVHGEVKPSNILLDADFTAHVADFGLARLLAVAGCAPDGPPSTGGAGLLGGAIPYVKPPAPGTGPDRFGAGGGYRAPEARAPGAKPTQKWDVFSFGVVLLELLTGRGPAADHASPSTSASFSAPVSGSTATDRSGSGEHGGGAVPEVVRWVRRGFEEDVRPLAEMVDPALLRGPALPKKEVVAAFHVALQCTESDPELRPRMKAVADSLEKIG

SEQ ID NO: 54941 - protein, 429 aa, Zea mays
  Coding DNA Sequence Number=SeqID_13162
MGHGGRSRPPPPGSRWGAYGCADRNPSATTRCGEHREGACHPSPRSRFGARSGPDHRSTLGPCPGACRREGHRPIAHVYGRAAGTEEPEAEAFFCTYLWLQAPSPCALHYCHQGSEARCWDVYGASSRPHFAHETPQEGVEVVEPTLGAPVEPGTIMIEMVPTHLASPTEAITISSGDEAEAGHAVPGTASPTVFDLLRAIPNTLEVVPSLGSWRAEEASPLDPPWVLLVDKIIIEPPLSGAAMTLFAHARPLDMGGLTLAWMSTGGGPYFVLNNLKEREQWDELRAVTQEVMTRSMAMSICVRRERDIWASLQCHRATLLHSNKQLALRSPRSGGLDVLVRGTERRGCGRSREHASAEGQSLPPEGRGGPSREGDATDEGTPSSGTVERDEASLRIDSLSKSLEAEWYKGRALNARIQGLEKDLETGT

SEQ ID NO: 54942 - protein, 52 aa, Zea mays
  Coding DNA Sequence Number=SeqID_13163
MARVACTLHGKRLDGGVYVLSVRKQQIFVAFVPRWFPKKKAKTKATGGSVLL

SEQ ID NO: 54943 - protein, 76 aa, Zea mays
  Coding DNA Sequence Number=SeqID_13164
MAVTLRFVSISQPRRASFLDTLLLPVPVPVPVPALLQKIRTHPADAPNRGEGQDAPCPCVSVAPTPQPYPPASTLT

SEQ ID NO: 54944 - protein, 216 aa, Zea mays
  Coding DNA Sequence Number=SeqID_13165
  Gene Ontology: Mol. function=protein transporter activity; Cellular component=nuclear pore; Biological process=protein import into nucleus, docking
  Homolog annotation: Hit_ID=Q9SIP2; Match level="QueryCoverage=71%, HitCoverage=14%, E-value=1e-65, Identity=71%"; Hit description =Putative importin (Nuclear transport factor ) protein
MGDGVCPCWCEHAAGGATDTDEFQHTVEIIMCVQRRAICLLASASVAAFADVTKNSMYQMMQPQIDILLFEIIFPLMCFNDNDQKLWEEDPHEYVRKVYDIIEDLYSPRTAAMDFVSELIRKRGKNNLQKFIHFIVDIFRRYDEAPADLKPYRQKDGALLAIGTLCDKLKQTDPYKTELESMLVRHVFPEFNSRVGHLRAKVEYISSSLVNNDIEY

SEQ ID NO: 54945 - protein, 495 aa, Zea mays
  Coding DNA Sequence Number=SeqID_13166
  Gene Ontology: Mol. function=transporter activity; Cellular component= mitochondrial inner membrane; Biological process=transport
  Homolog annotation: Hit_ID=Q2PF08; Match level="QueryCoverage=76%, HitCoverage=100%, E-value=1e-150, Identity=72%"; Hit description =Putative ADP ATP carrier protein
  Pfam annotation: Domain name=Mito_carr; Domain location=194-291; Score=125.8; E_value=1.2e-34; Accession=PF00153.17; Description =Mitochondrial carrier protein
  Pfam annotation: Domain name=Mito_carr; Domain location=299-395; Score=104.5; E_value=3.1e-28; Accession=PF00153.17; Description =Mitochondrial carrier protein
  Pfam annotation: Domain name=Mito_carr; Domain location=399-489; Score=88.9; E_value=1.5e-23; Accession=PF00153.17; Description =Mitochondrial carrier protein
  Pfam module annotation: Pfam domain module=Mito_carr::Mito_carr::Mito_ carr; Domain location=194-291::299-395::399-489
MSLAAVVIMIAEGAFGSSAGALPAAYPSAWSEAAASFIRTGMEENATGINCWTIALLTAGWYLGGLHIVLILLMLLYVPPPRWYQIPDFHCNVCSFPAFRVVDADRFQDHFCPVKMADELRSTSVGQKFHGQSVLLSRISSYSAMNNPVFNNAYSAYNVPQRSYHGMNATAGLSSVMAPSPVFASAPKEKGFSGFMIDFMMGGVSAAVSKTAAAPIERVKLLIQNQDEMLKTGRLSEPYKGIGDCFGRTIRDEGFVSLWRGNTANVIRYFPTQALNFAFKDHFKRMFNFKKDKDGYWKWFAGNLASGGAAGACSLFFVYSLDYARTRLANDAKAAKKGGERQFNGLVDVYRKTLASDGIRGLYRGFNISCVGIIVYRGLYFGMYDSLKPVLLVGTLQDNFLASFLLGWGITIGAGLASYPIDTVRRRMMMTSGEAVKYNSSLDAFKQIVAKEGTKSLFKGAGANILRAVAGAGVLAGYDKLQVVVFGKKYGSGGG

SEQ ID NO: 54946 - protein, 121 aa, Zea mays
  Coding DNA Sequence Number=SeqID_13167
MGTKLSFDEGAAAERLDVADAIEDVEQHCVVEPLELVGGLGLAARALLLLSRRLHPTEVASSQAHISGSGRGARVLVLPPPPGSPPSAAISPSESGTAAPWGMTALKTAAERRRLILTAGD

SEQ ID NO: 54947 - protein, 890 aa, Zea mays
  Coding DNA Sequence Number=SeqID_13168
  Gene Ontology: Mol. function=protein kinase activity; Cellular component=integral to membrane; Biological process=protein amino acid phosphorylation
  Homolog annotation: Hit_ID=Q8L4U4; Match level="QueryCoverage=95%, HitCoverage=96%, E-value=1e-163, Identity=53%"; Hit description =Putative receptor-like protein kinase
  Pfam annotation: Domain name=LRRNT_2; Domain location=40-80; Score =60.0; E_value=7.7e-15; Accession=PF08263.3; Description=Leucine rich repeat N-terminal domain
  Pfam annotation: Domain name=LRR_1; Domain location=184-206; Score =13.5; E_value=0.75; Accession=PF00560.23; Description=Leucine Rich Repeat
  Pfam annotation: Domain name=LRR_1; Domain location=208-231; Score =3.9; E_value=53; Accession=PF00560.23; Description=Leucine Rich Repeat
  Pfam annotation: Domain name=LRR_1; Domain location=232-254; Score =2.1; E_value=1.2e+02; Accession=PF00560.23; Description=Leucine Rich Repeat
  Pfam annotation: Domain name=LRR_1; Domain location=256-276; Score =1.2; E_value=1.7e+02; Accession=PF00560.23; Description=Leucine Rich Repeat
  Pfam annotation: Domain name=LRR_1; Domain location=280-301; Score =8.6; E_value=7.1; Accession=PF00560.23; Description=Leucine Rich Repeat
  Pfam annotation: Domain name=LRR_1; Domain location=304-326; Score =9.1; E_value=5.7; Accession=PF00560.23; Description=Leucine Rich Repeat
  Pfam annotation: Domain name=LRR_1; Domain location=328-350; Score =6.5; E_value=17; Accession=PF00560.23; Description=Leucine Rich Repeat
  Pfam annotation: Domain name=LRR_1; Domain location=352-375; Score =13.4; E_value=0.81; Accession=PF00560.23; Description=Leucine Rich Repeat
  Pfam annotation: Domain name=LRR_1; Domain location=377-399; Score =7.9; E_value=9.6; Accession=PF00560.23; Description=Leucine Rich Repeat
  Pfam annotation: Domain name=LRR_1; Domain location=401-423; Score =13.1; E_value=1; Accession=PF00560.23; Description=Leucine Rich Repeat
  Pfam annotation: Domain name=LRR_1; Domain location=425-447; Score =11.0; E_value=2.5; Accession=PF00560.23; Description=Leucine Rich Repeat
  Pfam annotation: Domain name=LRR_1; Domain location=449-471; Score =19.2; E_value=0.014; Accession=PF00560.23; Description=Leucine Rich Repeat
  Pfam annotation: Domain name=LRR_1; Domain location=473-494; Score =10.6; E_value=2.9; Accession=PF00560.23; Description=Leucine Rich Repeat
  Pfam annotation: Domain name=LRR_1; Domain location=85-107; Score =3.8; E_value=57; Accession=PF00560.23; Description=Leucine Rich Repeat
  Pfam annotation: Domain name=Pkinase; Domain location=601-883; Score =69.8; E_value=8.8e-18; Accession=PF00069.15; Description=Protein kinase domain
  Pfam annotation: Domain name=Pkinase_Tyr; Domain location=601-883; Score=54.3; E_value=8.4e-16; Accession=PF07714.7; Description =Protein tyrosine kinase
  Pfam module annotation: Pfam domain module=LRRNT_2::LRR_1::LRR_1::LRR_ 1::LRR_1::LRR_1::LRR_1::LRR_1::LRR_1::LRR_1::LRR_1::LRR_1::LRR_1: LRR_ 1::LRR_1::Pkinase::Pkinase_Tyr; Domain
  Pfam module annotation: Domain location=232-254::256-276::280 -301::304-326::328-350::352-375::377-399::401-423::425-447::449 -471::473-494::85-107::601-883::601-883
MTRRSQATPAASAALPLLLAPFLLLLLLLHCQCHRAGAATDAERRALLDFKAAVTADPRGVLASWTPAGDPCGFVGVTCDPPTGAVQRLRIHGAGLAGTLAPSLARLPALESVSLFGKRPRGRRPARLPRARAHAPQAQPQPERARPARSRRSSAPSRGSACSTSPTTTSPAGSPAGLFDPCLRLRYVSLAHNDLTGPVPPGIANCSRLAGFDFSYNRLSGELPDRVCAPPEMNYISVRSNALSGQISNKLTSCGGIDLFDVGSNNFSGAAPFALLGSVNITYFNVSSNAFEGEIPSIATCGTKFSRLDASGNRLTGPVPESVVNCRGLRFLDLGANALGGAVPPVIGTLRSLSFLRLAGNPGISGSIPPELGGIEMLVTLDLAGLALTGEIPGSLSQCRFLLELNLSGNKLQGAIPDTLNNITYLKVLDLHRNQLDGGIPVTLGQLTNLVLLDLSENQLTGAIPPQLGNLSNLTHFNMSFNNLSGMIPPEPVLQKFDYTAYMGNQFLCGSPLPNNCGTGMKHRKRVGVPVIIAIVAAALILIGICIVCALNIKAYTRKSTDEDMKEEEEAQMPSSENWCFSAKSLPSRYEDWETGTKALLDKDCLIGGGSIGTVYKATFENGMSIAVKKLETLGSVRGQDEFEHEMSQLGNLSHPNLVAFQGYYWSSSMQLLLSEFVASGSLYDHLHGSHPHAFSESSSRGAGGELSWEQRFNVALGAARALAYLHHDCRPQILHLNIKSSNIMLDGKYEAKLSDYGLGKLLPILGSIELSRIHTAIGYIAPELSSPTLRYSDKSDVFSFGVVLLETVTGRKPVDSPGVATAVVLRDYVREVLEDGTASDCFDRSLRGIVEAELVQVLKLGLVCTSNTPSSRPSMAEVVQFLESVRISS

SEQ ID NO: 54948 - protein, 218 aa, Zea mays
  Coding DNA Sequence Number=SeqID_13169
  Homolog annotation: Hit_ID=Q9FLJ1; Match level="QueryCoverage=41%, HitCoverage=28%, E-value=1e-14, Identity=46%"; Hit description =Arabidopsis thaliana genomic DNA, chromosome 5, P1 clone:MIO24
MDGELELPEFNPRERVKQQISVPFLWEVKPGAPKRDWVISQPVPVAFACPSPAPTKLVVSVPFQWEEKPGKPLQEASPFHVLPPDHAATPLALQRGQMAPPPGRRDGWFSFSESEDYSHSSGDTSAHDKEFQFPRAPSEKSWEVANDEDNPWSPPRSAATTLEELMVLSRRLRCGQALPVDVGKKRLPSVVILYYHSRAHEEALHRVFLAALHMDVPK

SEQ ID NO: 54949 - protein, 114 aa, Zea mays
  Coding DNA Sequence Number=SeqID_13170
MGSSSLRAEWESRLVGGNEIDDSGYDYGAASPLQPNRILAEYVDVYSPLLYTPNPPPQVVSIATTAQAKMKLWKETSRSSKTTTSSRSGLAATPSRLPVKAAFIYVSFPHFDLL

SEQ ID NO: 54950 - protein, 279 aa, Zea mays
  Coding DNA Sequence Number=SeqID_13171
  Gene Ontology: Mol. function=metal ion binding; Cellular component =integral to membrane; Biological process=electron transport
  Homolog annotation: Hit_ID=Q8W5L0; Match level="QueryCoverage=79%, HitCoverage=100%, E-value=2e-79, Identity=66%"; Hit description =Putative cytochrome b561
  Pfam annotation: Domain name=Cytochrom_B561; Domain location=73-278; Score=113.0; E_value=8.7e-31; Accession=PF03188.6; Description =Cytochrome b561
  Pfam annotation: Domain name=DAD; Domain location=80-158; Score= -54.8; E_value=0.08; Accession=PF02109.6; Description=DAD family
  Pfam module annotation: Pfam domain module=Cytochrom_B561::DAD; Domain location=73-278::80-158
  Subcellular localization annotation: CTP_CleavageSite=75; ConfidenceScore=5.65e-01
MNPPRIRHQDTPPNKPPYHIMPSRGGSGNTQRQQDPTVVVVAFAQPRRRTRRRRAIMPVKSSASFRMTALPMVVTAQLLAAAVLTLTLVWVLHFRGGVSWKPTSNPLFVYTAHPLFMVIGFIICTGEAVMAYRIVLGPRSAKKAVHLLLHLVALTFAAVGLYAAFKFHHDVGLPDIRSLHSWLGIATIALYGLQWLMAFVYFVFPGAVMTMRADYAPWHIFFGLAIFLMAICTAETGLAKFVSAFIAYPGEVFVVNFTGIAILMFGVAVVLAVILPSRY

SEQ ID NO: 54951 - protein, 900 aa, Zea mays
  Coding DNA Sequence Number=SeqID_13172
  Gene Ontology: Mol. function=helicase activity; Cellular component =nucleus; Biological process=transcription termination from RNA polymerase II promoter
  Homolog annotation: Hit_ID=Q1SF68; Match level="QueryCoverage=80%, HitCoverage=50%, E-value=0.0, Identity=73%"; Hit description=AAA ATPase; DEAD/DEAH box helicase, N-terminal
  Subcellular localization annotation: CTP_CleavageSite=53; ConfidenceScore=5.25e-01
MASPGVPSRRLGVQSVAADATQTKNRVCARAGNGRARHAHAFGAHTGFRVCARAALPAACQIERVGGKEREERKRRPKRAAVAAAVRRPFASIRCAASSIRRAASIREANVLNKLQPRSTWYLTGLGSLATTQREYVALHAFRRLSVQMQNAILQPSPEHFPKYQEQPPVMPDCFTPNFADHLHRSFNGPQLSAIHWAATHTAAGTNNGVLKKQEPWPFTLVQGPPGTGKTHTVWGMLNVIHLVQYQHYYAALLKKLAPESYKQVSGSTSTSSETVAAGSIDELLQSMDQNLFRTLPKLCPKPRMLVCAPSNAATDELLARVLDRGFIDGEMKVYRPDVARVGVDSQSRAAQAVSVERRTDQLLMKGREEVIGWLHQLKAREQQLSQEIAYLQRELNIVAAAGRSQGSVGVDPDVLAQRDRNRDILLQKLAASVESRDKVLVEMSRLLILESRFGLGSNFNMEDARASLEASFANEAEIVFTTVSSSGRKLFSRLTHGFDMVVIDEAAQASEVGVLPPLALGAARCVLVGDPQQLPATVISKAAGTLLYSRSLFERFQQAGCPTILLSVQYRMHPQIREFPSKYFYQGRLTDSESVVKLPDEAYYRDALMAPYIFYDLSHGRESHRGGSSSYQNIHEAQFALRLYEHLQKFLKANGAKKVSVGIITPYKLQLKCLQREFKDVMNTEEGKDIYINTVDAFQGQERDIIIMSCVRASNHGVGFVADIRRMNVALTRARRALWVVGNANALMQSEDWASLIADAKARKCFMDLDCIPKDFLPMKVPSNTPGRNSSNNIRNMRTGGGPRPRHLDMFSEPRTGMNMRPDEDERLNSVPRKCLEFPGGQILLMAGEKCKECVAIYNSGTAWNNGEELWDGPDSARAHDELQECMVACMIDVEMAVI

SEQ ID NO: 54952 - protein, 127 aa, Zea mays
  Coding DNA Sequence Number=SeqID_13173
  Subcellular localization annotation: CTP_CleavageSite=50; ConfidenceScore=5.43e-01
MVYGYKSPDCPVSQQSAGPTVGRRIRARRVARANGQKGHRTVRCAPDSVRCANGSESPMVGFAKEGKKSASDSVRWCTGLSEVSSDEENSSDSSEEESGGDDDDEGNSDDGGDNDGDSDGGKGDGKG

SEQ ID NO: 54953 - protein, 124 aa, Zea mays
  Coding DNA Sequence Number=SeqID_13174
MNPSSTSRWSGKVEQRSVTRVKGSASAPLVVGEEVHVLDCVACGVAIATRERKVEDGGHEPDPVEADVIMADLDIGVGRQGRWRCCGEETRGVIEPARKSAREEFSDRVRDLEGETRLTTGAHE

SEQ ID NO: 54954 - protein, 163 aa, Zea mays
  Coding DNA Sequence Number=SeqID_13175
  Gene Ontology: Mol. function=nucleic acid binding; Cellular component= ribonucleoprotein complex; Biological process=nuclear mRNA splicing, via spliceosome
  Homolog annotation: Hit_ID=Q6E0I8; Match level="QueryCoverage=99%, HitCoverage=100%, E-value=4e-89, Identity=84%"; Hit description=U1 snRNP
MGDYGHGGGQMRGNPDSRPRGQGQRPNVQQLKLMGQIHPTGLTPNLLKLFEPRPPLEYKPPLEKRKLPAYTGMAQFVSHFAEPEDPEYAPPVPKCETRAEKKARIRNNKLEQGAAKVAEELQKYDPQSDPNATGDPYKTLFVARLVKLLHFGKVYGFFNHSKM

SEQ ID NO: 54955 - protein, 71 aa, Zea mays
  Coding DNA Sequence Number=SeqID_13176
MSGAPGGLRLKLVTFGNSQRRLGYNSPDCPMAGVPILAHPDKEQLPVLCVTGTPRRCPTESEASNGLESNC

SEQ ID NO: 54956 - protein, 60 aa, Zea mays
  Coding DNA Sequence Number=SeqID_13177
MAQAAYQMRAGASSYLYARYLWTRAKSMYDVKKHDRDDGWSCSEATHREASAKWWKKEPT

SEQ ID NO: 54957 - protein, 158 aa, Zea mays
  Coding DNA Sequence Number=SeqID_13178
MGRGKRGKGWPRYADEKRKRPPSPPSEDFGDSEYSEEVSSEYDRSPAPASPVALSEDSNDSMGLSVAAQAYWRSIARTGLGGSNDLEEAFSEEVEDSSNFKEWSGSKGDDDDEDNGDGKGDNGGKGDDGDGNSGDSKGDDDDKGDNDDGKAGGTMLLA

SEQ ID NO: 54958 - protein, 96 aa, Zea mays
  Coding DNA Sequence Number=SeqID_13179
MALPSLVSIPNFVLPPLDPSGAKGLCCCKSIAVREPAVAVVNNKAGRWPASVTGEGASDAQAAHVALLLTEPPSPSPSPSSYKGSPPYKLKPAAAL

SEQ ID NO: 54959 - protein, 54 aa, Zea mays
  Coding DNA Sequence Number=SeqID_13180
MERYASFIAICGTSDCLLSFGSKFFSFLILLISKQYNESSGFEDVASTSLKTSY

SEQ ID NO: 54960 - protein, 256 aa, Zea mays
  Coding DNA Sequence Number=SeqID_13181
  Gene Ontology: Mol. function=actin binding; Biological process=actin cytoskeleton organization and biogenesis
  Homolog annotation: Hit_ID=Q1SZ88; Match level="QueryCoverage=98%, HitCoverage=14%, E-value=3e-80, Identity=50%"; Hit description=IMP dehydrogenase/GMP reductase
MSLLSRFFYKRPPDGLLEFLDRIYVFDSCFSTEVLPQGMYPVYLIGILTELHEEHVESSFLAINFRDGDKRSQLADILREYNIPVIDYPRHFEGCPVLPLSLIQHFLRVCEHWLSSGTNQNIILLHCERGAWPLLAFLLSCLLIYKKLNSAEHKTLDIIYREAPKGFLQLFSALNPMPSQLRYMQYVARRNISPQWPPMERSLSLDCLILRAIPSFDSDNGCRPLVRIFGRNLLGKFSSMTNMTFSMPKKKSLTNL

SEQ ID NO: 54961 - protein, 163 aa, Zea mays
  Coding DNA Sequence Number=SeqID_13182
  Subcellular localization annotation: CTP_CleavageSite=37; ConfidenceScore=5.08e-01
MASGSCQIHHNRSPTTHACRSVGDGESGSNRPTHVVSSMHRNVGKAISEATGGAVLLILICPTNLATKSRTEAPQAIAVVDLLAAGGLMLSSYSDSPTSSKHNSVLSSTPPNPSRQAPGALVCHKCESESVTRRPPAIAVRASAVRPGSCCRLPGTLLLCPAA

SEQ ID NO: 54962 - protein, 312 aa, Zea mays
  Coding DNA Sequence Number=SeqID_13183
  Gene Ontology: Mol. function=actin binding; Cellular component =nucleus; Biological process=actin cytoskeleton organization and biogenesis
  Homolog annotation: Hit_ID=Q1SZ88; Match level="QueryCoverage=81%, HitCoverage=14%, E-value=1e-102, Identity=73%"; Hit description=IMP dehydrogenase/GMP reductase
  Pfam annotation: Domain name=FH2; Domain location=1-308; Score=280.1; E_value=4.3e-81; Accession=PF02181.13; Description=Formin Homology 2 Domain
MAQTTCGRKMANCFRKVASELDDSFDDTNRRFVRRIQESEAREALKGWKRNAILALDTSVLDNDQVENLIKFCPTKEEIEMLKGYNGNKEMLGKCEQFFLELMKVPRVEAKLRVFAFRITFSTQVDELRTNLTTINDATKEVKESLKLRQIMKTILTLGNALNQGTARGSAVGFRLDSLLKLSDTRSRNNKMTLMHYLCKLLAEKMPELLDFDKDLIYLEAASKIQLKLLAEEMQAINKGLEKVEQELAASESDGAISVGFRKALKSFLDAAEAEVRSLISLYAEVGRNADSLAQYFGEDPARCPFEQGGQL

SEQ ID NO: 54963 - protein, 94 aa, Zea mays
  Coding DNA Sequence Number=SeqID_13184
MSSSQNRAGEARHAKENTIVASPVRNCALRCRNHAQVITPPPRSVDRPHHRTSAGMNPSIEFAIISALRSSRLIEVRASGSSLGVLRPWLRRSA

SEQ ID NO: 54964 - protein, 313 aa, Zea mays
  Coding DNA Sequence Number=SeqID_13185
MDKGKGPASSASALGGSRGSEEERRCRLRRADGSLVSEPARKRQRTAGGTKGAAPRPPACRGALVPWSRRHHHHLKVITPGSTSSSNNNINHRRQRSNSSRSGGRPASRVARRASSPSAPKVAPPPPGTRPAGGSGSQQQESVESGIGGPHPAATEKAPPGSHAPAGGLAGAAPASSGIAAVEEVPTAPTPAIEGDAGGVSSSITPPTPEEMEVVFGRWLRSGAEPEAAPVPLPRVLPRAHQALHETEAAFLREWEVLEAEHQCLSDWHTQLEERTKAASRQFASERSELERDHKEYKRGLQKVFARELEASR

SEQ ID NO: 54965 - protein, 105 aa, Zea mays
  Coding DNA Sequence Number=SeqID_13186
MATRWRTQPWHQSTSPEHHCQIEQSYTMCPPTAWRLVDYDGSHTSSLRTDRDQVSSNGEKQGGGNRFIGPGRVSTEEVEAMRFPRRVRHEACARLHGKLGGRLKG

SEQ ID NO: 54966 - protein, 433 aa, Zea mays
  Coding DNA Sequence Number=SeqID_13187
  Gene Ontology: Mol. function=nucleotide binding; Cellular component =endoplasmic reticulum; Biological process=protein folding
  Homolog annotation: Hit_ID=Q69TV0; Match level="QueryCoverage=88%, HitCoverage=90%, E-value=3e-88, Identity=47%"; Hit description =Putative dnaK-type molecular chaperone BiP
  Pfam annotation: Domain name=HSP70; Domain location=59-433; Score= -211.6; E_value=6.7e-08; Accession=PF00012.10; Description=Hsp70 protein
MGRRLLVSLLPLLMVVMVTAAAFDISRAPPAFGVRRGAPKEYFEWRRPWGTAPFLLGSAAAIHLGNTSSCIAAYDFGPGSHEYYQLCMPSWVAVTDNDMVLSGEAAMNHATVSPGTAISGFTRLLDQRLKDDVVKSEMKLSPLYKFSEREGRVAIQFNHPSRRGQVIEFSPLDLTVVLVSELKHMAEAHLGRELSAAVIAVPRHLNYNGRQDVVNVGRYDAGFRRAAKAIDRQITLYHHHTEQGDDFTTRIVDYMAELIKEKNQWDIRQDAEALRRLRVACEHAKKALSDQEETMVQIHVADIESSAPLTRAKLEELNQDLLDRVMGLVDGAVMGTGSGWLPRPRDESRTDMVDEIVLVGGSARMPKLRQLIEDYFRGRRPNSRKGVEPEDAIVQGTAILSRPKAARYLEECFDYLYGKDGRGLPSFVFRTSN

SEQ ID NO: 54967 - protein, 371 aa, Zea mays
  Coding DNA Sequence Number=SeqID_13188
  Homolog annotation: Hit_ID=P49964; Match level="QueryCoverage=15%, HitCoverage=42%, E-value=5e-26, Identity=94%"; Hit description =Signal recognition particle 19 kDa protein
  Pfam annotation: Domain name=SRP19; Domain location=186-284; Score =8.5; E_value=8.6e-05; Accession=PF01922.8; Description=SRP19 protein
MATWMAGFRTLVANLLALRMPTVAVGEATRRRMLRDKVLDAAASRDLVLQGDKVAAIETSWTATPRTHWPSPTPRLEAEVEHKEKGLGQGGHRRYQEWCLVSRSRNMAPSRHQRRRWSSGAGVAKFRARDVPAPGFTDNGRLGLDVRNPLPRHPSGRPIRSSDRRRQVTRMDDGVGDLRSAIKKWNVIYPVYLNSKKTVAEGRRIAAAKACPDPTCVEIADCCSHLKIPHAIEPHFSPRRAAIPAHLPARRQPRASLRAASPASPHGAPPSPRTFLRAASPALPCAPPAVSPHLRAASRQPAPARRQPVTAWRPAQPRFLAHRHSSRQPRFRGRVHRRQLCGRAVSQPICRREVLRYVICYSASVVDDPWL

SEQ ID NO: 54968 - protein, 313 aa, Zea mays
  Coding DNA Sequence Number=SeqID_13189
  Gene Ontology: Mol. function=aspartic-type endopeptidase activity; Cellular component=cellulose and pectin-containing cell wall; Biological process=proteolysis
  Homolog annotation: Hit_ID=Q69YD9; Match level="QueryCoverage=92%, HitCoverage=72%, E-value=2e-67, Identity=43%"; Hit description =Putative 41 kD chloroplast nucleoid DNA binding protein
  Pfam annotation: Domain name=Asp; Domain location=67-309; Score= -199.7; E_value=0.082; Accession=PF00026.14; Description=Eukaryotic aspartyl protease
MAHADAAAAPGCLLLLGWDGSIKFLVFYRNHPCVGSKGTSNDEMKAGISINVTEDRSINSFLFLMSINIGTPLGMNLVGIDTGSTLSWVQCQSCQPHCHEQATKAGQIFDPSRSTTFHRAGCKTRECLVVKDSLGLEFANCMEKENTCLYSVTYGGRFSFMFGSSLDVEYKNYEEARIVGFGSSGISFFKQVSSQINYKAFSYCLPSNEMVIRYMNLGDYRGQGADVLYTPLFQTTSKPTYSLTVEGIVANGQNLGLAPSQIVVDSGSLWTILLSDTFDRLDNVITESMKSLNYRRASSGGTICFESDADHMS

SEQ ID NO: 54969 - protein, 348 aa, Zea mays
  Coding DNA Sequence Number=SeqID_13190
  Gene Ontology: Mol. function=nucleotide binding; Cellular component =endoplasmic reticulum; Biological process=protein folding
  Homolog annotation: Hit_ID=Q69TV0; Match level="QueryCoverage=71%, HitCoverage=52%, E-value=3e-51, Identity=52%"; Hit description =Putative dnaK-type molecular chaperone BiP
MGRRLLVSLLPLLMVVMRIGGGGVRHLKSPTGVRGPKRGSEGVLRVARTLGPAPFLLGSAAAIHLGNTTSCIAAYDFRLGSPEYYQLCMPSWVAITDNDTVLSVEAAMNHATVSPGTTISGFTCLLNQKLKDDVVKSEMKLSSPYKFSKKAGRVAIQFNHPSWRGQVIEFSHVDLAVVLVSELKHRAEAHLGRELSAAVIVVPRHLNYNGRQDIVNAGRYDAGFHRAAKAIDRQIAAAAAYHHHTEQGDRKAILVLRVGGRTSDTTIFESRLEGGVDRRILKFINLITHYKRGLALELKSSPREREGENKSNGNQTNEHGDLFYRGSVLKNLVPVEVVTTHSLSQTVT

SEQ ID NO: 54970 - protein, 180 aa, Zea mays
  Coding DNA Sequence Number=SeqID_13191
  Homolog annotation: Hit_ID=P49964; Match level="QueryCoverage=25%, HitCoverage=33%, E-value=8e-13, Identity=74%"; Hit description =Signal recognition particle 19 kDa protein
MAARRGEKRGWRRAGKRGAGGAQEGARGWRRAVGRSGAGGAQRSCACAPWGEAVRREIRDIRNFRYVCDTYPEVSAVCPYLIRYPTPVRTAVSDLNAGGVRTGLGSGDAAALGDRLLRVEVADAVVHPRHLPPPVGASDLEKSFHEERRGGRFGVHAERRAYSSVGRSRARYRSTGRMSR

SEQ ID NO: 54971 - protein, 89 aa, Zea mays
  Coding DNA Sequence Number=SeqID_13192
MAPGHGEGAAVCCMCGDRGLADELFRCRCCRARLQHSCQQARGEAGDARVGREGVLHEEAPPPPVELGHSVKKKRHQAEERTPGEAVAG

SEQ ID NO: 54972 - protein, 324 aa, Zea mays
  Coding DNA Sequence Number=SeqID_13193
  Gene Ontology: Mol. function=aspartic-type endopeptidase activity; Biological process=proteolysis
  Homolog annotation: Hit_ID=Q69YD9; Match level="QueryCoverage=75%, HitCoverage=68%, E-value=1e-46, Identity=37%"; Hit description =Putative 41 kD chloroplast nucleoid DNA binding protein
MEIFCLLLAATGFTGCSSAGVNYGTITNNCVCVEQNCGRLPRAAAAASSTAHSSCHTSVYDSDGSIKFPVFYRNHPCVGSKDTSNDEMKADISINATEDRSINSFLFLMPINIGTPPVMNLVGIDTGSTLSWKENTCLYSVTYGGRWSYTAGKVVCDKLTIGTNTRFSFMFGCSLDVEYKNYEEAGIVGFGYSGISFFEQVSSQINYKDFSYCLPINETAIGYMNLSDYRGQGADVLYTPLFRTTSKPTYSLTVEEIVANGQNLGLAPSQIVVDSGSLWTILSSDTFDCLDNLVQFASSGDGLHRCYGGGGCLPMEFKYADMYA

SEQ ID NO: 54973 - protein, 162 aa, Zea mays
  Coding DNA Sequence Number=SeqID_13194
  Gene Ontology: Mol. function=kinase activity; Biological process =fatty acid biosynthetic process
  Homolog annotation: Hit_ID=Q18PR9; Match level="QueryCoverage=63%, HitCoverage=35%, E-value=4e-40, Identity=73%"; Hit description=Beta subunit 1 of SnRK1
  Pfam annotation: Domain name=AMPKBI; Domain location=74-160; Score =89.6; E_value=9.5e-24; Accession=PF04739.5; Description=5'-AMP -activated protein kinase, beta subunit, complex-interacting region
  Subcellular localization annotation: CTP_CleavageSite=62; ConfidenceScore=5.20e-01
MGNVSGRAEDLVDADIDDGNNMRRASSSSAGYVRGGGSSSSPPASPPRPHSPRMFVPQDFVPDSVESVSELMAPPSPDSSYGFHVPGEKEFSKEPPQLPAQLYLGVLNSRSTEEGCARPRHVVLDHLYIEKGWGAHPLVALSYTHRFRSKYVTCVLYKAIER

SEQ ID NO: 54974 - protein, 72 aa, Zea mays
  Coding DNA Sequence Number=SeqID_13195
MGNASSRAEDLADADIDDANNVRRASSSFEGYVRGDGSSLSPPTSPLRPHSPRMFVPQVILTPTRSLKIVSP

SEQ ID NO: 54975 - protein, 44 aa, Zea mays
  Coding DNA Sequence Number=SeqID_13196
  Gene Ontology: Mol. function=protein serine/threonine kinase activity; Biological process=protein amino acid phosphorylation
  Homolog annotation: Hit_ID=Q8LCP3; Match level="QueryCoverage=94%, HitCoverage=10%, E-value=3e-08, Identity=59%"; Hit description=ATMRK1
MANIIRKCWDPNLDKRPDMDEVVQLLEALDTRKRDGMTPKGQAG

SEQ ID NO: 54976 - protein, 109 aa, Zea mays
  Coding DNA Sequence Number=SeqID_13197
MREPQENTWAARISIRPRRTSEPPLRPSRLQPRTARVHNVAGTGESEGELEMDKDNRLRARAGEKASKSRSHGSTALFVAVDYAFLLAFAGFLAYLVGSRILPSAVSFV

SEQ ID NO: 54977 - protein, 161 aa, Zea mays
  Coding DNA Sequence Number=SeqID_13198
MAHVRDGSTDSSGRLLPRPSRALTSIKAARNHDVTQHKDADAPCKQAFTHTTTLLQQPRYEQPLPRGLGRTTIPSASALALRGNRWAQVSNAVHRHVGLQAYRTLNISPWNTTTPGFAAYISQDGEKCTTMGGLSRRRVGYQGGLSGRTQGVGHAVWRLET

SEQ ID NO: 54978 - protein, 115 aa, Zea mays
  Coding DNA Sequence Number=SeqID_13199
MQVMAVRRVKEESCREGQGVLRGGRGKGEKGLAAETERAAGCTDVAAGGCVASPYAFSLKSLLYSVFAKSHLALLQVALALGFSGAMVVANDEAFALVVYITTIHTLMLLTIQLK

SEQ ID NO: 54979 - protein, 132 aa, Zea mays
  Coding DNA Sequence Number=SeqID_13200
MTRSRTSSPALLVAIESLWLAAFRPASLAPCLRQSPGPTNRRSSFGDQMIQLFEFYKVEDPEHLFGEGKNWGVVRFAVVPLMGLGVCGSLCQEMFGLQAVMRMMIFYYDYGNGKEGVEADLQEFQDFDEFED

SEQ ID NO: 54980 - protein, 53 aa, Zea mays
  Coding DNA Sequence Number=SeqID_13201
MGAIGHSEAFMEVRIWVSSSTRDSGTLHAVKRPNLNSGKRRLKWKPEWTYQYY

SEQ ID NO: 54981 - protein, 177 aa, Zea mays
  Coding DNA Sequence Number=SeqID_13202
MVKVRKEEQGARSRSVTAADAGGVVQGSNGLVHAHATRRAFPPAPRARELSLRRCPSPGAAASAADRGQFGESWRRGRARWATRTRTRGWGMGMVVWSLPLLVSWLALTPVGPGLGDCHWETLGEGRPSAGWGGSRFPGHAVDECGFRLQSPDSQGGREGGPTYQKYVIDLVPGDLL

SEQ ID NO: 54982 - protein, 219 aa, Zea mays
  Coding DNA Sequence Number=SeqID_13203
  Gene Ontology: Mol. function=nucleic acid binding; Cellular component= intracellular
  Homolog annotation: Hit_ID=Q9FFH2; Match level="QueryCoverage=25%, HitCoverage=23%, E-value=9e-11, Identity=59%"; Hit description =Arabidopsis thaliana genomic DNA, chromosome 5, P1 clone:MLN1
  Pfam annotation: Domain name=G-patch; Domain location=82-122; Score =33.4; E_value=7.8e-07; Accession=PF01585.13; Description=G-patch domain
  Subcellular localization annotation: CTP_CleavageSite=44; ConfidenceScore=5.18e-01
MEPDADEDYMGDLSRFLPPSPSSSPPKNLGRRKQPSTQAQAQPRAKRGKGVSWQERRRQERERKQREEDARTMAGLAEAIPESNVGFRMLKQMGYDPDSRADAGAEPVSIEIRRSRAGLGAEEPVLALTPALAPVEKPREVSERERRQQEEMAAELREDSRNGLPEHLVRLGRPDLVAEQHHAALGVGERIHGRDEVRHGLLHVDHVCGDDEIEAARGG

SEQ ID NO: 54983 - protein, 375 aa, Zea mays
  Coding DNA Sequence Number=SeqID_13204
  Pfam annotation: Domain name=DUF793; Domain location=1-370; Score =358.9; E_value=7.9e-105; Accession=PF05633.2; Description=Protein of unknown function (DUF793)
MPPPRGAGPELGDFHAHVAVRLAGLSAPGGEEFMSVAWVRRLLEAFLLCQEEFRAAVDEARRRGGGVTAPADAEKLVAEVGERAVRALDVCNAARDGVDQARRWERLAGLAASALLAPAEGQVHEGQLWRARKALSDLSLLLADDAAAASAGAGGGLASFLASHRNRSFGRARASPSRASPSAHLRSLSWSVSRTWSAARQLQAIGAGLAAPRATEASCGFAAPAYAMGCLLHLAAWALVAAVPCPDRAAALQAHHLPAAPPRAAFPWAPPLLALQERLAEEGRRKDRRSSCGLLREIHALDKCAQRLAEAIDAAPVPLTGEREAELREAAAELAAACSAIKDGLDPLERQVRELFHRIVRSRMAGLDPPMANAD

SEQ ID NO: 54984 - protein, 73 aa, Zea mays
  Coding DNA Sequence Number=SeqID_13205
MALNGVKAQAVNGLSTATYCDVVTPSSTWHHRDERRTLTMAFWPIVKQVGMVAQCTNSSMVTIFSPTCLVDAS

SEQ ID NO: 54985 - protein, 296 aa, Zea mays
  Coding DNA Sequence Number=SeqID_13206
  Gene Ontology: Mol. function=nucleic acid binding; Biological process= DNA integration
  Homolog annotation: Hit_ID=O24587; Match level="QueryCoverage=46%, HitCoverage=13%, E-value=5e-76, Identity=95%"; Hit description=Pol
MAQRQISLSGTDGHTDLNKGVATPCFGIWYPKGSNFDLIGYSDSDYAGCKVDRKSTSGTCRFLGRSLVSWNSKKQTSVALSTAEAEYVAAGQCCAQLLWMRQTLRDFGYNLSKVPLLCDNESAIRIAENPVEHSRTKHIDIRHHFLRDHQQKGDIKVFHSQRRFEREKVDLDHERLPLHSDERPKSAQSGFTGLSGGAPDSVPVVQTGSDELAALGSSTTVYGYKSSDWSGGAPDCPVVHRTVRWAIHRRTRRSREESGNVRLKFTGLSGGAPDCPVSQRVRCANGSQTPTVGFAK

SEQ ID NO: 54986 - protein, 121 aa, Zea mays
  Coding DNA Sequence Number=SeqID_13207
MDEEGEIATTFLYSPREARWEFRGIELTTWGPNASERRYNACGKEIGEQGQDVSVREEAGARAPPISAKTCSWATWCRRMALAHLKKWFYLVSQSQSRFLEKPEPCQRALKIRQTNNLNTM

SEQ ID NO: 54987 - protein, 156 aa, Zea mays
  Coding DNA Sequence Number=SeqID_13208
  Subcellular localization annotation: CTP_CleavageSite=11; ConfidenceScore=5.09e-01
MAASSGDAQPSPEYYPSSRFRPVPFNRAYTNKWVLLQRSLHTTVFFDEGAKPPISLRNRKISEETTITEKVLAYEELHKTFLFTTNQTGRSHKRPEQFSQQKTDNYPNKVSRLQQFCHPEIRLSRGHHPKALPKASLAVFRINLLPSTTILCSFFF

SEQ ID NO: 54988 - protein, 502 aa, Zea mays
  Coding DNA Sequence Number=SeqID_13209
  Gene Ontology: Mol. function=oxidoreductase activity; Cellular component=intracellular; Biological process=lignin catabolic process
  Homolog annotation: Hit_ID=Q339K6; Match level="QueryCoverage=97%, HitCoverage=80%, E-value=0.0, Identity=71%"; Hit description =Multicopper oxidase family protein, expressed
  Pfam annotation: Domain name=Cu-oxidase; Domain location=61-217; Score=149.4; E_value=9.5e-42; Accession=PF00394.12; Description =Multicopper oxidase
  Pfam annotation: Domain name=Cu-oxidase_2; Domain location=342-484; Score=177.3; E_value=3.8e-50; Accession=PF07731.4; Description =Multicopper oxidase
  Pfam annotation: Domain name=Cu-oxidase_3; Domain location=1-50; Score=10.6; E_value=1.3e-06; Accession=PF07732.5; Description =Multicopper oxidase
  Pfam module annotation: Pfam domain module=Cu-oxidase::Cu-oxidase _2::Cu-oxidase_3; Domain location=61-217::342-484::1-50
MVTQRPIPPNANFTYRFDVAGQEGTLWWHAHDAFLRATVYGALIIRPRNGAASYPFPKPHKEIPILIGEWWEKDLAAVDRNFTRGHYDEFSSGSTINGKLGDLFNCSGVFEDGYVLDVEPGKTYLLRVINAALFSEYFIKIAGHKFTVVAADANYVTPYATDVIVIAPGETMDALVVADAAPGTGRYYMAAQPIQAPPPDTQTPEFATRGTVRYYQHQHTRNNKSSPVDDDDAVAPDMPDQHDTIKSFYFHGNLTGLRQRQRQRARVPARADERLLVTLGLGSICRLPGRRSCKRGDHPESMVVANMNNVSFHDADAAAPPLLEAHYYRRRRGANGGVGTAGLPDRPPSAFNYTDPALIPFGPEEMRLEPTRRATAVRRFRHGAVVDVVFQSTAMLQSDSNPMHLHGHDMFVLAQGIGNYDAATDEAKYNLVNPPRKNTVLVPNLGWAAIRFVADNPGAWFIHCHFEFHLAMGMAAVFIVEDGPTTNTSLPPPPPGFLDGRP

SEQ ID NO: 54989 - protein, 133 aa, Zea mays
  Coding DNA Sequence Number=SeqID_13210
MSPHRRCLASAPRGKGARATEPTLTAPLHAAEAHARPCTPCPYPYTLRPSPVHACRAPRPPRRAPRRCPHARRPRHPARPSPRRRPARGALHRIATASLRRAAAHTPARSVAKVSQLRRRPPRLARICAIRQV

SEQ ID NO: 54990 - protein, 642 aa, Zea mays
  Coding DNA Sequence Number=SeqID_13211
  Gene Ontology: Mol. function=oxidoreductase activity; Cellular component=intracellular; Biological process=lignin catabolic process
  Homolog annotation: Hit_ID=Q339K6; Match level="QueryCoverage=85%, HitCoverage=91%, E-value=0.0, Identity=76%"; Hit description =Multicopper oxidase family protein, expressed
  Pfam annotation: Domain name=Cu-oxidase; Domain location=211-366; Score=150.9; E_value=3.5e-42; Accession=PF00394.12; Description =Multicopper oxidase
  Pfam annotation: Domain name=Cu-oxidase_2; Domain location=482-624; Score=177.2; E_value=4.1e-50; Accession=PF07731.4; Description =Multicopper oxidase
  Pfam annotation: Domain name=Cu-oxidase_3; Domain location=84-200; Score=205.4; E_value=1.4e-58; Accession=PF07732.5; Description =Multicopper oxidase
  Pfam module annotation: Pfam domain module=Cu-oxidase::Cu-oxidase _2::Cu-oxidase_3; Domain location=211-366::482-624::84-200
MGLEDNGLSRAWAELNCVGPHQEDPTATILMVVVVTKATLSRVPKSIVIKAAAHAVAVVVVAISIVVLSATSMLPVAAVEHTFVVSQVKMTRMCKQIPVTVVNGQLPGPTIEVTEGHSVTVHVVNMSPYNLTIHWHGVYQLLNCWNDGVPMVTQRPIPPNANFTYRFDVAGQEGTLWWHAHDAFLRATVYGALIIRPRNGAASYPFPKPHKEIPILIGEWWEKDLAAVDRNFTRGHYDEFSSGSTINGKLGDLFNCSGVFEDGYVLDVEPGKTYLLRVINAALFSEYFIKIAGHKFTVVAADANYVTPYATDVIVIAPGETMDALVIADAAPVGRYYMAAQPIQAPPPDTQTPEFATRGTVRYYQHQHTRNNDDAVAPDMPDQHDTIKSFYFHGNLTGLRQRQRQRARVPARADERLLVTLGLGSICRLPGRRSCKRGDHPESMVVANMNNVSFHDAAAAAPLLEAHYYHRRGGNGGVGTAGLPDRPPSAFNYTDPALIPFGPQEMRLEPTRRATAVRRFRHGAVVDVVFQSTAMLQGDSNPMHLHGHDMFVLAQGIGNYDAATDEGKYNLVNPPRKNTVLVPNLGWAAIRFVADNPGAWFIHCHFEFHLAMGMAAVFIVEDGPTPNTSLPPPPPGFLDGRP

SEQ ID NO: 54991 - protein, 93 aa, Zea mays
  Coding DNA Sequence Number=SeqID_13212
MAPKRANSKVTASIDDAANVALLAKKKGKAPIADDIPQEAFDDEAVNSKRQHQGNLPTPEGTRAPAAPRGYLTRPRQASSTQKANTPSKMVKS

SEQ ID NO: 54992 - protein, 320 aa, Zea mays
  Coding DNA Sequence Number=SeqID_13213
MGATRSTHAGVDGNRREQGCEQLGAVGSSDGLPCTTLQRNKDRAKLDTVANRRSIEAEPIAKQELRRSMMRGPIWQARRRGGHRCCCSDMKYLLPKQTSTMEAGELPTVDPAVTGEHQVCAPWEMSREELSIREQLRPAQNESPTRRLGAGAELGKVAAKESTMARTAPRPGRPPRRARCCPATSSSRVGAPGARRLRRPATRRERAGAPRWGLRPARWRAGRAPESRAGRGPVEVTSSAMGRAHGREGLDRRLWMGLSREGAATARWRTSWRPSATGKERAAGGEDEGERARQGAMGEDRSRDDAGLCERMQASKSLHA

SEQ ID NO: 54993 - protein, 230 aa, Zea mays
  Coding DNA Sequence Number=SeqID_13214
  Homolog annotation: Hit_ID=Q9LTX0; Match level="QueryCoverage=58%, HitCoverage=55%, E-value=9e-14, Identity=35%"; Hit description =Arabidopsis thaliana genomic DNA, chromosome 3, P1 clone: MBK21
  Subcellular localization annotation: CTP_CleavageSite=62; ConfidenceScore=5.51e-01
MALSRLSHRLLSPTAVAAAHFPIPKTFTHGRDPFILLNPGRRFFSAPSNPSPNPSSTTSEPSQGAPSAPASPDEMRHQEIEGPTVERDTSPLADETRRELDALRRTVQRLSGSLALLGGAHLAAGAWISYGAPPLGVGSAAAVQGVAAFAFPFAVALVLRRAIKPIAFFQKMEANARLQVLTLCLQATKNVNLMLLRTRVMAISCALGVSVASVAAASRRWPNALLAYLA

SEQ ID NO: 54994 - protein, 417 aa, Zea mays
  Coding DNA Sequence Number=SeqID_13215
  Homolog annotation: Hit_ID=Q2RAV1; Match level="QueryCoverage=25%, HitCoverage=36%, E-value=3e-26, Identity=58%"; Hit description=4' -phosphopantetheinyl transferase superfamily protein
MKDLIDLAKGRVLEDEDDSFFIVERWAPGLTLLQASLLGGLGFLMDSTFCIWTLSVSLLSKKPREPSMISFPEPKAGGQCRRRIRRRIGGSLHIVEAERPDEQPPHVVLHCWQQNNCSAFPNFNFSTSHHGDYVGFASEPLCLVGLDIVSVSEPHGETAAEFISNFSSCLTDHEWNCIVRAGTPRDVLTEFYREPVIFCARQSRRSFHSADSGRAYTISGVTGQQCSAAKAAEREVHYQATRKKNMELQARCVCVVAMLLVASFAGLDTAHGAGECGRVPVDQAVLKLAPCAAATQNLRAAVPPSCCAPSGASPSACVSSCCPAPGRGAPSSAQRRAEKTVGPGSSNQSAMEHRAEDRGEGALGERRSAQESRRTRRTPARAPIRSKKRDSEMDCRNSDCGSAKSHPDSKIPKLKGL

SEQ ID NO: 54995 - protein, 174 aa, Zea mays
  Coding DNA Sequence Number=SeqID_13216
MGTVADVASMSNDEQEAVAPALPKVRGHIGSAYGEEDAREAGSSSLFGGDGSSDDTHPSSGSGHRSSVASSQKSLDEFEFGVTWDGDGLQEDEVEQGKIFLGVSRLFRGSVVTSAEFAEKQRTPASLALGTKRLRLSYPFLELASFGRLEVHTLINPTQAVHLVFLSLGAAARE

SEQ ID NO: 54996 - protein, 578 aa, Zea mays
  Coding DNA Sequence Number=SeqID_13217
  Gene Ontology: Mol. function=1-acylglycerol-3-phosphate O -acyltransferase activity; Cellular component=integral to membrane; Biological process=phospholipid biosynthetic process
  Homolog annotation: Hit_ID=Q9SHJ5; Match level="QueryCoverage=99%, HitCoverage=97%, E-value=1e-103, Identity=40%"; Hit description =Glycerol-3-phosphate acyltransferase 1
  Pfam annotation: Domain name=Acyltransferase; Domain location=385 -503; Score=25.1; E_value=2.3e-05; Accession=PF01553.11; Description =Acyltransferase
  Subcellular localization annotation: CTP_CleavageSite=47; ConfidenceScore=5.20e-01
MVFPAILPKVAVRLLFTFYRAARKLRRHAFQLYNRRTAAKPPSFSVSQQQAGAATFKTDAAIPDAAGRTVVCDVHGALLRSSALFPYFMVVAYEGGSLLRAMLLLCAFPLVWALGERSGGAGAVRVMAFVTFAGLRPRDMDLVGRAVLPKHYMEQLNALVYGSLWLPARRKVAVTGAPRVMSEWFLKEYLAADAVVGLELQLVTVGRCRYFTGLLSGPATGPELRHKALMEALGAEDDTVADVGIISNSNPLDHLFVPYCKISLSLYTKEDERNYCGLRLRSLELGRASRQRCYGLSDLKGDGAHHRWKEVYVVNTENDKLPRVKYPKPLIFHDGRLAFLPTPAAMLAFFLFLPLGVILSVIRINIGIVLPYKVNFVAAAIFGVRFRASGLRAPPADGEQRRGVLYVCTHRTLVDPIMLTTALQKPVPALTYSLSRLSELIAPIKTVRLTRDRARDADTMSRLLKQGDLAVCPEGTTCREPYLLRFSPLFAELADDMEPVALDAQVTMLYGTTASGHKWLDPVAFFANPVPSYRVEFLGTVPREWTRAGGQDRRGGGQLGAAATGRGTGVRVHRAHSP

SEQ ID NO: 54997 - protein, 616 aa, Zea mays
  Coding DNA Sequence Number=SeqID_13218
  Gene Ontology: Mol. function=glucose-1-phosphate adenylyltransferase activity; Cellular component=chloroplast; Biological process =glycogen biosynthetic process
  Homolog annotation: Hit_ID=P55241; Match level="QueryCoverage=79%, HitCoverage=100%, E-value=0.0, Identity=92%"; Hit description =Glucose-1-phosphate adenylyltransferase large subunit 1, chloroplast precursor
  Pfam annotation: Domain name=Hexapep; Domain location=511-528; Score =2.8; E_value=65; Accession=PF00132.14; Description=Bacterial transferase hexapeptide (th
  Pfam annotation: Domain name=Hexapep; Domain location=564-581; Score =17.0; E_value=0.066; Accession=PF00132.14; Description=Bacterial transferase hexapeptide (th
  Pfam annotation: Domain name=NTP_transferase; Domain location=209 -463; Score=295.3; E_value=1.1e-85; Accession=PF00483.13; Description= Nucleotidyl transferase
  Pfam module annotation: Pfam domain module=Hexapep::Hexapep::NTP _transferase; Domain location=511-528::564-581::209-463
MALLRITLTKSERSSSVMGKDSEYHLQANSSGRKVSKTMNGLQKAKAKGKIGTLMMVGCMSLSITCKKCEPLFLSSPPVCPLILYINTSTASQLATRSLREASAISISQPPFFCSVVYLVVGGDMQFALALDTNSGPHQIRSCEGDGIDRLEKLSIGGRKQEKALRNRCFGGRVAATTQCILTSDACPETLHSQTQSSRKNYADANRVSAIILGGGTGSQLFPLTSTRATPAIFVMSQFNSTSLNRHIHRTYLEGGINFADGSVQVLAATQMPEEPAGWFQGTADSIRKFIWVLEDYYSHKSIDNIVILSGDQLYRMNYMELVQKHVEDDADITISCAPVDESRASKNGLVKIDHTGRVLQFFEKPKGADLNSMRVETNFLSYAIDDAQKYPYLASMGIYVFKKDALLDLLKSKYIQLHDFGSEILPRAVLDHSVQACIFTGYWEDVGTIKSFFDANLALTEQPSKFDFYDPKTPFFTAPRCLPPTQLDKCKMKDAFISDGCLLRECNIEHSVIGVCSRVSSGCELKDSVMMGADTYETEEEASKLLLAGKVPVGIGRNTKIRNCIIDMNARIGKNVVITNSKGIQEADHPEEGYYIRSGIVVILKNATINDGSVI

SEQ ID NO: 54998 - protein, 111 aa, Zea mays
  Coding DNA Sequence Number=SeqID_13219
  Gene Ontology: Mol. function=structural constituent of ribosome; Cellular component=ribonucleoprotein complex; Biological process =translation
  Homolog annotation: Hit_ID=Q8RVB1; Match level="QueryCoverage=96%, HitCoverage=94%, E-value=6e-45, Identity=70%"; Hit description =Chloroplast 50S ribosomal protein L31-like
  Pfam annotation: Domain name=Ribosomal_L31; Domain location=36-85; Score=13.7; E_value=2.6e-05; Accession=PF01197.9; Description =Ribosomal protein L31
  Subcellular localization annotation: CTP_CleavageSite=33; ConfidenceScore=5.22e-01
MTLSLSTSFLPIPAAARTTARTLRSVVPSQGMRCSMRKKGLHPEIYEDAKVYCNGELVLVTGGTKPEYTVDVCQIEKFRKKWGHIKEYWPEDQWREMHPDGDPEFEPEGDN

SEQ ID NO: 54999 - protein, 318 aa, Zea mays
  Coding DNA Sequence Number=SeqID_13220
  Gene Ontology: Mol. function=RNA-directed DNA polymerase activity; Cellular component=intracellular; Biological process=RNA-dependent DNA replication
  Homolog annotation: Hit_ID=UPI00004C1732; Match level="QueryCoverage =99%, HitCoverage=25%, E-value=1e-148, Identity=73%"; Hit description= UPI00004C1732 related cluster
MPGIPREVTEHSLDIRAGARPVKQPLRRFDEEKRRAIGEEIHKLMAAGFIKECYVTMPFGLRNAGATYQRCMNHVFGEHIGQTVEAYVDDIVVKTRKASDLLSDLEATFRCLKEKGANPEKIATITSMGPIKDLKGVQRVMGCLEALSRFISRLGERGLPLYRLLRKAECFAWTPEAEEALGNLKALLTNAPILVPPAAGEALLIYVAATTQVVSTAIVVERREEGHALPVQRPVYFISEVLSETKIRYPQIQKLLYAVIPTRRKLRHYFESHPVTVVSSFPLGEIIQSREASSRIAKWAVEIMGETISFAPQKAIKS

SEQ ID NO: 55000 - protein, 570 aa, Zea mays
  Coding DNA Sequence Number=SeqID_13221
  Homolog annotation: Hit_ID=Q6BTJ4; Match level="QueryCoverage=42%, HitCoverage=25%, E-value=4e-09, Identity=27%"; Hit description =Similar to CA1621|CaIFF6 Candida albicans CaIFF6 unknown function
MELRMRTFAYIIPNPSTRNGNSYASIPAPTVAPRIAAAASSNQYRGRRFLRPHGKPGGLFLALHACLFPTSTPPSPLHPACSPPLPRATETTSSASSPRPPTHPSPNIVEHPGQSSVTLAPRDYRHLLPAIVALHHQGPLYRARAVQICRGSPLPITGRSTIHVRCAPSSSTRHPWKVHHLKWGCNEACLYRVVDPPPQILSVPRPRRLNLPRISSPHYWEVRHPWKVRPSSSTHHPWKVRTRELAYAAEARRDELSKAVTGVELSKGIKGLRDEIAAHDGFHASADNIFLTDGASPAGNDGASCDVVGPSPELGEAEAPPRSRSSLSSKAEVESEPLGQARRRPSAEARAESEPWGRAKRSSSSSGAEPESEPWGRAKRSSSSSGSEPESEPWGRVKRSSSSSRAEPESEPWGQAKRSSSSSGAKPESEPWGRAKRSSSSSGAEPEFEPWGRAKRSSSSSGAEPESEPWGRAKRSSSSSGAEPESEPWGRAKRSSSSSGAEPESEPWGRVKRSFLWRLRPDLVADSLTLSSGTAVGAAQAALSPCQAGQWSGEVTTVTSALSTGGRASG

SEQ ID NO: 55001 - protein, 168 aa, Zea mays
  Coding DNA Sequence Number=SeqID_13222
MQSARNRAEWAHLFDSNAPSMEAQAHTSCNRRAGCYVRATAPPLAPLPRLLDCGTSTATRGNPAYDPTVPAWWHIWQEKRAMLRLRHNDRVKKGTGKGGYPERDPSPRRKRAPSPPTDQRFEGWPLGRVQQPPQSARAPRPLLVRGSRAGPSEGFNGRLRPLGLRAHY

SEQ ID NO: 55002 - protein, 577 aa, Zea mays
  Coding DNA Sequence Number=SeqID_13223
  Gene Ontology: Mol. function=aspartic-type endopeptidase activity; Cellular component=lysosome; Biological process=lipid metabolic process
  Homolog annotation: Hit_ID=Q5VPI4; Match level="QueryCoverage=85%, HitCoverage=95%, E-value=1e-175, Identity=62%"; Hit description =Putative aspartic proteinase
  Pfam annotation: Domain name=Asp; Domain location=136-563; Score =467.8; E_value=1.3e-137; Accession=PF00026.14; Description =Eukaryotic aspartyl protease
  Pfam annotation: Domain name=SapB_1; Domain location=435-473; Score =20.5; E_value=0.0047; Accession=PF05184.5; Description=Saposin-like type B, region 1
  Pfam annotation: Domain name=SapB_2; Domain location=375-410; Score =36.4; E_value=9.7e-08; Accession=PF03489.7; Description=Saposin-like type B, region 2
  Pfam module annotation: Pfam domain module=Asp::SapB_1::SapB_2; Domain location=136-563::435-473::375-410
MGRRTCGTAFILLYVLSTSTLPASSSNTGDGLIRIPLKKRSIMDTIYGDLLPKPSAPEEKEKQAVDDPVRDAIARARERQHEMLVQAAATERRRRYYWSYSGAGGKGNGSRLHDGGQGEGSGSIAIVALKNFLNAQYFGQIGVGCPPQNFTVVFDTGSANLWVPSAKCFFSVRMACALACLFHPKYDSRQSSTYKPNGTPASIHYGTGGIAGFYSQDQVTVGNLVVQNQEFIEATHEPGFTFLLAKFDGILGLAFQEISVEGSLPVWYNMVNQNLVAQPVFSFWLNRNPFDGEGGEIVFGGSDEQHYKGSHTYTRVTRKGYWQFEMGDFLIGGRSTGICVDGCAAIADSGTSLIAGPLVAIAQINEQIGAAGVVNQECKQVVAGYGLQIAGLLEAQQTPPSEVCSKVGLCTFDGTRGVSAAGIESVPGSVDGMAEALCNACEIVVFWTQSELSPNRSNEGTLEYVDRLCESMPDPVGSRVDCGRVGSLQTVAFSIGGRAFELRPDQQYVLKVGEGFAAHCISGFTALDVPPPVGPLWILGDVFMGAYHTIFDYGKMRIGIPDISAEPKSGGHCDYFH

SEQ ID NO: 55003 - protein, 263 aa, Zea mays
  Coding DNA Sequence Number=SeqID_13224
  Homolog annotation: Hit_ID=Q5GAQ3; Match level="QueryCoverage=31%, HitCoverage=16%, E-value=6e-37, Identity=90%"; Hit description =Putative alanine aminotransferase
MGRREAERKGGKKPEGDRRGRRKERIQGNDGASCDVVGPSPELGEAEAPPRSRSSLSSKAEVESEPLGRARRRPSAEARAESEPWGRAKRSSSSSGAEPESEPWGRAKRSSSSSGAEPESEPWGRAKRSGAVPLSGRSVERRSDYGHFGSVDWRARVRIKVHMILQLLIRSEKDGILCPIPQYPLYSASIALHGGSLVPYFLDEETGWALEVDELKKQLEEARSKGISVRALVVINPGNPTGQTGPTVPNAMVVQEPFVYIYP

SEQ ID NO: 55004 - protein, 119 aa, Zea mays
  Coding DNA Sequence Number=SeqID_13225
  Gene Ontology: Mol. function=microtubule motor activity; Cellular component=microtubule associated complex; Biological process =microtubule-based movement
  Homolog annotation: Hit_ID=Q9ZQ52; Match level="QueryCoverage=67%, HitCoverage=8%, E-value=1e-17, Identity=50%"; Hit description =Putative kinesin heavy chain
MDATSVGGGGKAKKGATRRKVGEPSKKSVWSNMIRAVQGLVAHYEDLKLKYYEEMDKRKKLYNIVQETKGNIMFFCRCRPLSKDEVSSGQNANGRTTKKTFKFDRVFTSKDDQSILVIT

SEQ ID NO: 55005 - protein, 308 aa, Zea mays
  Coding DNA Sequence Number=SeqID_13226
  Homolog annotation: Hit_ID=Q10L92; Match level="QueryCoverage=37%, HitCoverage=59%, E-value=1e-24, Identity=55%"; Hit description =Glutaredoxin family protein, expressed
MLLTGERLVVFLFAALVHLAVSLAILVATALVVELAQDGSGSAPLRPSLPRGAERLSPCASPVADCRSAPRCGASTSPWTNTTSPWMSHSSVSCRESSTPEAADTRFHSSWSGAHSSAVLTRFAGCTSPASSDTSLKALPGRTLPSSTVHVASSGLWPAPPVFVEEEGWTRHCLECNENGLWRERRSLSYVLGLLYIVNTVGGWVLGHARQAGTVRALAGIGASRRFSKTKMQSHGPQNVEGTEVREPGAGRGKVDPMDYTAMRSHIMDHAVTLEVLRFFFLVLLEMMVLIKGCFQGEPRAFPVLQDN

SEQ ID NO: 55006 - protein, 87 aa, Zea mays
  Coding DNA Sequence Number=SeqID_13227
MSFTTVSCARCEQGLDGGGAGYSAMVARLLLLGMRLWWDEADRVTAPVLAEQGRSGSRVVTWRGRAVGQGTSVPSGQLYALLRVSVT

SEQ ID NO: 55007 - protein, 140 aa, Zea mays
  Coding DNA Sequence Number=SeqID_13228
  Subcellular localization annotation: CTP_CleavageSite=62; ConfidenceScore=5.53e-01
MERRPKRRRLTLSPSSSPPRASGLAAKPRMVSRPVTPPSLSLTVRQSIECMCRGNFAAALLLANASASSFHSLGDHHRLPCYSNGKSESASAPATSISQPWSSPTTSTHRGLLLGPLPLGLRIRDRQDWEIQRCIFLPIS

SEQ ID NO: 55008 - protein, 113 aa, Zea mays
  Coding DNA Sequence Number=SeqID_13229
MAQTAPNPLLYVDKWINDSGTNKPMHYHRHIKRLPTRQTHLALRLHELYYVYYSIIPKASPDETTINSGIKNKWSTLAPTSGELTRTTTSFIMSLKKTTTTDVVLTPLDPNQG

SEQ ID NO: 55009 - protein, 140 aa, Zea mays
  Coding DNA Sequence Number=SeqID_13230
MTRALEALVPSMTDLPYVPRGLGDLQLGLEDGLYSLPSVASGNPSQECLVANMTGIISPCGKPRGNFCQCQNTCHDICPTIAQPVSSGIDTRALAFCRAAIARDRTTTRATMEDGAIAPSCRAKAHHDDECLPLPSLWQR

SEQ ID NO: 55010 - protein, 82 aa, Zea mays
  Coding DNA Sequence Number=SeqID_13231
MESHDLRAERESRLVGGDENDGFGIDYGNGDRVFEELLPCAPTGAPPAPPLSAPATGVAAGRDPDNRGDEGSSSFSTDLSAD

SEQ ID NO: 55011 - protein, 97 aa, Zea mays
  Coding DNA Sequence Number=SeqID_13232
MVEVAGDGRTGQSSVPPDSYCALSVDRWRAGSRCSVGSPDSLHFVLAINSILTNEAKGKGKVIDEKETLNNESKGENESFVTTLLVRRSNLRFVVNL

SEQ ID NO: 55012 - protein, 74 aa, Zea mays
  Coding DNA Sequence Number=SeqID_13233
MEKTGAGRERRPWEELGSAMGDGWKRPWEGAGDCRRPRSGAEAEGVGSVGAQRGISFRGEVTRVSWVITNGAVV

SEQ ID NO: 55013 - protein, 92 aa, Zea mays
  Coding DNA Sequence Number=SeqID_13234
MEGAARILEERRRGGCSKGVQRARRGRQRGARTRGAGVATHGVAQTAHGGANAASLAAARDESRRPREDGLQGLRRRGDSRTMHVFKTESLI

SEQ ID NO: 55014 - protein, 162 aa, Zea mays
  Coding DNA Sequence Number=SeqID_13235
MAKRAEWDTVRGDRVVLVDGATQGAGAGDEATLGAGRVDGATHGTSGVDGGVHGINGVHGAACGTSGGDGGMGRDRGSGVTRGTSEGQQKRNIDTIDIEVERWGGVSKRENLLIKDNMMRDDDAPGWCTEMSGHPHKEVRKTGEGVGPAVNEKGQLALRETI

SEQ ID NO: 55015 - protein, 804 aa, Zea mays
  Coding DNA Sequence Number=SeqID_13236
  Homolog annotation: Hit_ID=Q5KQK4; Match level="QueryCoverage=42%, HitCoverage=82%, E-value=1e-153, Identity=77%"; Hit description =Putative extensin
  Pfam annotation: Domain name=LRRNT_2; Domain location=335-375; Score =10.3; E_value=0.071; Accession=PF08263.3; Description=Leucine rich repeat N-terminal domain
  Pfam annotation: Domain name=LRR_1; Domain location=388-410; Score =0.7; E_value=2.1e+02; Accession=PF00560.23; Description=Leucine Rich Repeat
  Pfam annotation: Domain name=LRR_1; Domain location=412-434; Score =7.6; E_value=11; Accession=PF00560.23; Description=Leucine Rich Repeat
  Pfam annotation: Domain name=LRR_1; Domain location=436-458; Score =9.3; E_value=5.1; Accession=PF00560.23; Description=Leucine Rich Repeat
  Pfam annotation: Domain name=LRR_1; Domain location=460-479; Score =9.5; E_value=4.8; Accession=PF00560.23; Description=Leucine Rich Repeat
  Pfam annotation: Domain name=LRR_1; Domain location=483-505; Score =5.8; E_value=24; Accession=PF00560.23; Description=Leucine Rich Repeat
  Pfam annotation: Domain name=LRR_1; Domain location=506-528; Score =1.9; E_value=1.3e+02; Accession=PF00560.23; Description=Leucine Rich Repeat
  Pfam annotation: Domain name=LRR_1; Domain location=531-553; Score =3.1; E_value=75; Accession=PF00560.23; Description=Leucine Rich Repeat
  Pfam annotation: Domain name=LRR_1; Domain location=555-577; Score =6.4; E_value=18; Accession=PF00560.23; Description=Leucine Rich Repeat
  Pfam annotation: Domain name=LRR_1; Domain location=579-601; Score =10.3; E_value=3.4; Accession=PF00560.23; Description=Leucine Rich Repeat
  Pfam annotation: Domain name=LRR_1; Domain location=603-624; Score =7.7; E_value=11; Accession=PF00560.23; Description=Leucine Rich Repeat
  Pfam module annotation: Pfam domain module=LRRNT_2::LRR_1::LRR_1::LRR_ 1::LRR_1::LRR_1::LRR_1::LRR_1::LRR_1::LRR_1::LRR_1; Domain location
MEHAGRHHYLFTGVEAVSEPWGRARRSPSSSVEVEPEPWGRTRRRPSSEAEAMSEPWGRARRSPSFSVEVEPEPWGRARRIPSSSVEVEPEPWGRARRRPSSEAEAMSEPWGRARRSPSFSVEVEPEPWGRARRSFLWRPRLDLAAVSLTLSSGTAVGATQVALFPRQAILALNAPAIRSVGVAIWLRLLLCEDWASGLCSFVLMGLPAEIRSLGVPLIMVPDRYVIRADAAAGPALLSRYKSYSAAQGRTEEASPLRVPQRQRIAPSTSTLLPETSSWLCFRWYGGMMSRAAVLLCLLCCLAAAGEAASVVGEGEAAELAVSVDPSWRFPSQRLRDAYVALQTWKQQAIFSDPRGFTADWVGPGVCNYTGVFCAPLPRGVPGAGELAVAGLDLNHGDIAGYLPPELGLLADLSLLHLNSNRFCGLVPATLRRLQLLVELDLSNNRLVGAFPAVVLELPALKFLDLRFNDFEGAIPPELFDRPLDAIFLNHNRLRSPLPDNFGNSPASVIVLADNSFGGCLPASLGNMSGTLNEILLINNGLDSCVPPEVGLLREVTVFDVSFNSLVGPLPQQVAGMRKVEQLDVAHNRLSGAVPEAICALPRLKNLTISYNFFTGEPPSCARVVPSDGDRRNCLPNRPTQRTPQQCAAFYSQPPVDCAAFQCKPFVPVPPPPPPSYPGPLPPRHGPCSSALGWRDHHPLLPGDVAFAPLQPGGVASSLYGANPAALRSGLSPLMVAPSSTSYDLRPANNVDHDLVFVTNELSTILATAAPVNGIGATLSFLVADPLSLSCRSFPILSPRRPGY

SEQ ID NO: 55016 - protein, 179 aa, Zea mays
  Coding DNA Sequence Number=SeqID_13237
  Homolog annotation: Hit_ID=Q6QP51; Match level="QueryCoverage=34%, HitCoverage=27%, E-value=2e-11, Identity=70%"; Hit description =Putative growth-regulating factor 1
MAVTGGQEQRPRPIRGQRENPLSRREDNAPMFRSSNGSRTRNGRPANHSPRRINSATGQAAPLGSGRRSGRRFAFAIMTTSKEGPGKGDTPKRILPREGTRLRASLLIRGLKAGPSEGFDSRLRSRGLYTHYWSEVRRPAPRKGSTTASRYSGSAPTTDQGFEGWPPKGSQSPQTQSEG

SEQ ID NO: 55017 - protein, 165 aa, Zea mays
  Coding DNA Sequence Number=SeqID_13238
  Homolog annotation: Hit_ID=Q5VR43; Match level="QueryCoverage=46%, HitCoverage=11%, E-value=2e-14, Identity=56%"; Hit description =Putative MAR binding filament-like protein 1
  Subcellular localization annotation: CTP_CleavageSite=74; ConfidenceScore=5.79e-01
MGYHHLLLSPSVAQPPRPALLPPPRGRRGSGVGRATAVFASASSTARSPAADDATRRRAVLLVGVSVLPLLRLRDAAAAAARAQLSSVDLVTDRTDIQKADVTQPEEPWEELHQPDEQGQPARNPLAGLLNAIAVIASGVFAGLLGTSQQEKKALQSTISSVCHL

SEQ ID NO: 55018 - protein, 591 aa, Zea mays
  Coding DNA Sequence Number=SeqID_13239
  Gene Ontology: Mol. function=actin binding; Cellular component=cell outer membrane; Biological process=defense response
  Homolog annotation: Hit_ID=Q5VR43; Match level="QueryCoverage=99%, HitCoverage=77%, E-value=1e-169, Identity=56%"; Hit description =Putative MAR binding filament-like protein 1
  Pfam annotation: Domain name=Pox_A_type_inc; Domain location=116-138; Score=2.6; E_value=34; Accession=PF04508.3; Description=Viral A-type inclusion protein repeat
  Pfam annotation: Domain name=Pox_A_type_inc; Domain location=151-173; Score=8.6; E_value=4.5; Accession=PF04508.3; Description=Viral A-type inclusion protein repeat
  Pfam annotation: Domain name=Pox_A_type_inc; Domain location=246-268; Score=1.4; E_value=52; Accession=PF04508.3; Description=Viral A-type inclusion protein repeat
  Pfam annotation: Domain name=Pox_A_type_inc; Domain location=302-324; Score=2.8; E_value=32; Accession=PF04508.3; Description=Viral A-type inclusion protein repeat
  Pfam annotation: Domain name=Pox_A_type_inc; Domain location=516-538; Score=0.3; E_value=75; Accession=PF04508.3; Description=Viral A-type inclusion protein repeat
  Pfam annotation: Domain name=Pox_A_type_inc; Domain location=60-82; Score=8.1; E_value=5.3; Accession=PF04508.3; Description=Viral A -type inclusion protein repeat
  Pfam module annotation: Pfam domain module=Pox_A_type_inc::Pox_A_type_ inc::Pox_A_type_inc::Pox_A_type_inc::Pox_A_type_inc::Pox_A_type_i c; Domain
METKLVENEAAMSMLRENYEKRILDEQVKLKKEARKFQEEEAFLQDQLASSRRTVTSLTEEVQREKELVEQLNLEIDRLKSSIAEAEEDKHLSEGKLKENMEVLDILYGKVNLLSQEVNGKDEHIRELSSSLSAKEKDYENLNVICNQAKEDLEQANSQIKQVEKDVRTAKDDLKSKASLINSLNEKVQTLYTEKGEVEEKLSALVSQYTYLKSASEERASHDSELLVQKDDMLNQLEEKLSAALSDSSKDRTRIAELNNELVTTRTILDNEVVANKKLSDLVQFTEEALTGSRNEVFKLSEELDAVKRSNQDLMTQISKLTDEASEVRQALANKIEQAESVYATLSDELASVREVLKKSEGELEITSKQLVLVSEAHSDLNKELLDAYKQLESTQSELVKERKINATLNMELEALVKQSVIESEARKTLQVDLDEATRSLNEVNKSTLCLSKQLETTNSKISAIKEEKDMLSKFLEEQKKSTVEAQENMEDAQNTIKRLGTERESFEVRSKKLEEELATAKGEILRLRRHISTGGSPNTQVLSEAGAAPISSRALKQQPMNDHVQNINGADAVASRSPKRIYRRKRKPAA

SEQ ID NO: 55019 - protein, 127 aa, Zea mays
  Coding DNA Sequence Number=SeqID_13240
MPLSTTLVVTTMRMPSPGKAGQGEQREVVGTQARSVAETSSDPWARFFPIVDGGGGVTEASTSGGVAMVVVRQLRYVAVFTDQVVYGVLVDLATSQLRSEKKWLEDKVERLRTQNIEAIRDKSAMQK

SEQ ID NO: 55020 - protein, 64 aa, Zea mays
  Coding DNA Sequence Number=SeqID_13241
MKAYHEKVEAPTWVVAWSKSYLFAESLLASVVTRLSFGGAPVNRHISRKVDTILEGDYFYAKCS

SEQ ID NO: 55021 - protein, 110 aa, Zea mays
  Coding DNA Sequence Number=SeqID_13242
  Gene Ontology: Mol. function=identical protein binding; Biological process=negative regulation of enzyme activity
  Homolog annotation: Hit_ID=Q6ZKR5; Match level="QueryCoverage=87%, HitCoverage=14%, E-value=1e-36, Identity=68%"; Hit description =Putative subtilisin-like proteinase
  Pfam annotation: Domain name=PA; Domain location=24-104; Score=36.5; E_value=9.4e-08; Accession=PF02225.12; Description=PA domain
MNRAFPANVRLDDGQVLDGVSVYGGPALESGNLYELVYARASGGVPPAMRGKIVVCDRDVNSRAAKGDVVRHAGGVGMVLANGAFDGEGLVADCHVLTLLYSAVQLDLKS

SEQ ID NO: 55022 - protein, 45 aa, Zea mays
  Coding DNA Sequence Number=SeqID_13243
MAIQGATLVTSGFVRFGVWAIPCFSITENPSPTPPNRRSRTGGLP

SEQ ID NO: 55023 - protein, 199 aa, Zea mays
  Coding DNA Sequence Number=SeqID_13244
  Homolog annotation: Hit_ID=Q6QP51; Match level="QueryCoverage=25%, HitCoverage=23%, E-value=3e-11, Identity=66%"; Hit description =Putative growth-regulating factor 1
MQAACNHAKWAHFSDFQHAHAPCNRRAGRYVQATAPPLAPLPCLLDCGTSTATRGDSAHDPAAPAWRNGQYGQKRTGSNGGGRRAGAAVTSRSKRRFAFTIMTASKKGPGKGDAPKRILLREGNRLRASLLIRGSKAGPSEGFKSRLRARGLHTHYWSEVRRPAPRKGSTSASGPSGSVPTTDQGFEGWPSKGSQPPQT

SEQ ID NO: 55024 - protein, 34 aa, Zea mays
  Coding DNA Sequence Number=SeqID_13245
MAEERKYNDGKKIREKAHKMRSTGKPPRTDGNGY

SEQ ID NO: 55025 - protein, 147 aa, Zea mays
  Coding DNA Sequence Number=SeqID_13246
MAPKRANSKAATSIDDAAMPALLAEKKGKAPIADDIPQEAFDDEAVNNKRQRQDNLPTLEGTALTLARIHPPSGKRHHRRRQMILDEEQKDREQEQQIAYMQGEGSHHMQRSPLITPTTFQGINYLDECWGDMSQDEGVNRLKDEMT

SEQ ID NO: 55026 - protein, 333 aa, Zea mays
  Coding DNA Sequence Number=SeqID_13247
  Homolog annotation: Hit_ID=Q6K8A9; Match level="QueryCoverage=45%, HitCoverage=75%, E-value=5e-13, Identity=47%"; Hit description =Putative Neurofilament triplet M protein
MARKRQAPPPPPPPPPPQEEEDESSSEESGSEEESPRLPELRRPSQAAAANNADSSDADSDSDADVQAFQMRQVPRFPTKQTHPVSHPESGAEEEEGELSESEHENPVPVVQKKAVAAAGMSKTGQERKRPASDPAPSGKAKKTKAEATPPAKAKKGEKLAPDATPAGKAKKGKTELETLAPDATPAGKAKKGKVEKTAPEATPSGKGKKGGDKLEKPAALDRSPSDSKSEKLAHFSRTWEKDDEMKILEALAAHVKSEGVLPKTDFLLASVRDRLVRKNCNYTDIYEKEIEAHHPCGETLKRAFEFIADEKAEGLESKIKKQRVAEAKAENS

SEQ ID NO: 55027 - protein, 960 aa, Zea mays
  Coding DNA Sequence Number=SeqID_13248
  Gene Ontology: Mol. function=alpha-mannosidase activity; Cellular component=Golgi apparatus; Biological process=carbohydrate metabolic process
  Homolog annotation: Hit_ID=Q654G0; Match level="QueryCoverage=96%, HitCoverage=79%, E-value=0.0, Identity=83%"; Hit description =Putative glycosyl hydrolase
  Pfam annotation: Domain name=Alpha-mann_mid; Domain location=288-373; Score=126.7; E_value=6.3e-35; Accession=PF09261.1; Description=Alpha mannosidase, middle domain
  Pfam annotation: Domain name=Glyco_hydro_38; Domain location=12-284; Score=229.4; E_value=7.9e-66; Accession=PF01074.12; Description =Glycosyl hydrolases family 38
  Pfam annotation: Domain name=Glyco_hydro_38C; Domain location=433 -949; Score=353.9; E_value=2.6e-103; Accession=PF07748.3; Description= Glycosyl hydrolases family 38 C-termi
  Pfam module annotation: Pfam domain module=Alpha-mann_mid::Glyco _hydro_38::Glyco_hydro_38C; Domain location=288-373::12-284::433-949
MERRVVSARCRYTWPVGPICHKFSLTNWGDLGLILCKWIASHLMMEGNMWLNDTIGVIPKNSWSIDPFGYSSTMAYLLRRMGFHNMLIQRTHYEVKKELAMKKNLEYLWRQNWDIEETTDIFVHMMPFYSYDIPHTCGPEPAICCQFDFARMRGFSYESCPWRSDPVEINPDNVEERATTLLDQYRKKSTLYRTNTLLIPLGDDFRYVSMEEAEVQFRNYEKLFDYINSNPHLNAEVKFGTLEDYFSTLRDEAEKINYSRPGELGSAELQGFPTLSGDFFTYADRNQDYWSGYYVSRPFFKAVDRVLEQTLRAAEILGSFVLGYCQKFQCAKLPISFSHKLTAARRNLALFQHHDGVTGTAKDHVVVDYGTRMHTSLQDLQLFMSRAVEVLLGDFHDRSDPTLLSHFESVQERSKYDVQLVHKVLHPLEGKAQSVVFFNPLEQTRDEIVMVVVSSPDVSVLNSNGSCLPSQLSPEWQFVSDENISTGRHRLYWRAYVPPLGLETYYVVTGQDCEKAIPAAVKTYTTEQEFSCPQPYDCSKLEAKTVEMKNSNYTLSFDTSRGLLQTVTRHKDGQQTVIGEEIGMYKSHGSGAYLFKPVGDARSIVEEGGHFILTEGPLVQEAHSLPKTEWRKSPLSHSTRIYNCGDAIQDMLIEKEYHVELVGHAFNDRELIVRYKTDIDNQRIFYSDLNGFQMSKRQTYDKIPLQGNYYPMPSLAFLQDSHGNRFSVHSKQSLGAASLKNGWLEIMLDRRLVQDDGRGLGQGVMDNKPMNVIFHLLTESNVSALPKTHSLHTLQPSILSHRVGAHLNYPMHAFMSKKPHEKSFKRAQQSFAPLTASLPCDIHIVNLKVPRPLRFPHTESAEPKFAVLLQRRGWDASYCKRGGLQCTTVGEEPVNLFYMFKDLSAVNVKATSLNLLHDDPEMLGYLEQTGDVAQEGDVLISPMEILAYKLDLQPPSSQEE

SEQ ID NO: 55028 - protein, 69 aa, Zea mays
  Coding DNA Sequence Number=SeqID_13249
MDKWPIGWGTTKFRKRYASIVGNQSSSEYTILIPNLNIQRLELWKEMEGVVALKINKQVSFYEEAYKQK

SEQ ID NO: 55029 - protein, 175 aa, Zea mays
  Coding DNA Sequence Number=SeqID_13250
  Gene Ontology: Mol. function=protein-methionine-S-oxide reductase activity; Cellular component=extracellular space; Biological process= response to oxidative stress
  Homolog annotation: Hit_ID=Q9C8M2; Match level="QueryCoverage=69%, HitCoverage=60%, E-value=2e-60, Identity=82%"; Hit description =Transcriptional regulator, putative; 35498-34111
  Pfam annotation: Domain name=SelR; Domain location=20-136; Score =238.0; E_value=2e-68; Accession=PF01641.9; Description=SelR domain
MDGVLEGINRGKADYKSLSEEEWKKRLTEEQYYVTRQKGTERAFTGEYWNTKTPGIYQCVCCDTPLFQSSTKFDSGTGWPSYYKPIGENVKSKLDMSIIFMPRTEVLCATCDAHLGHVFDDGPPPTGKRYCINRSRDCVIASPAALSSACISEIEAPIVAGYFSKKSTITLVRPM

SEQ ID NO: 55030 - protein, 62 aa, Zea mays
  Coding DNA Sequence Number=SeqID_13251
MRGESGRKGQGLYTVVGEAPRRGEVLVVWEGAGQDILRGGARTRFRSEEPLFVSWPSRTLKG

SEQ ID NO: 55031 - protein, 157 aa, Zea mays
  Coding DNA Sequence Number=SeqID_13252
  Homolog annotation: Hit_ID=Q9SJI9; Match level="QueryCoverage=77%, HitCoverage=48%, E-value=1e-38, Identity=61%"; Hit description =Expressed protein
  Pfam annotation: Domain name=DUF1637; Domain location=3-157; Score =151.6; E_value=2e-42; Accession=PF07847.3; Description=Protein of unknown function (DUF1637)
MPKIKSLSNACRVSFSPEGPISEEALERVRALLDMIRPLDVGLDNEAQIARNWSSSTRPSNGRRGRNGANQFAAPIKYLHIHECESFSMGIFCMPPSSVIPLHNHPGMTVLSKLLYGRLHAESYDWVDIPDHPIDQLQKNILNENVLLGDWEKNKKT

SEQ ID NO: 55032 - protein, 58 aa, Zea mays
  Coding DNA Sequence Number=SeqID_13253
MAGKRPRIHGQRGESGSEKVSGGPEKLRVFESAFIPFVSFGDLDDKTFKRLTSLLSVE

SEQ ID NO: 55033 - protein, 185 aa, Zea mays
  Coding DNA Sequence Number=SeqID_13254
MPERGRGDGVGRVNRPSTGFNNGSLLLTQSKDRGGVVAWVEVGEHGRGSILASGGLEQAGHIGVVGHRSDREKGRLIGVKGGGSAGSDRARGRAEERPTAGAGLRGAPGAPFIGARGGERWPAGLLRAVHINGYNGVHNSGDGTSWRGERGGDMQRRRGKGDGVRRGSHRRLYAHEGWGEADKRG

SEQ ID NO: 55034 - protein, 344 aa, Zea mays
  Coding DNA Sequence Number=SeqID_13255
MESDTERDVHNSSRSTNPSGHHQRPLRLVKSTAFKREERRKRKDRKRQRHLVDELVRWQPLGAPTPLPAATGSVSPSQAQPDTPWPCDPPPPPDPAEADSWSWGPPAVPSPTPTQPTVDVAGAVPLHPQVVAVRSCRAFFESQFEEDEEEENEGSAARFFSELLGSDAALRGFYEAERDKGHFLCLVCEGSGARLGKRFAGCAALVQHAGSIARTKWRLAHRAFADSVGLLLGWGAGRIAPPPVPPPADSDSDGSFDQVGSSQMGTGYRSVFFSILFRTLLPFQHYRMDLKAGCSINEGFGHLVSLTPCGLVLISEPGWPEAKQSFTDEAALMKTVYGQWGLTL

SEQ ID NO: 55035 - protein, 42 aa, Zea mays
  Coding DNA Sequence Number=SeqID_13256
MGRDMEHSPRLVEYARVMGPAYTFDHYDVTPRCSRLGRQGIQ

SEQ ID NO: 55036 - protein, 139 aa, Zea mays
  Coding DNA Sequence Number=SeqID_13257
MENKTGVPSGSPRCCRRPAPVFPTIQRAGDRAKPPRAPPQDILTAALPSLPWIRGLFPAIEFVVAPSSPLPNCGDPGATLARARLNSGDLTVEERSSAARSHSTTLGLIPSVRSRSNGSDRGYRFVHVRFPGLISPVRS

SEQ ID NO: 55037 - protein, 152 aa, Zea mays
  Coding DNA Sequence Number=SeqID_13258
  Pfam annotation: Domain name=zf-CCHC; Domain location=41-58; Score =8.2; E_value=0.044; Accession=PF00098.13; Description=Zinc knuckle
MECGAEEQVESLEDEELAFVASWFTRFHNNHQNRWLGRSKDGCYNYGDLDHFIASFPKKGKQEAGPRDHHSGRCKGKWEYTSNKQKSKGGFDKEALKKKYLQKAKIKECAFIASLSDLDHDSDDATSSSSDEETDRRIEDTLQENVEGVSVI

SEQ ID NO: 55038 - protein, 109 aa, Zea mays
  Coding DNA Sequence Number=SeqID_13259
MNDRDLNIRRGTQRDVYNHGGSERGFLPMVNAQGTQTTPMCGPAAAPKSRLLLFAPENHTGDQQRQSATWKMARLGGGDLLLSPNDKHRRDSTSQADTRQAPPTPSRRG

SEQ ID NO: 55039 - protein, 69 aa, Zea mays
  Coding DNA Sequence Number=SeqID_13260
MEKNLALKTNHEKKGTVKVQEDTESSRNGEVNDVNLALMYLSSCIEGIFCSSIETSFYRCQQPADGHLM

SEQ ID NO: 55040 - protein, 101 aa, Zea mays
  Coding DNA Sequence Number=SeqID_13261
MSIMSPITSFFMLFKTRSLMSCDLDGHPRLPFQDQQGETIFVEEEHDDANWGDLKPTPPTAPVEPASKTLDDGPNMSTSMTWGLLELESTKPTGAEATGEG

SEQ ID NO: 55041 - protein, 1182 aa, Zea mays
  Coding DNA Sequence Number=SeqID_13262
  Gene Ontology: Mol. function=4 iron, 4 sulfur cluster binding; Cellular component=mitochondrion; Biological process=metabolic process
  Homolog annotation: Hit_ID=Q10S34; Match level="QueryCoverage=89%, HitCoverage=90%, E-value=0.0, Identity=93%"; Hit description =Aconitate hydratase, cytoplasmic, putative, expressed
  Pfam annotation: Domain name=Aconitase; Domain location=184-694; Score=668.3; E_value=6.1e-198; Accession=PF00330.10; Description =Aconitase family (aconitate hydratase)
  Pfam annotation: Domain name=Aconitase_C; Domain location=980-1110; Score=212.1; E_value=1.3e-60; Accession=PF00694.9; Description =Aconitase C-terminal domain
  Pfam module annotation: Pfam domain module=Aconitase::Aconitase_C; Domain location=184-694::980-1110
MALAAPCNNGDVLASRASVMRVYEIKGCFITRTKVYGHASPHKLPPLPLHHRRLLYPRRGSGRSDLQARRTFLLVPARPLDPEAALQPGVALRIRPREPPLSAATAPVARSASSAAAVFERRFASAATRNSYDEILTGLAKPGGGEEFGKYYSLPALSDPRIDRLPYSIRILLESAIRNCDDFQVTGKDVEKILDWEKSAPKQVEIPFKPARVLLQDFTGVPAVVDLACMRDAMSKLGSDPNKINPLVPVDLVIDHSVQVDVARSANAAQANMELEFHRNKERFGFLKWGSSAFRNMLVVPPGSGIVHQVNLEYLARVVFNNGGILYPDSVVGTDSHTTMVDGLGVAGWGVGGIEAEAAMLGQPMSMVLPGVVGFKLSGKLRNGVTATDLVLTVTQMLRKHGVVGKFVEFYGQGMSELSLADRATIANMSPEYGATMGFFPVDGKTLDYLKLTGRSDDTVAMVESYLRANKMFVDHSQVDAERVYSSYLELNLEEVEPCLSGPKRPHDRVTLKNMKSDWLSCLDSDVGFKGFAVPKESQGKVAEFSFHGTPAKIKHGDVVIAAITSCTNTSNPNVMLGAALVAKKACELGLEVKPWIKTSLAPGSGVVKKYLDKSGLQKYLDQLGFHIVGYGCTTCIGNSGELDESVSAAITENDIVAAAVLSGNRNFEGRVHPLTRANYLASPPLVVAYALAGTLTPSISSSLYSIDPKYLKHYIVWKKHTSRNILCMSFVIGKSSRQKDRYQYTSPLIRCWLPTRQKLPQSLRLLPHDSKFLTTISKTSINRLETRTRCAYMSIDVSYEKLLTNSCLCVPKLEAGITHLVCISDFLHLVSWTYKIFTRLPVVVSTNSLNLSVNIDFEKEPIGISKDGKEVYFRDVWPSTEEIAEVVKSSVLPDMFKSTYESITKGNPMWNELPVSTSTLYPWDPSSTYIHEPPYFKDMKMSPPGPRPVKDAYCLLNFGDSITTDHISPAGNIHPDSPAAKYLKERGVERKDFNSYGSRRGNDEIMARGTFANIRLVNKFLKGEVGPKTIHVPSGEKLAVFDAAMKYKNEGHDTIILAGAEYGSGSSRDWAAKGPMLQGVKAVIAKSFERIHRSNLAGMGIIPLCYKAGEDADTLGLTGHERYTVHLPTNVSEIKPGQDVTVTTDNGKSFTCTLRFDTEVELAYYDHGGILPYVARKIAEQ

SEQ ID NO: 55042 - protein, 147 aa, Zea mays
  Coding DNA Sequence Number=SeqID_13263
MVTSGEAGICLRLETLGEMPRVRRPVSNNISHLCIHTYNIMLVTCSVLTLRILMTEHTLPQKLYPVQNSFPRFRLSRKGSTGVHLSKAKGHGFFVSTPFRLSQLSCPDEEEGWKASPVSCAVIPEFTDILKVKFLDNANSQYSDLIS

SEQ ID NO: 55043 - protein, 75 aa, Zea mays
  Coding DNA Sequence Number=SeqID_13264
  Gene Ontology: Mol. function=protein serine/threonine kinase activity; Cellular component=integral to membrane; Biological process=protein amino acid phosphorylation
  Homolog annotation: Hit_ID=Q5VQL9; Match level="QueryCoverage=82%, HitCoverage=10%, E-value=1e-20, Identity=73%"; Hit description =Putative brassinosteroid insensitive 1-associated receptor kinase 1
MDIDVVQLKKMHQEKQLDTLVDKGLESKYDRIELEEMVQVALLCTQFFPGHRTNMSEVVRMLEGDGLAKRDMLVL

SEQ ID NO: 55044 - protein, 237 aa, Zea mays
  Coding DNA Sequence Number=SeqID_13265
  Homolog annotation: Hit_ID=Q10DI5; Match level="QueryCoverage=43%, HitCoverage=25%, E-value=3e-21, Identity=86%"; Hit description =Expressed protein
MAASTASVRDRARKGEVLMSGSHRSVIRRTSTDWPPGPWCKCAQSWRNGGVREKKWAGCRELGQKAALMKVGQKAAPQKVAKERTNEGVDRLERLDVEDGQAMAEPSNRREQQKAEHVPAGQKTQLPANERGRSNETTGMGRARVTGHMIRFVHVGDELGLGGASPSFSIWMTPSSGTPSSVTRTRTGSSVEEAEGPSPAEAGVGAARGLVGASAGERQAATQEARVGEERVGAAGC

SEQ ID NO: 55045 - protein, 77 aa, Zea mays
  Coding DNA Sequence Number=SeqID_13266
MVVRKGLGQAHGIVNTGSDPIEDSSSRLQLLEYPYIQATVTGQSLDLPNLGFARKWRCVINSGNRRTYTVVRELKNI

SEQ ID NO: 55046 - protein, 106 aa, Zea mays
  Coding DNA Sequence Number=SeqID_13267
MALSSPPSPWRKVRHPASRRARWAACGYTYVVIPLSRLARPGRPGLPATTTTHRHMAHDEPGFAYADYFAAAAGAGATFVPEVDVGGGGEEGLHLYGLQPHHQHPG

SEQ ID NO: 55047 - protein, 50 aa, Zea mays
  Coding DNA Sequence Number=SeqID_13268
MPKQRTTPLIVMFGQGHEEDQMLQFHKLMVSPVFANRADSVVFLDLGYPR

SEQ ID NO: 55048 - protein, 184 aa, Zea mays
  Coding DNA Sequence Number=SeqID_13269
  Gene Ontology: Mol. function=sequence-specific DNA binding; Cellular component=nucleus; Biological process=regulation of transcription, DNA-dependent
  Homolog annotation: Hit_ID=Q8LN25; Match level="QueryCoverage=87%, HitCoverage=27%, E-value=3e-18, Identity=41%"; Hit description =Putative homeodomain protein
MVEEMYSEEMKDPKEGACSNANSSVNTGAGYASEELGQPLGHGGACGGVDEQKPTRAQLVHDAGSLASAVSIGSSRDQQQISSINFRMMDHLDFDAYSGDPAAAGGPAAGFGGAGASGGVSLTLGLQQHADGDPHGGVNIAFAAAPSAAHEFLFMAGGGEHRIGRGWRRAPVVVPRPRYLSSKI

SEQ ID NO: 55049 - protein, 105 aa, Zea mays
  Coding DNA Sequence Number=SeqID_13270
MSPHRHRCALARRAISHRDLASPTTAPSPAVVTLHLDHRRALAGARPLRLALARPPRTGPRPPPCHLSPPRPCTSPAASPTPGHRASPSPDHRAPRPAAAPAPLA

SEQ ID NO: 55050 - protein, 164 aa, Zea mays
  Coding DNA Sequence Number=SeqID_13271
  Subcellular localization annotation: CTP_CleavageSite=68; ConfidenceScore=5.04e-01
MMVLALVATTSFAILLLFSLPSCLHLRATPFSAECVEACASFPYSSDTDSLSGYCMSTRTFHIMRTPSFSSSSDIPFIFPAFALFFIPNLLPPPTVTATSRPTLVDAALTTKNGRWKTAVAWRTGQSGAPQDTVRCASHVSEPLGFDCWSSDLWGLWAVRWCTG

SEQ ID NO: 55051 - protein, 90 aa, Zea mays
  Coding DNA Sequence Number=SeqID_13272
  Homolog annotation: Hit_ID=Q2RBM1; Match level="QueryCoverage=72%, HitCoverage=35%, E-value=8e-13, Identity=59%"; Hit description =Expressed protein
MQSMRCVLLCLAMRYEALLLPDAKYCNDLHLKVSRLEWLTFTTYCLDNGFYTIVSKIYIFFNDVIHYGSTSRRYVSEKYFPHRKVLSDAT

SEQ ID NO: 55052 - protein, 163 aa, Zea mays
  Coding DNA Sequence Number=SeqID_13273
MGKSKKSSSSSHHSGNKRKREPTPPSEDFGDSEYLEEEFSSESEESLVPASPPVSSDDSDGSQGITAEVWTYIWAVEHAGLEGSDESEVSSEEENSSDSSEEGGGGGDGEGDDDGGGDDDGDSNDDGGEGDDKGDGGNGSSKGDDGNGSGKGGSSSGNGRASG

SEQ ID NO: 55053 - protein, 125 aa, Zea mays
  Coding DNA Sequence Number=SeqID_13274
  Subcellular localization annotation: CTP_CleavageSite=62; ConfidenceScore=5.80e-01
MRNPPGRHLLRLTNRAVRSSSSSSSAPGAGPGASTSAASPRPRAIADGRPLRASSPPPPSAVAAAAAAYWESRALRRDGEEGDWEEVVAGVPGTGEMEEGEEYRVVFWCPPTIDEVTGAVTSIQE

SEQ ID NO: 55054 - protein, 253 aa, Zea mays
  Coding DNA Sequence Number=SeqID_13275
MQCLFNMEVYVFLFSFYIIKAERKAAPTFIHVSSLCFCHMMLLQCPEMYVRKRNRPGVLRRAIKGRYWNYEKQSRLLFTVSATITATEATTEWGADCYLVIDSDSASPDFVVYPHFWGLGFRVYPYSPKDINITSYYTSNFIEILNIIRNEETLNGEIESNQHSKLMLANPVENFTIIVDADDDLLKVGTSICSSAPKIVEPQQQHNCTSVTEDHLTIPKEADNVCGQHYPITGENFSLLWLVSTVFHIDLIA

SEQ ID NO: 55055 - protein, 429 aa, Zea mays
  Coding DNA Sequence Number=SeqID_13276
  Homolog annotation: Hit_ID=Q1SSC7; Match level="QueryCoverage=81%, HitCoverage=85%, E-value=3e-39, Identity=33%"; Hit description=TRNA -binding arm; Pleckstrin homology-type
  Pfam annotation: Domain name=DUF828; Domain location=57-289; Score =420.2; E_value=2.9e-123; Accession=PF05703.2; Description=Plant protein of unknown function (DUF828)
  Pfam annotation: Domain name=PH; Domain location=296-408; Score=20.2; E_value=0.0076; Accession=PF00169.19; Description=PH domain
  Pfam annotation: Domain name=PH_2; Domain location=300-414; Score =189.5; E_value=8.1e-54; Accession=PF08458.1; Description=Plant pleckstrin homology-like region
  Pfam module annotation: Pfam domain module=DUF828::PH::PH_2; Domain location=57-289::296-408::300-414
MQHEEVCDTTTCGEGNGRGGEEELEMEGHSLMRMKRRDHLLLTDGAGAGAGAGPLAVQTPMEPMEFLSRSWSVSASEISKVLAGGVGGRRSSNFVVDRLSGMLMPETLALAASSSSAGTNNISPRKRTLRSRSAISAHQVHHTVHAIGKWFHHWDAGSSKVDKARAERARVHAAVSVASVAAAVAAVAVAAGASPEVDVTDDGARMGSALASATQLLASHCVEAAELAGADHDQVASAVETAVDVRSPGDLLTLTAAAATALRGAAAMRHRAQREARSRAAVAPYDKACSYRADVWCKEGALLKRNRKGKRALHWKQVAVYISKKSQVIVKLKSKHIGGAFSKKKKGVVYGVYDDIPAWPAREGVAAQSSAPETCHFGLRTAHGLLEFQCESRAQRRDWVEAVKDLIRQVAGGTALLEHSFESLRLSAS

SEQ ID NO: 55056 - protein, 168 aa, Zea mays
  Coding DNA Sequence Number=SeqID_13277
  Homolog annotation: Hit_ID=Q6ZQQ4; Match level="QueryCoverage=95%, HitCoverage=45%, E-value=9e-07, Identity=32%"; Hit description=CDNA FLJ46309 fis, clone TESTI4039744
MGSRTRGGGLLPARLVRGRTAPPRGAAPSSEPPRWAERHVPAGRALPAQEPGRSRCGLPPADVEEPAPGAAPTSHVRPSLPGPGRDRFGAVRRAPGGQRPSRRGPDAPAWGSPHARALDRAVEADVRGLMLESQRPASAPTAGSRLSALAAERSGRLGRPCPARICQG

SEQ ID NO: 55057 - protein, 93 aa, Zea mays
  Coding DNA Sequence Number=SeqID_13278
  Subcellular localization annotation: CTP_CleavageSite=74; ConfidenceScore=5.25e-01
MVGEEIHRCGDGPPKRTAICGRFRFRGERTSLVSNRTWSSWSSSAPTSTGSESALCRQIRAASPLLARVPESRRDEEKWTWNFPPSGAGAGFR

SEQ ID NO: 55058 - protein, 148 aa, Zea mays
  Coding DNA Sequence Number=SeqID_13279
  Subcellular localization annotation: CTP_CleavageSite=45; ConfidenceScore=5.10e-01
MARSVTGSLVGRRFRALGAARRMSRARRPVGDWAGARVASGAFLRVGEGVGVGRLHGSGRSVAHRARGRLGAGRGSWRALLAWGSGRAPPVRGSARRLARHGEESRERGESRVGPARRNGKRKRRWRRLETREEVGAATASSWAPSGL

SEQ ID NO: 55059 - protein, 153 aa, Zea mays
  Coding DNA Sequence Number=SeqID_13280
  Subcellular localization annotation: CTP_CleavageSite=79; ConfidenceScore=5.11e-01
MATCMPRLARRGGCRASTARPAASVSLLERIRDVVLRLIMLSAVSRASTQPTSSSGSGKSAKASSPGDASQHRESDTCVAVAATCRREDSIRNEAVEDCIEFLKRSSAEGDAAKLSTVSAADGNLTDVGGEDKEIGAFFILNVEARREISPSS

SEQ ID NO: 55060 - protein, 61 aa, Zea mays
  Coding DNA Sequence Number=SeqID_13281
MSMDNHRSRYQDEYNQFQTSRACLQMRVQREVLRRRVLELVPEPLLLDVPLALGSRRTLRP

SEQ ID NO: 55061 - protein, 69 aa, Zea mays
  Coding DNA Sequence Number=SeqID_13282
MRDVPLRADLTAMVHRLAERAQGAVTGLPLAPFVSMLQDMVDGVTWPTTLPPGWTVEWDAAPAGEEQEE

SEQ ID NO: 55062 - protein, 58 aa, Zea mays
  Coding DNA Sequence Number=SeqID_13283
MTKDEAVLNTTLNLTVSVLCGTHQSSPMVYEVAIVDQQPSSALDTYEDGPSHRLIEEV

SEQ ID NO: 55063 - protein, 202 aa, Zea mays
  Coding DNA Sequence Number=SeqID_13284
  Subcellular localization annotation: CTP_CleavageSite=76; ConfidenceScore=5.62e-01
MWSGSSTGAPSPCPPQPALLTAPSYGVPPPSAPLAPPPFSLPGTLTSVVVPVPVPMPPYHVCVSLHDCQLLQRTFVAFERAMNPVLRVSVELQPQTGRHATGSLVFNSVAIASLAIKALSSPLLKPFSMTASSSNLRRAATYWVACIQHFCDCLPGDQGLVVSTIGTGPPTHVVSVGPSTHTACPPRPSGHDTRARMHSSGL

SEQ ID NO: 55064 - protein, 139 aa, Zea mays
  Coding DNA Sequence Number=SeqID_13285
MESGWRGCCAEEWSDGGEELGRRLPTDGRSRGGAGGGSETLADGCRSASGVLASALQWRRRCGAETTRRRQLEAADCGASGRWRRWTTKRRLKARKGGGRWPRVAVGWEGGAGREKSLVLYQVGICETLTLIQGWEYTI

SEQ ID NO: 55065 - protein, 307 aa, Zea mays
  Coding DNA Sequence Number=SeqID_13286
  Gene Ontology: Mol. function=nucleic acid binding; Biological process= RNA processing
  Homolog annotation: Hit_ID=Q6ETK6; Match level="QueryCoverage=84%, HitCoverage=27%, E-value=3e-81, Identity=61%"; Hit description =Putative U2-associated SR140 protein
  Pfam annotation: Domain name=RRM_1; Domain location=148-222; Score =55.4; E_value=1.9e-13; Accession=PF00076.12; Description=RNA recognition motif. (a.k.a. RRM, RBD, or
MTQGARQEGIDKSRTTIRGYEIRPSCHTRCQPPGTRPLGTCIRPETYVPSFLPPSFAKEPEKKKEGERPKEKEKEKGKPRVIDRFLEEIKLEQEQREKRHQDRDHRREGRHGDSSMSSSRFDELPDEFDPTGRFPGSFDDGDPQTTNLYVGNLSPKVDENFLLRTFGRFGPIASVKIMWPRTEEERRRQRNCGFVAFMNRTDGQAAKDEMQGVIVYDYELKIGWGKSVALPSQALPAPPPGHMAIRNKEGGTATVILSGPGGPAVASIKPQTSELKIHDLLNRVDCRLKGSTWLEDKEGYPEIPIKS

SEQ ID NO: 55066 - protein, 107 aa, Zea mays
  Coding DNA Sequence Number=SeqID_13287
MDDKRLRRVVRPRSVDHAYSVRGGDDNVDVDGGAFRSVVTTMSRRRFTCRRRDVTHGGASVTLQSTPDVEEDEAGVVKADVDDARVDRRWATGTQTRSQIGEKMEKT

SEQ ID NO: 55067 - protein, 792 aa, Zea mays
  Coding DNA Sequence Number=SeqID_13288
  Gene Ontology: Mol. function=nucleic acid binding; Biological process= RNA processing
  Homolog annotation: Hit_ID=Q6ETK6; Match level="QueryCoverage=71%, HitCoverage=59%, E-value=0.0, Identity=72%"; Hit description =Putative U2-associated SR140 protein
  Pfam annotation: Domain name=Surp; Domain location=106-151; Score =59.8; E_value=9.2e-15; Accession=PF01805.10; Description=Surp module
  Pfam annotation: Domain name=cwf21; Domain location=587-622; Score =37.8; E_value=3.9e-08; Accession=PF08312.2; Description=cwf21
  Pfam module annotation: Pfam domain module=Surp::cwf21; Domain location=106-151::587-622
MEWRLQPSRWLGANDALVRIRGGRQCAGREVAKAYIRGERAARRARHRRNWKRRSSTSKPEVELPPTAVEWRLESSRSRGANDVLTPNVPDIVVAPPDDGHLRHVIDTMALHVLDGGCAFEQAVMERGRGNPLFDFLFNLKSKEHTYYVWRLYSFAQGDTLQRWRTEPYIMITGSGRWVPPPLSSNRSPEREKESTFAAGRSRRVEVERTLTDSQRDEFEDMLRALTLERSQIKDAMGFALDNADAAGEIVEVLTESLTLKETSIPTKVARLMLVSDILHNSSAPVKNASAFRTKFEASLPDVMESFNDLYRSITGRITAEALKERVMKVLQVWADWFLFSDAFLNGLRATFLRSGNSGVVPFHSLCGDAPEIEKKGSSEDGNDGFKLNEDGALATGKAAATKELLGLPLAELERRCRHNGLSLCGGKEMMVARLLNLEEAEKERIYEKDVDVKYVQGEQHVVGREDSGVNAHSTSRFGEGSNGDELDVSRNSMRAGKGRSGGSASAELESFPSKKPKYDPVLPASKWSREDDISDDEDRKGGRGLGLSYSSGSDIADGLGKTISYFWAQSIVTFEFQSSSWVKFWQKLRQIEISVMQYRESLEEQGLRDLDEIERKVASHRRRLQSEYGLSTPTDGANSRRSSASLTSTTPYITLGTNNEPCCTPQLHSVFAAPIFCKLGTHFKQYSILQKEHHRRRSGKRGMAMHMIILGNVAGARVEAAVLQGSLRRGIESTIAVGTEIGYARKVQAEGETTTTTEAEIERTGERGGDRPEKPRHYAPFALTEGPRSII

SEQ ID NO: 55068 - protein, 146 aa, Zea mays
  Coding DNA Sequence Number=SeqID_13289
  Gene Ontology: Mol. function=kinase activity; Cellular component =ornithine carbamoyltransferase complex; Biological process=amino acid metabolic process
  Homolog annotation: Hit_ID=Q6QP51; Match level="QueryCoverage=71%, HitCoverage=38%, E-value=4e-12, Identity=48%"; Hit description =Putative growth-regulating factor 1
MSDPRRHAPQSGKQRHSPRSDYCATHQGQADNSQVQPQAQQETPPRPTLGLGLGRWSPPRPTPGLGLNLGLRRKSSPRPTPELSLNLDLGRWSPPRPTPGLGLNLDLRRIASSPDPGLGLRRSLRLARPWARTDHATGIHHYPTPS

SEQ ID NO: 55069 - protein, 215 aa, Zea mays
  Coding DNA Sequence Number=SeqID_13290
MTDEEMDVATERRLESPPRCDYGDRAILCEDTVKEWLYGSMSHWPEPETKEKKNNEWVEELKSDLVLCKCGIEAKRRENAVGRDTSIKKSPMRVERRRLKAANAKRAHDAREWKAARAEKQMLGNLAGRLSGRKMATVELMVEEDTSRLSELIALAKAGLHGEEEDDTSRLTELITLAKVGLHAQEEEDEFMSQAVEEVESSYYKQKCDEAKAED

SEQ ID NO: 55070 - protein, 301 aa, Zea mays
  Coding DNA Sequence Number=SeqID_13291
MDQRGWAWLGAGAWAGVHRASEWFWVKGRELSPRQCASVTRPSSESIPVNSAEGEDPQHCAGSWMRKATRPRRRYDQAQLALDHAPDASRTLASRSHFLLEQRDACERSAYDLLAAKGEATEAHAYAALIHDAYDALVETTRRDAKLATLAHLGSVKVSSLLRILERGKEVAKARVATLEEELGGRTKKEEKLLASWQGSALDSLFQKLCICCSLSPFYGSCPPPSAIQGKFDDADWNCFKVQCRLEELENERRLLSKVVGTMCGRIEAHCLPWFKLLVSRLEGLTGLFQELEVESFCQGI

SEQ ID NO: 55071 - protein, 115 aa, Zea mays
  Coding DNA Sequence Number=SeqID_13292
MTLLKPRALCGAVATRMSESAACSLALGVSPPQGPGDAAACPHRGPAIARPLDRGAATTVPPTWEPPPLLRIEEPLPPHVRVKEPPPPQPPIGGPPLRALSGNHRCRMRLAGHRR

SEQ ID NO: 55072 - protein, 138 aa, Zea mays
  Coding DNA Sequence Number=SeqID_13293
  Subcellular localization annotation: CTP_CleavageSite=68; ConfidenceScore=5.40e-01
MAHFASPMDPPLPFSMDLSVVVAFFASPGKNESYRRSGLAHNPSYACRISERRSSEVLADTPLGMLMPASRVGDGGEALPGGQRFIGVRPRGVGLDAALINARATFPWMPFSPCATAILPPASPGRGGVDSIFMGVVA

SEQ ID NO: 55073 - protein, 542 aa, Zea mays
  Coding DNA Sequence Number=SeqID_13294
  Gene Ontology: Mol. function=nucleic acid binding; Cellular component= intracellular; Biological process=transport
  Homolog annotation: Hit_ID=Q6K925; Match level="QueryCoverage=93%, HitCoverage=80%, E-value=1e-55, Identity=59%"; Hit description =Putative Ras-GTPase-activating protein binding protein 1
  Pfam annotation: Domain name=NTF2; Domain location=23-139; Score =123.2; E_value=7.1e-34; Accession=PF02136.11; Description=Nuclear transport factor 2 (NTF2) domain
  Pfam annotation: Domain name=RRM_1; Domain location=449-519; Score =49.0; E_value=1.6e-11; Accession=PF00076.12; Description=RNA recognition motif. (a.k.a. RRM, RBD, or
  Pfam module annotation: Pfam domain module=NTF2::RRM_1; Domain location=23-139::449-519
MASQPPPPAAAAASGAPPPAQVVGNAFVHQYYNILHQSPELVYRFYQEASCLGRPAGTGADGMDTVTTMDAINDKIVSMGIDRAEIKAVDAQESLCGGVSVLVMGHLTGRNSVSRQFVQSFFLAPQEKGYFVLNDILRYVGEGGGDEGAEKQPAPEVAADAETTTSAPILANGTVGGDATTVPQDASPQPECQVAEPALNPKEEVLNGEVCNSLSDVEKPVAEETPVPDVINEVPNNVAVAPPISSPPVPLKEAPKKSYASIESVAKNLKCTIPCSYLMRLWVWLIALLEAEEDRETHDVIQAQCCMCAQLGKNWISCTVLKGSSFVITLSLLTLVVTTAAFSAFIDAVACWQQAPTCAWRVPMIGNGKGKRRFCHIPNVVCNLKLKCCEVKVMKEHRPLAPAVPSRPAPPITEKQASPAPTPVTEAPAFSPNPQSGGFQDPEVDAHAIYVRSLPLNATPQQLEEEFKRFGTIKHEGIQVRSNKIQGFCYGFVEFEDASAVQAAIEASPVTIGERQCFVEEKRTTGSRGKSIKSLDFILYPQ

SEQ ID NO: 55074 - protein, 332 aa, Zea mays
  Coding DNA Sequence Number=SeqID_13295
  Gene Ontology: Mol. function=hydrolase activity, acting on acid anhydrides, catalyzing transmembrane movement of substances; Cellular component=proton-transporting ATP synthase complex, coupling factor F(o); Biological ...
  Gene Ontology: Cellular component=process=proton transport
  Homolog annotation: Hit_ID=Q36271; Match level="QueryCoverage=52%, HitCoverage=41%, E-value=6e-70, Identity=83%"; Hit description =ATPase subunit 6
MTDGSNTSNANGVPIPGAGGSTGIYEDHPGLNPTDEMVVEYQAGIREQMSELMRMDGEHPEVVAAAERVHGESDNIAFLQGQLEDLRAHGRESEAFKYGVSNDADLPGGGNPAGSSGGVDLANGNEAGSSAGVDLMNVDDAAGFAAESPLDQFGIHPILDLNINIGEYYVSFTNLSLSMLLTLGLVLLLTLVFMELSGQKRGRAHAVVEASSSASAMPNSEDDDKRKKVSRQDANGKESEPPINGAQPEVPSISFLKKRIKTVLRSCRDRNPRESTLRSTYEDLHLETASAEKRATLAPLQALRNRFQGGMDTSSNIGRWKLTDLVIEAAPS

SEQ ID NO: 55075 - protein, 576 aa, Zea mays
  Coding DNA Sequence Number=SeqID_13296
  Homolog annotation: Hit_ID=Q36748; Match level="QueryCoverage=29%, HitCoverage=84%, E-value=2e-85, Identity=92%"; Hit description =Cytochrome oxidase subunit II
  Pfam annotation: Domain name=COX2_TM; Domain location=297-384; Score =128.1; E_value=2.4e-35; Accession=PF02790.6; Description=Cytochrome C oxidase subunit II, transmembrane domain
MEEIKSHVAPQKMRIVYSNSNSNLIGPLDKDGTNALVYAKRALRFVREVRERVLVTSKEMAMICQIDIVSVFSLPLLFSTILWLSLLYYGFRWVEHGRIKSIVKPFMIATCGMPGIPLNRESESVEDVHRVLRALPLFREMEGILRERNLNLPSVQEISAFRVNLFSGIRRESAIADYDAFWRSLLEEIHTPQGRSCFGQRIQDLHARMSAEGNWDYLIAQQGRGYFGNLPNLNSPLDQYQFGIHPILDLNIGEYYVSFTNLSLSMLLTLGLVLLLVLPMILRSLECRFLTIALCDAAEPWQLGSQDAATPMMQGIIDLHHDIFFFLILILVFVSRMLVRALWHFNEQTNPIPQRIVHGTTIEIIRTIFPSVIPLFIAIPSFALLYSMDGVLVDPAITIKAIGHQWYRSAPLNEGDLSATKCTGAVAYNFGPKGRPRYLSEWGIPVGNNHGSSCGTTGPREDNLLFLLLLLRFGDGGHTVSNVMLYLVVQILPPSQYNEKEFTMKEEKELWDASRTRLNVPGFYLSGPQVESEWRQMLHAIDSDVPPSFPWNQGHKKMYLEWASVDFSFMGGSNLA

SEQ ID NO: 55076 - protein, 89 aa, Zea mays
  Coding DNA Sequence Number=SeqID_13297
MRNIYTHCVTSKTDRTKDNTSIVHVHVEKTKSAHYNIWLSFYLISKQWVQELQQSYADDDWIEGLKKQAKEDHSYNTKITVHLGTEFIF

SEQ ID NO: 55077 - protein, 60 aa, Zea mays
  Coding DNA Sequence Number=SeqID_13298
MGKGVAGVKLKLYLFFFACNKQSYLKLETIPFFRERSILNGQWYSLFLFVRKSAIPKPDR

SEQ ID NO: 55078 - protein, 289 aa, Zea mays
  Coding DNA Sequence Number=SeqID_13299
  Homolog annotation: Hit_ID=Q6YXY2; Match level="QueryCoverage=17%, HitCoverage=3%, E-value=2e-11, Identity=66%"; Hit description =Putative HAC5
  Subcellular localization annotation: CTP_CleavageSite=46; ConfidenceScore=5.56e-01
MALSISSLAADLSHLSLPSTSTPKPHPAPLLRLRSTYRRAVSLVLRASTGKAAEAFEAGLPAEEVMAVEEEEEDALSGIVLQNTLWALIHQDDRQRVRDGTAFAAFPVSSFTVVVALAAEVLPPPQPPPPPPPACVLEMFSEEEIAVAEDSDEIVPVMEPVSIVGTSGQMEKEVSAARDVRAMKDHIDLEASQSQQPRKLPPKDLKEIARSFWLTASMFSKKWQKWRGKQKLKAGGKENRGSDPPPRHEPQTMEKAPVTTNSTLGKQIQEDFCQREMSQDGTQQPFSSD

SEQ ID NO: 55079 - protein, 142 aa, Zea mays
  Coding DNA Sequence Number=SeqID_13300
  Subcellular localization annotation: CTP_CleavageSite=57; ConfidenceScore=5.30e-01
MGDGGGGSELGRGSIFSVRVRFQKISEARGRAMPGSLMPPPSPARIGPMVTESRRIRSSNADSRRRRSSQRVGRRRVGEEKGPWGSMLIHGSLGDRGIRGVAGDPVRIVARITMAFGGQRAHPRMAELLRSWPHMAVIRCAL

SEQ ID NO: 55080 - protein, 1044 aa, Zea mays
  Coding DNA Sequence Number=SeqID_13301
  Gene Ontology: Mol. function=RNA-directed DNA polymerase activity; Cellular component=intracellular; Biological process=RNA-dependent DNA replication
  Homolog annotation: Hit_ID=UPI00005A975E; Match level="QueryCoverage =95%, HitCoverage=59%, E-value=0.0, Identity=86%"; Hit description =PREDICTED: similar to Retrovirus-related Pol polyprotein from transposon 297
  Pfam annotation: Domain name=RVT_1; Domain location=56-225; Score =127.5; E_value=3.6e-35; Accession=PF00078.17; Description=Reverse transcriptase (RNA-dependent
  Pfam annotation: Domain name=RnaseH; Domain location=455-582; Score =3.1; E_value=3e-05; Accession=PF00075.14; Description=RNase H
  Pfam annotation: Domain name=rve; Domain location=780-927; Score =96.2; E_value=9.8e-26; Accession=PF00665.16; Description=Integrase core domain
  Pfam module annotation: Pfam domain module=RVT_1::RnaseH::rve; Domain location=56-225::455-582::780-927
MPGISRDVAEHSLDIQAGARPVRQPLRRFDEEKRRVIGEEIHKLMAARFIKEVFHPEWLANPLLVRKKGGKCRMCVDYIGLNKACPKVPYPLPRIDQIVDSTAGCETLSFLDAYSGYHQIRMKESDQLATSFITPFGMYCYVTMSFGLRNAGATYQRCMNHVFGEHIGRTVEAYVDDIVVKTRKASDLLSDLEVTFRCLKAKGVKLNPEKCVFGVPRGMLLGFIVSERGIEANPEKIAAITSMGPIKDLKGVQRVMGCLAALSRFISRLGERGLPLYRLLRKAECFAWTPEAEEALGNLKALLTKAPILVPPADGEALLVYVAATTQVVSAAIVVERQEEGHALPVQRPVYFVSEVLSETKIRYPQVQKLLYAVILTRRKLRHYFESHPVTVVSSFPLGEIIQCREASGRIAKWAVEIMGETISFAPRKAIKSQVLADFVAEWVDTQLPTAPIQPELWTMFFDGSLMKTGAGAGLLFISPLGKHLRYVLRLHFPASNNVAEYEALVNGLQIAIELGVRRLDARGDSQLIIDQVMKNSHCRDPKMEAYCDEVRRLEDKFYELELNHIARRYNETADELAKIASGRTTVPPNIFSQDLHQPSVKINDTPEPEAPSVQLEVPSAQPEASSVQPEVPSAPEGEALHVEEEQSGATPDRNWQTPYLQYLRQGELPLDQAEARRVARRAKSFVLLGDEKELYHRSPSGILQRCISIAEGQELLQEIHSGACGHHAAPRALVGNAFRQGFYWPTAVTDATRIVRTCEGCQFYAKQTHLPAQTLQTIPITRPFVVWGLDLVGPLQKAPGGYTHLLVAIDKFSKWIEVRPLNSIRSEQAVAFFTNIIHRFGVPNSIITDNGTQFTGRKFLDFCEDHHIRVDWAAVAHPMSNGQVERANGMILQGLKPRIYNDLNKFGKRWMKELPSVAVLPTDLEYGSPRTKAYSDQSNQVSREDSLDQLEEARDKALLHSARYQQSLRRYHARGVRPRDLQVGDLVLRLRQDARGRHKLTPPWEGPFVIAKVLKPGTYKLANSQGEVYGNAWNIQQLRRFYP

SEQ ID NO: 55081 - protein, 573 aa, Zea mays
  Coding DNA Sequence Number=SeqID_13302
  Gene Ontology: Mol. function=nucleic acid binding; Cellular component= nucleus; Biological process=transport
  Homolog annotation: Hit_ID=Q1SAX2; Match level="QueryCoverage=97%, HitCoverage=99%, E-value=0.0, Identity=65%"; Hit description=Zinc finger, CCHC-type; Plant MuDR transposase; Zinc finger, SWIM- type; Malate synthase-like
  Pfam annotation: Domain name=MuDR; Domain location=6-158; Score=71.4; E_value=2.8e-18; Accession=PF03108.6; Description=MuDR family transposase
  Pfam annotation: Domain name=SWIM; Domain location=440-472; Score =40.5; E_value=5.7e-09; Accession=PF04434.8; Description=SWIM zinc finger
  Pfam module annotation: Pfam domain module=MuDR::SWIM; Domain location=6-158::440-472
WVCSLMEGNQILVQSEQSLIPGVQTLVIGQEFADVDTCRRAVKDMAIALHYELRVVKSDRSRFIAKCSKEGCPWRVHIAKCPGVPTFTVRTLHGDHKCEGVLNLHHQQATVGWVARSVEARLRDNPQIKPKEILQDIREQHGVAVSYMQAWRGKERSMAAVNGTLEDGYRLLPAYCEQIVKTNPGSVATYGGIGPGNAFQRLFVSFHASIYGFLNGCRPLLEIDKADLKGKYLGTLLCASAIDADHMMFPLAFGVVDSESDDNWNWFISELRKMLGVNTDKMPVLTILSERKRQVVKAVGSNFPTAFHGFCLRYVSESFLDEFKNTKLLNLFWSAVYALTASEFDAKGIRYGHFSLGITEILYNLSLDCHELPIVQAIEHIRHQLTCWFAERQNLAQSYNSVLVPSAEKLVSEAIHDSQCYQVLRANKVEFEIVSSERTNIVDTEARSCSCRRWQIYGIPCAHATAALLSCGEDPRFYAHDCFSVMKYRETYSQPIHPIPDRSHWSNSSPGLQGVASKADVMMLSPPNIRRPPGRPKMKILKIESMKRPKRDRSVWTMSSCRAFSKEVLSAKL

SEQ ID NO: 55082 - protein, 144 aa, Zea mays
  Coding DNA Sequence Number=SeqID_13303
  Gene Ontology: Mol. function=calcium ion binding; Cellular component =integral to membrane
MAARRQHRRGFPLVPLLLSLLAAAAYGRLISDGGPSAQLLSVIRLSGSSPAAGAAAKAEEKCEQSYGFLPCTTTVLGNLFLVLTYGYLMYKAATYLSAGSELLLEIMGPGLVGGLLLPILGALPDALLVLGSLSVPLARLISVL

SEQ ID NO: 55083 - protein, 160 aa, Zea mays
  Coding DNA Sequence Number=SeqID_13304
  Gene Ontology: Mol. function=metal ion binding; Cellular component =integral to membrane; Biological process=ubiquitin cycle
  Homolog annotation: Hit_ID=Q655C7; Match level="QueryCoverage=46%, HitCoverage=21%, E-value=4e-17, Identity=50%"; Hit description=Ring -H2 zinc finger protein-like
  Pfam annotation: Domain name=zf-C3HC4; Domain location=84-125; Score =29.4; E_value=1.3e-05; Accession=PF00097.15; Description=Zinc finger, C3HC4 type (RING finger)
MDLLLACLLVRSLLAVRVASQRGTERYASYPAGAACSSAGRGRGSHPSAPGIGAAEEEGDRGMSAAAIAALPTFAHAGGAALDCPVCLAQVEAGEKLRRLPKCAHSFHADCVDAWLRAHSTCPMCRAAVLVGPAAAAAAAAATKQPDPAAAAAEALPPPV

SEQ ID NO: 55084 - protein, 271 aa, Zea mays
  Coding DNA Sequence Number=SeqID_13305
MDRMVLGRGGLGGMSGDEDVRVEVVELIVFLHRGGIRGGGGCEAVAAGWTGWEMTDDVLIGTELKNEKHYVRSLNTTTELLSPDFTSANEPRLRRCLLEPAGSSSPTRSHPIHQPGSRVPLPLRTLSSSSFAAAGTSFEKLELATAGAADGKRSIDLVDHGWYGAAHARAAVSLRWRMTPPWSHGSSTFQCACTPAVVTLTAWASTLTTVGRGYKTSKHICGGHELWSVAAENVGSTAVVTSVLIPCCGRQLRRFRYRSPPWKGCRVEMAD

SEQ ID NO: 55085 - protein, 134 aa, Zea mays
  Coding DNA Sequence Number=SeqID_13306
  Homolog annotation: Hit_ID=Q6AU09; Match level="QueryCoverage=72%, HitCoverage=7%, E-value=2e-16, Identity=43%"; Hit description =Putative Fip1 motif containing protein
MEEDDEFGDLYTDILIPTHTPQSTSALSNPVLVETLHRPPPHPNPTPMAATAEEVDDDWLLGGSESIPGVDPTGDWVDEDDNGGEPAPPACEDGVATAVGARGERPNRARVRSVAGCSFEVEREDMCPMLRRRQ

SEQ ID NO: 55086 - protein, 83 aa, Zea mays
  Coding DNA Sequence Number=SeqID_13307
MANTVGPHRGGQGIEGDERWRRNRLWRGDDSATAMVSAGIEMRGTEGGAGDDTRPTGCKRGKEIACDNEPEMAITLVSGNYKR

SEQ ID NO: 55087 - protein, 116 aa, Zea mays
  Coding DNA Sequence Number=SeqID_13308
  Homolog annotation: Hit_ID=UPI00005DC23F; Match level="QueryCoverage =50%, HitCoverage=11%, E-value=2e-15, Identity=57%"; Hit description =catalytic
MKDLGELPREVSAAAVKGGPTDGMGGKRKLARYHIGIFETLTRGWVKMAVQYMRRIIQKRAKFDIMDLNVLRLAPKMFIPVLFGHGLNDMFIQPHHCDRIHQAYGTYKRRDKDGEF

SEQ ID NO: 55088 - protein, 298 aa, Zea mays
  Coding DNA Sequence Number=SeqID_13309
  Homolog annotation: Hit_ID=Q8LR61; Match level="QueryCoverage=27%, HitCoverage=17%, E-value=2e-27, Identity=72%"; Hit description =Putative WD repeat domain 45
MATPASTPTPPNPNLVSGNPPSLLLQQQQEEEVPEPVPETAPMPLTTSIDPTPSGGEESESDDSSSVWSTPSSAPTPVPAPTLAPAAKDILHISFNQDYGFFTAGTNSGFHIYNCDPFREIFRQDLAVEGGVGVGGGGGGIDVVEMLFRCNILALVGGGDNPHYPPNKDGRLIATATTKGTLVRIYNASEGNLLHEVCFLSRARSYIVYMRVWVRVLALQYFLRGSCAGKGHMLGAEAYSGQVVGPTMSGRYNGSPGLRILKRAWVGNRVSSAESTAHGYDGDETESMQDRRLRDAVG

SEQ ID NO: 55089 - protein, 196 aa, Zea mays
  Coding DNA Sequence Number=SeqID_13310
  Gene Ontology: Mol. function=carboxyl- and carbamoyltransferase activity; Cellular component=ornithine carbamoyltransferase complex; Biological process=amino acid metabolic process
  Homolog annotation: Hit_ID=Q6QP54; Match level="QueryCoverage=37%, HitCoverage=32%, E-value=9e-16, Identity=56%"; Hit description =Putative kinase
MALFPLLLAERRRRGVCKKVESVPDRPLTLCRGSGAALANPAPAKPLTASTYQPENLEPDRLGLGLSPGRRRTPLRPTQGSDLGSAPEDGKLRSARPRARTWAQPRKTANSALPDPGLGLGLSPGRRRTPLRPTQGSDLGSAPEDDELRFARPRARTQLWPQPTVSTSPDPGARTRPRPWKTNSTPTSEEPPHHPI

SEQ ID NO: 55090 - protein, 34 aa, Zea mays
  Coding DNA Sequence Number=SeqID_13311
MPPDLQLIQYIKKDFLINSGSSSSVPISSATKVY

SEQ ID NO: 55091 - protein, 289 aa, Zea mays
  Coding DNA Sequence Number=SeqID_13312
  Homolog annotation: Hit_ID=Q2RBL8; Match level="QueryCoverage=9%, HitCoverage=5%, E-value=1e-07, Identity=81%"; Hit description =Expressed protein
MTNRNSQVGVLRSIIINSLVALYIIVSFIILFYKGHDHEVQLPMVVKHEHQEMQTKVAAEHHEQMRGKDTIRTVACDKYGRKDVTYQHWRWQPHRCDLPRVVIDNEKTDGGYKVGYKAATTDYLGHWKRRAEGHTHSDTKGDMKGKLRIRRLKFPNSKLPVGSYPDDPELERFLDLERLHRLNEFIVASTGKPASLPVAHGVEEFHGGRFWALGNLSDSDSEADENSVLPEVIETRASGTCSDRLSEFRQAVRTPRLSAAITSAAAPCARGAKLRPWQGRLPSPRCRQN

SEQ ID NO: 55092 - protein, 91 aa, Zea mays
  Coding DNA Sequence Number=SeqID_13313
  Subcellular localization annotation: CTP_CleavageSite=33; ConfidenceScore=5.21e-01
MVVDLAAGSLPRPPLQAVVTRIGTRPALGLLPLAAGPAQAHARLNPPYRVPPSFVAFVGSVAVVAFPSGSMFAMAIPARSAIPLAGSRLPC

SEQ ID NO: 55093 - protein, 275 aa, Zea mays
  Coding DNA Sequence Number=SeqID_13314
  Pfam annotation: Domain name=zf-CCHC; Domain location=186-203; Score =8.9; E_value=0.034; Accession=PF00098.13; Description=Zinc knuckle
MARPSWENAACPRRRGRGRGHAPCWPRGGAGLGTMGGKGAELPGLIQLSTKPKRFNNAFQGRYSHGESSESGSALQRSVGLLGGRGSVPQVTLPPISGSPEVAGRPASVPSSLELLAQAMVLLNQAFVHPASLDNTAKASIPAGPLDGIDAGKGNNDGKGKEVMKDEHNNDQQRAGKPPLKEGKQPYCFRCLTKGHVMQVCLAMLYCEICRSKAHNTDRTHFPSREELSHMIEWGVVQTKFNAAMKIEEATVKSFAKAELKKCHYYSKPLYRRSG

SEQ ID NO: 55094 - protein, 108 aa, Zea mays
  Coding DNA Sequence Number=SeqID_13315
  Subcellular localization annotation: CTP_CleavageSite=74; ConfidenceScore=5.09e-01
MAPSVSMVKNGGKGTVGLCLITPRERTARGRRGLGRGRILARRGIGVATQVASQSESRHRVVALQARLLGWRARLAGVSGPPDRGSRLGLGAVDVQGGLGAVRWARAA

SEQ ID NO: 55095 - protein, 111 aa, Zea mays
  Coding DNA Sequence Number=SeqID_13316
MAGGNELAGAKERWLAGEGFELGIKVNIPDLWLKSLGGYLYNADITSNHSVVNSKNTDVALPSFGHYFRSTNVVNNNSVVTPKSDNVTPSDSATTFEAPTSQQSSTDREAK

SEQ ID NO: 55096 - protein, 118 aa, Zea mays
  Coding DNA Sequence Number=SeqID_13317
RDSFSPGSGVLAVEQRPHKRWRMTKSQGPWRSMSIAPEPSGYGSARPYNAGKGARRNPCRLELAKSPGQDLPRRGYLSYRMDLSRIPFGLARRLLDMHDGFGIASWSPQATGDGVSDD

SEQ ID NO: 55097 - protein, 141 aa, Zea mays
  Coding DNA Sequence Number=SeqID_13318
  Subcellular localization annotation: CTP_CleavageSite=43; ConfidenceScore=5.39e-01
MRVAEAVRAAGGSTLRPRMPGPRARNRCWAPTAGCRTRPRSAVAGAVVPKLALSWGRTKRLAVGTTSSDLPDDLLFVTDSPATNVSHQPAAGEAGRRVIAARRPGVQQAPATAHGKRFVNRNSASNSYAAPYLFPTPHLKP

SEQ ID NO: 55098 - protein, 343 aa, Zea mays
  Coding DNA Sequence Number=SeqID_13319
  Homolog annotation: Hit_ID=Q69S79; Match level="QueryCoverage=44%, HitCoverage=19%, E-value=3e-60, Identity=80%"; Hit description =Putative ABC transporter
  Pfam annotation: Domain name=SWIB; Domain location=270-327; Score =2.1; E_value=0.012; Accession=PF02201.9; Description=SWIBMDM2 domain
MVQMGVLVPTGDMTVVRRTAQFFLNSFQECLTAQRKEREMATAELGFKKQLTKEEKFEKRKQRLAAIGEDLLAIAADQPFRFPATFTFVVRAFSVLDGTGKGLDPRFHITEIAKPNAKELLRFNDAGVEIVVKASFNIWCVERHVYSSYDEFLRLHEVYQFVLVFLFVGMPDSNELMFNTEQPTYNFGAYKISKLKKERRAQLDSIHVKSEAAARSCFAFMWIYLANGMWIRSRGNEPCSQEIVLVTPKMFPFYFRAVYLHSVGKLQPHCNKVYKRFAMRKNKFMGSNKNQAKKTDINCDATLKSLFGERDKVGMLEISKLLSRGFPKISKLLWSMEPGMALW

SEQ ID NO: 55099 - protein, 234 aa, Zea mays
  Coding DNA Sequence Number=SeqID_13320
  Gene Ontology: Mol. function=methyltransferase activity; Biological process=DNA methylation
  Homolog annotation: Hit_ID=Q9M529; Match level="QueryCoverage=53%, HitCoverage=20%, E-value=1e-50, Identity=76%"; Hit description =Putative DNA cytosine methyltransferase Zmet3
LIEHILDALANSEDPPSATVQKYVLGQCRKWNLVWVGRHRVAPLEPDEIEFLLGFPKDHTRGINSTERYRSLGNSFQVHTVAYHLSVLREMFPNGMNVLSLFSEIGGAKIALHKLGIRMKTMVSVEHMPSVASKPGTFFLSRATPFAEIWMGHDGGFLVAGAGALTGISSALHAESVACMKGLELAVFFGMQNVMIETDAAILKTALTSQEYDLSALGVLLMEQIQVTLTLVYG

SEQ ID NO: 55100 - protein, 197 aa, Zea mays
  Coding DNA Sequence Number=SeqID_13321
MAETSAESVEGAGGAQVASVTSGRVAWKLGGGYRVKRADEMGPDSTVVARAPVHVGYPGRRLAAHALVAAVVVAASAEVVAAATLAMAGSGRAVGMEAAPTRNAATRLELTGPSPLHRVRVITREEPQTLNRILTNSSPENGICGAAVTRRCFVPKQSRELKINTMMKHIYLANLQFPALITSQKDQKSLLAWFLGS

SEQ ID NO: 55101 - protein, 742 aa, Zea mays
  Coding DNA Sequence Number=SeqID_13322
  Homolog annotation: Hit_ID=Q654D6; Match level="QueryCoverage=34%, HitCoverage=31%, E-value=3e-12, Identity=24%"; Hit description=Extra- large G-protein-like
MGSDLKEMKYRRRIGVEERPQCSDPRGGADWAALQQDPVELLRKLDELRDQITRSCNVVVGQPREHRRVSRRAVSMLPEHLEPPPLPGYHRSRYGGRYGHGLPPPSPYAPPRPEHGERYARQSSGHYRQYPPRHCENGGMGPGTYHHHGCACPHCLHGQRTFPQEENIPMARYFAGQHESYRLERSPSVSSDYDRGSVASSLYSHRSVSKMRAEYFRKKAEHICRPVDGAAPFSVCSSCYKLLLMPMEKCVGRKQNRFQCGSCCQIISLKHQEENGIPFALAPSSSLHAPEMEQSTSDQMRQDSVHQRHEDFNFMFNNSNDHCDMQNNMDFTDDNSLPSTASNDRIEIDKECGSTRSIQSKAEGLSFSPSRSVDIGSPKDILCERDKDSNVEPSSDGPLSPRSPTLEDKLVDPLCAQEKGNDEDDQGTAYRSNLTCKGEYDANDEYDGDVSTRSKPESNVNDKDTTEGETSCRNYKEDNCCNIEDSSKTYEQNSGEDDTSSLVDGNEKYESMNTKDDDSSPGGEDTCNRYEPKVEDDENCVLGAESISNNCDENNKDAIKTGSISERHEELIIEEENEKLQQAFIEDANSQAGSGSSINERTNSGFSRGSSEAGLDEDQSSTGKSGDSSFFAGFLKKGFKDLSLLNKSMDSVKVSINGHPISERALKKAEKKAGPVDPGSYWGMLEADFCYINLNIGSKRMDRGTLVDALRLATPLGFFPMLTVHALCYGQLMGPAGLGLLD

SEQ ID NO: 55102 - protein, 106 aa, Zea mays
  Coding DNA Sequence Number=SeqID_13323
MTTGTKEAGMRAETSVEVAATGRSKQHGEGRDRDGGNDDDTKKSRECIQARICMLGDGKQCCANAITSYVLGTINTRGTREQYASSMVHCIELQAFSGGTSNTKQE

SEQ ID NO: 55103 - protein, 507 aa, Zea mays
  Coding DNA Sequence Number=SeqID_13324
  Gene Ontology: Cellular component=integral to membrane; Biological process=peroxisome organization and biogenesis
  Homolog annotation: Hit_ID=Q9FTV5; Match level="QueryCoverage=91%, HitCoverage=87%, E-value=1e-167, Identity=64%"; Hit description =Proline transport protein 2-like
  Pfam annotation: Domain name=Aa_trans; Domain location=42-486; Score =188.0; E_value=2.2e-53; Accession=PF01490.8; Description =Transmembrane amino acid transporter protein
MAAAALDAEAGATNGSGGVSHAAAKPGPTAGADAGAAFVLESKGTWWHAGFHLTTAIVGPTVLTLPYALRGMGWALGLTLLSVMAAVTFYEYSLMSRVLDHCEARGRRHIRFRELAADVLGSGWMFYFVVTVQTTVNTGVSIGSILLAADCLQIVRARKSFGLRQLTNNAMHELGMIGIRISTVRCDGFIRTHIMYTSLAPHGPLKLYHFVIMVAVVLAFLSQLPSFHSLRHINFVSLLLSLGYTVLVAAACVRAGLSKNSPAKDYSLSSSKSEQSFDAFLSISILASVFGNGILPEIQATLAPPAAGKMMKALVLCYSVIVFTFFLSSITGYWAFGSNVQSNVLKSLMPDSGPALAPTWLLGVAVLFVLLQLLAIGLVYSQVAYEIMEKGSADAARGRFSRRNLVPRLLLRTLYLAFCALMAAMLPFFGDIVGVVGAVGFVPLDFVLPVLMYNMALAPPRRSPVFIANAAVMVVFAGVGAIGAFATIRKLVLDADKFKLFSNNVVD

SEQ ID NO: 55104 - protein, 76 aa, Zea mays
  Coding DNA Sequence Number=SeqID_13325
MCAPPSLIFPVQQLPLPPLFHLLALRCDPVDGFRRLFGSRSWRSPKELQVKTRAVKQPQCKEEAEHVFIVESKVIR

SEQ ID NO: 55105 - protein, 57 aa, Zea mays
  Coding DNA Sequence Number=SeqID_13326
MGKPVPSILMLLLCRVTALVPAITRMGDHISGRVRGKVCCQVHSVGKTLPLWVILEV

SEQ ID NO: 55106 - protein, 66 aa, Zea mays
  Coding DNA Sequence Number=SeqID_13327
MAGACGMSDAGKEDAREGTVMPVDALVVPLSDQGIGVGLLLGLPEDPVELGQLDMGALAIETQRAC

SEQ ID NO: 55107 - protein, 104 aa, Zea mays
  Coding DNA Sequence Number=SeqID_13328
MRPTVQHGNREEELLTGAPTADLRPARRQRHSGRRGDAARARQGQTPLTEKRVSRQRVRGKLGCGRESSVGVVVQFIEKERGGERAPEKRKRWPAINGVHQQRD

SEQ ID NO: 55108 - protein, 54 aa, Zea mays
  Coding DNA Sequence Number=SeqID_13329
MGSTVFEVAELDGAKMICHTNNKMKEAEYMKYKDPKQPINSRTGILLVVLKEAS

SEQ ID NO: 55109 - protein, 189 aa, Zea mays
  Coding DNA Sequence Number=SeqID_13330
MASAKTFSCMAECLHQKGPEDTRGAPHAFLLASSLQPLHSHQKEAHANLSRQAKDISVNEFMLISLPEQQHGRACAVLMSYQTHKNALLLLPCTTQYTFTDSCAALGSGVKLCDLLRRILINARRGEVPDHGSASQHSSNLNQSISILAGVRGAERLRASEERRLLIGWQVTSPGLRRRDADRRVAIGG

SEQ ID NO: 55110 - protein, 82 aa, Zea mays
  Coding DNA Sequence Number=SeqID_13331
  Subcellular localization annotation: CTP_CleavageSite=60; ConfidenceScore=5.55e-01
MALARAAFSGRRLLAASGAVLLLLPSLVAGFLNFPGVAVAGGSVLLLLRSSSGPTLFRARGSYGEADCRLQVKRTRAVSLRN

SEQ ID NO: 55111 - protein, 162 aa, Zea mays
  Coding DNA Sequence Number=SeqID_13332
MAPRSRLLDLERHDVLSFYGGGAYHQSASASAWPPTATGSFSGPIDFLVAALLLHLVVPFPHAAAAVCGALYVAYCFLLDRSAQHVLQKERELKRVNAPCAPSRYGDTEKATRSQWRMMMSIYLNTINKYLIMVSLTSNDKYDLAWDVDDNVLFNGRSLKKY

SEQ ID NO: 55112 - protein, 80 aa, Zea mays
  Coding DNA Sequence Number=SeqID_13333
MTYQVVLYCGSGVRAETLDDTAIDVPTGDMARLDPSIIIVPRLSPMPLKARYRGGGLEETEHGHEHQTIRSPARQNDRDR

SEQ ID NO: 55113 - protein, 244 aa, Zea mays
  Coding DNA Sequence Number=SeqID_13334
MEVVEEMSEINYVARKKWAKKYLFMRSNRCDGFLFFIKILRKALQKAAPNRPIEAKTEQALDHLLHLPVDKFYDAGQQDKANEGRCGGSTIEERRPHPRKIEGTNHAKGWPVSSKPGLSVKAHGKDACGRVHASKPRPHADLRRRVERLHCLDDRNMSMKTASTVWLRRAHSQLSNDGPTYQPPWRVQSGSGRLNRPLQLGSGRLNGPLEPGSALHNPGSTDLQDSSTAFAHIGFQILSLISLW

SEQ ID NO: 55114 - protein, 114 aa, Zea mays
  Coding DNA Sequence Number=SeqID_13335
MALLQGITGGGPREDFAGWEVLQGNAALEFPINCTGFLKLVELGKGLLVLPCLASSVKCMESLDLLEMGNMACGYRVPPLQSVKRGYLAESPAVNSLRSFCSLHSLRPEAPSST

SEQ ID NO: 55115 - protein, 100 aa, Zea mays
  Coding DNA Sequence Number=SeqID_13336
MVFDPRQCHHRPLIPLSRADVEDWRHVELASSWGDLSLETIEETFGSFGDEISIARASMTQDFIPSRQRLFARSMARVEVLLSAQWEAEQLRVGATRYEA

SEQ ID NO: 55116 - protein, 60 aa, Zea mays
  Coding DNA Sequence Number=SeqID_13337
MYDGPARSLYLVDASHLISWEVVGLGGLGPNIPSHESEDLMDIGPEYGALQLSASTLMMP

SEQ ID NO: 55117 - protein, 32 aa, Zea mays
  Coding DNA Sequence Number=SeqID_13338
MAKDPGVLQRPSVRERRELTARDPHGGVWGFL

SEQ ID NO: 55118 - protein, 98 aa, Zea mays
  Coding DNA Sequence Number=SeqID_13339
MGTGNIFHIHVSQDIHPNYNLRGDEESSRGFILAGNRNNYFSKRFTFDLLNDLIAFLDPLFSAKCYDAEDLARLVGFGDFDNNTLKGLINLLSVEHES

SEQ ID NO: 55119 - protein, 724 aa, Zea mays
  Coding DNA Sequence Number=SeqID_13340
  Gene Ontology: Mol. function=RNA-directed DNA polymerase activity; Cellular component=intracellular; Biological process=RNA-dependent DNA replication
  Homolog annotation: Hit_ID=UPI00005A975E; Match level="QueryCoverage =99%, HitCoverage=40%, E-value=0.0, Identity=83%"; Hit description =PREDICTED: similar to Retrovirus-related Pol polyprotein from transposon 297
  Pfam annotation: Domain name=RVT_1; Domain location=56-225; Score =127.3; E_value=4.3e-35; Accession=PF00078.17; Description=Reverse transcriptase (RNA-dependent
  Pfam annotation: Domain name=RnaseH; Domain location=455-582; Score =12.1; E_value=4.3e-06; Accession=PF00075.14; Description=RNase H
  Pfam module annotation: Pfam domain module=RVT_1::RnaseH; Domain location=56-225::455-582
MPGIPRDVAEHSLDIRAGARPVKQPLRRFDEEKRRAIGEEIHKLMAAGFIKEVFHPEWLANPVLVRKKGGKWRMCVDYTGLNKACPKVPYPLPRIDQIVDSTARCETLSFLDAYLGYHQIRMKESDQLATSFITPFGMYCYVTMPFGLRNAGATYQWCMNHVFGQHIGRTVEAYLDDIVLKTRKAFDLLSDLEVTFRCLKAKGVKLNPEKCVFGVPRGMLLGFIVSERGIEANLEKIAAITSMGPIKDLKGVQGVMGCLAALSCFITRLGERGLPLYRLLRKAECFTWTPEAEEALGNLKALLTNAPILVPPAAGEALLIYVAATTLVVSAAIVVDRREEGHTLPVQRPVYFVSEVLSETKIRYPQVQKLLYAVILMRRKLRHYFESHLVTVVPSFPLGEIIQCREASSRIAKWAVEIMGETISFAPRKAIKSQVLADFMAEWVDTQLPTAPIQPELWTMFFDGSLMKTGAGTGLFFISPLGKHLRYVLLLHFPASNNVAEYEALVNGLRIAIELGVRRLDARGDSQLVIDQVMKNSHCRDPKMEAYCDEVQRLEDKFYGLELNHIARRYNETADELAKIASGRTTVPPDIFSRDLHQPSVKIDDTPEPEAPSAQPEVPSAQSVAPSARPEAPSVQPEAPSAPEGEALRVEEERSGVTPNQNWQSPYLQYLHRGELPLDRAEARRLARHAKSFVLLGDGKELYHRSPSGILQRCISIAEGQELL

SEQ ID NO: 55120 - protein, 240 aa, Zea mays
  Coding DNA Sequence Number=SeqID_13341
  Gene Ontology: Mol. function=kinase activity
  Homolog annotation: Hit_ID=Q6QP54; Match level="QueryCoverage=65%, HitCoverage=50%, E-value=3e-21, Identity=56%"; Hit description =Putative kinase
MEDLSNMTPTIVIGKIAAFEMSRKMCRGEEPTSSRPYAFAWLGPRLGLGRWTSPRPTPGLGLNHDSEDDRLRLARPQGSDIASVRKTVSASPDPRARAQPRHWTTNSASPDPRARTQPRPQKTVSASPDPGLGLDLNLGRQTRPRPRRSLCLARPRARTDHVIGGAHHYPTPSWLRLRGTRPASHLARPGKQIMMAPRVLHDDGGSQPLTEARRRQQGFDSPDSCPSVGLQLSSDGHDIT

SEQ ID NO: 55121 - protein, 470 aa, Zea mays
  Coding DNA Sequence Number=SeqID_13342
  Gene Ontology: Mol. function=hydrolase activity, hydrolyzing O -glycosyl compounds; Cellular component=cellulose and pectin -containing cell wall; Biological process=carbohydrate metabolic process
  Homolog annotation: Hit_ID=Q9AXL6; Match level="QueryCoverage=93%, HitCoverage=78%, E-value=1e-107, Identity=44%"; Hit description=Beta- glucosidase
  Pfam annotation: Domain name=Glyco_hydro_1; Domain location=1-443; Score=191.9; E_value=1.5e-54; Accession=PF00232.9; Description =Glycosyl hydrolase family 1
MGLDAYRFSIAWSRLIPGIQPHVTIYHFDLPQALQDEYNGLLSPRIIWPWHEWIPLTAVRTVRSDDFTAYADVCFRSFGDRVKHWITVNEPNIEPIGGYDQGYLPPRRCSYPFGLGVTCTHGNSTTEPYAVAHHLLLAHASAVSLYRRKYQGEQGGRIGLTLLAWWYEPATQKPEDVEAAARANDFSLGWFMHPLVYGDYPPVMKRNVGARLPSLTARDSAMVRGSLDFVGINQYGAILVEADLGQLDRDLRDYYGDMATNFVTVPFESTVTRNQQVPRLGLRNHEAPWALSKLLEHLQTHYGNPPVMIHENGEAGQARALSLSRFSCRAHARFLSSPELMVPPPPPPPGAGHEPDPSGGFLYDDEFRAHFLRVYVEAALASVRNGSDLRGYFVWSFMDVFEFLFSYRFRFGLYGVDFAADNRTRYARRSARWYAGFLRGGAATSRPPLFQRGHTAPPIRSENQPHVSVL

SEQ ID NO: 55122 - protein, 372 aa, Zea mays
  Coding DNA Sequence Number=SeqID_13343
  Gene Ontology: Mol. function=oxidoreductase activity; Cellular component=chloroplast thylakoid membrane; Biological process=sodium ion transport
  Homolog annotation: Hit_ID=Q9AYU1; Match level="QueryCoverage=96%, HitCoverage=98%, E-value=1e-89, Identity=51%"; Hit description =Quinone-oxidoreductase QR1
  Pfam annotation: Domain name=ADH_N; Domain location=35-151; Score =38.3; E_value=2.7e-08; Accession=PF08240.2; Description=Alcohol dehydrogenase GroES-like domain
  Pfam annotation: Domain name=ADH_zinc_N; Domain location=192-331; Score=27.5; E_value=4.8e-05; Accession=PF00107.16; Description=Zinc -binding dehydrogenase
  Pfam module annotation: Pfam domain module=ADH_N::ADH_zinc_N; Domain location=35-151::192-331
MAAPSGTMRAVQYDRYGGGAQGLKHVEVPIPSPKKGEVLIRMEATSINVVDWKFQNGFARPFMPRRFPFISVLAFDVPSRVRVRMRTGELHRRVIVFAFWRTGYDLAGEVVELGAGVSSFKPGDKVIAINFPNGGGLAEYAVASASRTVARPPEVSAVEGVCVPIAAVTALRSLRTAGVTVTLDDPARAPATPKNVLVTAASGAVGHFAVQLARMGGHNVTATCGARNLGLVRSLGADEALDYKTPEGARLRSPSGRKYDAVVHCAAKGLPWSVFRPVLAASGTVVDITPGFVAVVTAILQVATFSKKRLVPLMVTPNKEEMELLLGMLKQGRLKTVIDSQHPLGSAHEGWAKSMSGHTTGKVVIEIGAAQP

SEQ ID NO: 55123 - protein, 351 aa, Zea mays
  Coding DNA Sequence Number=SeqID_13344
MACLMHVSQKTWPQVVVEGSSILFQHIGQPSKQAHFRRVHEDHDHEADQPKPMNAKTNPSHEDKGNDANTARDRRRRRRAPAGGAANAVGNDDGEEQHLNTFLDAANASSASSRVQFRNMASRARWVEEAGAAEVVENRGKLWLTTGVTRAGKLYYNVEETGFLAEMGALILLNDKDETIGIEDIYGKLAGGNYGCSWDTFQAYKHLKSLGYIVGRFGVPWTMKHGGTHHTIAPQINILETDQSLNRVDGASNDITKLLKEIQIDGICPSFEVYLPNSKFKKSSPGGKPPSRVELEAVENNFRGIPLKYAHVDNGRAAPVTFGFPTATNATLFLVPSLRLQVLASTEGVRH

SEQ ID NO: 55124 - protein, 140 aa, Zea mays
  Coding DNA Sequence Number=SeqID_13345
MPPPKNYAGVYLTPLDFHSNTIKTVITSFHPLLYIRPNIPSPVILAEKSLAVQEQSSQFGTKAPPSRSREQDEAELKATTPRSIQSRGQKGSEQVPKTGRSHVVRLHGLVPSAVHHAPNDQIIMPGNDGKASTSDVGGKA

SEQ ID NO: 55125 - protein, 143 aa, Zea mays
  Coding DNA Sequence Number=SeqID_13346
RARPCPQPDGLGSAPLAVPSLAAYRSGSCPTHGPGPRSKHGPMHWASPKLFRDARCHPMADGLALAYAPALAPLADAPTPTPLAGGLDLAPTPTTMAKTSTLPSSRAFGSRLSLFPWPTCELLRPPQPPLLARLHSPSLLCSL

SEQ ID NO: 55126 - protein, 562 aa, Zea mays
  Coding DNA Sequence Number=SeqID_13347
  Gene Ontology: Mol. function=DNA binding; Cellular component=nucleus
  Homolog annotation: Hit_ID=Q9LRX4; Match level="QueryCoverage=48%, HitCoverage=14%, E-value=7e-38, Identity=38%"; Hit description =Arabidopsis thaliana genomic DNA, chromosome 3, TAC clone:K7P8
MVNAEPCSMGGIMDYGVGVGTKSSPRSMAIEKAQEELRQESDVRDEWRRELEFLEKVCPHQGGNPLDFNFAHLETVGVHSASLTNQVEAQTVISDAKGSFSASPLGDSVESTDKPGGSMCRETNTADNLMLLGGGKNDIAEEKVVKRGTKRLNAAQPKHSLPSDGHKNTKKPAASGLSHLGVKSQAYVRRNRSKPSRESGNVTSIRSSMIPAKVYEPNDEKVTAQKNNADDHGVLSVSSIKQSGPNRDIAPKSIASDDHAAMELDGIQTILESECVVNDKVNKAGNNNKAKQLSSNDTNHDRFLVGCGEIAAEVSSAETPDANLKVVIKPCYSSASTYDEKESCAVHEKADDGHLDECMAHIREGELGHSRTLPCVVEASTSHNDVVGPSCEGTVNIVDEHADGDINTVAGKIDSHEDLDSSRHSNMILKVSGTSIDFSRPASLKESSDLVRPEASNISHVKDEIEVCNSAIVAQKDTECLSSGRSMNIEESPVSVRKNSYVGNSNSAHPISVGIDLSDALSPPKNDESNVESEIKKYENLNKMEKKAYEDSILKNARVIEV

SEQ ID NO: 55127 - protein, 88 aa, Zea mays
  Coding DNA Sequence Number=SeqID_13348
MTRTSPARGPRVRVWVEEGEQPRRCADGSQGHWGSLPEDCAAENREVDAGGGRGNGGVGLGAEAGSSREAHTRILSPDIWAQGQNGRK

SEQ ID NO: 55128 - protein, 112 aa, Zea mays
  Coding DNA Sequence Number=SeqID_13349
MAPRGGRLGEARRSCESLDPASNCPSTETPTEELMAYGARRNHDTAPEYPTDTRATTILVLVGGGSSLFLTADTRVRFASDCSFPERVSEVCGWSSGPTRQCHRSSAREGHL

SEQ ID NO: 55129 - protein, 633 aa, Zea mays
  Coding DNA Sequence Number=SeqID_13350
  Gene Ontology: Mol. function=RNA-directed DNA polymerase activity; Cellular component=mitochondrion; Biological process=RNA-dependent DNA replication
  Homolog annotation: Hit_ID=Q8S463; Match level="QueryCoverage=89%, HitCoverage=30%, E-value=0.0, Identity=82%"; Hit description =Putative prpol
  Pfam annotation: Domain name=RnaseH; Domain location=37-164; Score =9.0; E_value=8.4e-06; Accession=PF00075.14; Description=RNase H
  Pfam annotation: Domain name=rve; Domain location=345-504; Score =105.7; E_value=1.4e-28; Accession=PF00665.16; Description=Integrase core domain
  Pfam module annotation: Pfam domain module=RnaseH::rve; Domain location=37-164::345-504
MGETISFVPRKAIKSQILADFVAEWVDTQLPTAPIQPELWTMFFDGSLMKTEAGAGLLFISPLGKHLRYVLRLHFPASNNVAEYEALVNGLHIAIELGVRRLDARGDSQLVIDQVMKNSHCRDLKMEAYYDEVRRLEDKFYGLELNHIARRYNETADELAKIASGRTTTDDTPEPEKASTQPEAPSAQSEAPSAQPEAPSAPEGEALCVEERSGVTPNRNWQTSYLQYLHRGELPFDRAKARRLARRAKSFVLLGDGKELYHRSPSNILQRCISIAEGQELLQEIHSGACGHHAPPHALVGNAFRQGFYWPTAVADATRIVRTCEGCQFYAKQTHLPAQALQTIPITWSFAVWGLDLVSPLQKAPGGYTHLLVAIGKFSKWIEVRPLNNIRSEQAVAFFTNIIHRFGVPNSIITDNGTQFTGRKFLDFCEDHHIQVDWAAVAHPMTNGQVERANGMILQGLKPRIYNDLNKFGRRWMKELPSVVWSLRTTPSRATGFTPFFLVYGVEAILPTDLEYGSPRTRAYDDQSNRANREDSMDQLEEARDMALLHSARYQQSLRRYHARGVRSRDLQVGDLVLRLRQDARGRHKLTPPWEGPFVIAKVLKPGTYKLANSQGEVYNNAWNIRQLRRFYP

SEQ ID NO: 55130 - protein, 375 aa, Zea mays
  Coding DNA Sequence Number=SeqID_13351
  Homolog annotation: Hit_ID=Q6Z6D2; Match level="QueryCoverage=35%, HitCoverage=53%, E-value=5e-26, Identity=52%"; Hit description =Putative plastid ribosomal protein L19
GTGLRMQSLVRNVCRAGSRGAAARLLEAAAVHPGAAQPSSAVRHLRHPCGFARPIGVDQPKPVQRRTILRDGGRVPAAASGFGLCAKVLVATRGLSTAGNAAEVASDSDDSTSPAVEHPPRIKFKRPDKTARHIMNILNKEAVEKVRSERAIPDVQPGCIIQMRLMTTKLEQSSAEHRPAKFAAPSSLTPKISMFGAKAGFIIPKNKLAGSLVIRSTSDKNETPTASNEDSSRHVHRKTKWGPDLALDPVVCKGRALAYQTRVEQISKQLKSGALDTSEIDGSVSAGNELNSIGPDILKENELGNVELLELERRELIGQRSYLFLLVNGCQTEHFGLGTLGTTVIVGGRVNGCQTEHFGLGTLGTAVNLKAQGLR

SEQ ID NO: 55131 - protein, 227 aa, Zea mays
  Coding DNA Sequence Number=SeqID_13352
  Homolog annotation: Hit_ID=Q1SIN2; Match level="QueryCoverage=60%, HitCoverage=19%, E-value=6e-08, Identity=27%"; Hit description=Zinc finger, BED-type predicted
  Pfam annotation: Domain name=hATC; Domain location=119-205; Score =98.5; E_value=2e-26; Accession=PF05699.5; Description=hAT family dimerisation domain
MASPRSPMATSEDKVELQEIDGGGNPTQQEQIQGAGQQETEEEQRQSVAAGARAQQRGQKRSRSDVDSSTNPASSRKSEVWKDFKIVSPEGGPEVAECLHYGDMSSDYGNFLSTRRTHEEKTQLELHLAEPTKYIHEKLDVLDYWSKTSARYPELALKARDILAVPVSSVASESAFSLSRKVITHTRSSLDSTTIEALMCLQDWHREKMDEAQKELKILKMEMGYAC

SEQ ID NO: 55132 - protein, 151 aa, Zea mays
  Coding DNA Sequence Number=SeqID_13353
MGSLSSSTLVNPLFGLPVSKKVTKSIHALWVQVRAAFHGAKLLSLLDGDTKKEYITFSELFNWLLYFKTHTGLASDRRFVNVMTQEHGANKNEIMGMVTIGGVALATRINSDRWGKHLIYQVCFKKKLTTVEYWHMSDENFVLDLNLLALS

SEQ ID NO: 55133 - protein, 393 aa, Zea mays
  Coding DNA Sequence Number=SeqID_13354
  Gene Ontology: Mol. function=DNA binding
  Homolog annotation: Hit_ID=Q9LGH0; Match level="QueryCoverage=72%, HitCoverage=90%, E-value=1e-39, Identity=31%"; Hit description=NAM -like protein-like
MSSGLSGRGGTSGGGLSGGGGGGRGGSEYWQLDMQPAGSAHPNEPVNSIGDRFPQMHVTGSGELDLNGGDTLRGGGVAFHSCVPGQARVVADPLDSSLFGGREFFDLDNDIDGEFDINSNTCPDNQSQSRQVGPTTPTSRPNHKRSKNFSDQEDEVLVSTWLNISMDPVVGKDQKVGRIQLRRQSGTSMQDMLWYVYLTHANLLARVAQSCALYKSEDEHQKAFQFMHCWNKLRIQPKWLAKVDDLYAAKTSNKRHKTTRDGDANGTPPNGTNESQVQVIENNQLTRPNGKKKAKATLLQEKKKSVTAAIEHLWAGKKESDAEKDLKKEERFNKAFALEVDRVNMEKALLKVRKEEIELQKQSDEERIMAMDLGALTEEQKTYYMRLQAKIMG

SEQ ID NO: 55134 - protein, 273 aa, Zea mays
  Coding DNA Sequence Number=SeqID_13355
  Gene Ontology: Mol. function=oxidoreductase activity, acting on the CH-OH group of donors, NAD or NADP as acceptor; Cellular component =mitochondrion; Biological process=tricarboxylic acid cycle
  Homolog annotation: Hit_ID=Q1RVD4; Match level="QueryCoverage=60%, HitCoverage=43%, E-value=2e-71, Identity=79%"; Hit description =Isocitrate dehydrogenase, NAD-dependent
  Pfam annotation: Domain name=Iso_dh; Domain location=45-267; Score= -120.9; E_value=2.3e-06; Accession=PF00180.10; Description =Isocitrateisopropylmalate dehydrogenase
  Subcellular localization annotation: CTP_CleavageSite=23; ConfidenceScore=5.04e-01
MARRSTPLLRRLLAPSPSLPTPLADAVSRRTVTYMPRPGDGAPRGVTLIPGDGIGPLVTGAVRQVMEAMHAPVYFETYEVHGDMPTVPAEVIESIRRNKVCLKGGLATPVGGGVSSLNVQLRKELDLYAALVNCFNLPGLPTRHDNVDIVVIRENSEGEYSGLEHEVVPGVVESLKLRNQCVSAFVMEKPAAFLSVHLLCVQQADLPAVNMRVHVIAIPVILNGMETVQQQQHSLLSQTSWDRLEMKPTTNKDRKKDRKGKIKTVELRRTPEA

SEQ ID NO: 55135 - protein, 273 aa, Zea mays
  Coding DNA Sequence Number=SeqID_13356
MSPPRALSLKPSWELYVFTIERGYDEEPKAQLLDQHLDNKVECDTLDQLIRKASERLPYSKGVSGEASLQSIVVGYPRTRCPKKAQKSSQGRPTNRPTHLPSNPAGRVCRPNPPAEQPGGEGQPTNQPDKQPGKAELPTNPLAEQPSEAGLPISLPAEQPGKAGQPINLPTGQPSKTTTGSRMNTSTGGKRRPSTIKPRRHDETDHQQAVSIPWEQYQRVSIKHDARCVSPLTRGTSQPQSQGPQHRGLYSDAYTRRDGEIRGTRHTPMHDER

SEQ ID NO: 55136 - protein, 412 aa, Zea mays
  Coding DNA Sequence Number=SeqID_13357
MEKDHQDAQRKKRKAPLRLVDPCRDAKVVRLNVKGAAPPVTMTPPAVLAIAMKLPSPPRVTETTVSGTEGTGQELSMDDYLVGRVAMFDAQTGLPPTGAEAGQLALVPFTVPADLVGTAKGDTGTSLDPWSKFCATTDGGGELASAVAASGVTGSVARQLRYVSFFAEFGKLRCQVTTFVDQVALGALTLQLISERKRLVGGVELIRRQHTEAITDKSAAENKSRNLLEKIEDDVFKRSAGALYDRMWGPHGRGVIRERVDRARAQAMRDEEVEDLAGLESSVARKDAAVEAGAEELSLLQEGGAEGPAAAGASTQVEKNVPATRPVQANLDDNTNDDMLVCGNVVILSSDASEESDVGSWSSEGEELGSLFAWIDDESSEDDLDYFVALDLAVAESPLKVAPLRQRRLRSG

SEQ ID NO: 55137 - protein, 107 aa, Zea mays
  Coding DNA Sequence Number=SeqID_13358
MRFAIREGWESCVIPLRQKKGYNGPRAEAKAEYKTPLTHSKQPRPDNKLAANRKRKLDQQSLLRNSPSPDAPAKHHRTNPWFEGAQRCWAEPCQKHKGSYASKLPMP

SEQ ID NO: 55138 - protein, 104 aa, Zea mays
  Coding DNA Sequence Number=SeqID_13359
MRPWPWLPAAPSPSLQRLGWPACHHEVIRYRASVNQQSSFGDPEIKLFKFYKVEDPEHLFGEGKCPLSYLCHIHMKLTFPHNMIQSRLTSYLFTLSLFTFWVGL

SEQ ID NO: 55139 - protein, 163 aa, Zea mays
  Coding DNA Sequence Number=SeqID_13360
  Homolog annotation: Hit_ID=Q6QP51; Match level="QueryCoverage=26%, HitCoverage=22%, E-value=9e-09, Identity=63%"; Hit description =Putative growth-regulating factor 1
  Subcellular localization annotation: CTP_CleavageSite=50; ConfidenceScore=5.22e-01
MQAACNRAKWAHFSDSQHAQHGGPRPTCHATSAPETLRACNRTATLRHHRASSIAEPISRLEATQCTTQQRQPGAAGPGKGDTPKRILPCEETRLRATLLIRGSKAGPPKGFDSRLRSRGPYTHYWSEVRRSAPRKGSTAASGYSGSAPITYQGFEGWPPKGS

SEQ ID NO: 55140 - protein, 68 aa, Zea mays
  Coding DNA Sequence Number=SeqID_13361
MCIKLRRETGRLTAGNEGGVDGWRARRGRTAGSLLRDGGHGLPSSRAGGPRAARNYVNIWTTVKSRRS

SEQ ID NO: 55141 - protein, 82 aa, Zea mays
  Coding DNA Sequence Number=SeqID_13362
MEKSYAIKIADEILAGLSDDSEDSEDFDFDSDADDIEDRSWRPSHVNIGKSTVKTGHIEAMKDSDSDYAGCKVDRKSTLGTC

SEQ ID NO: 55142 - protein, 65 aa, Zea mays
  Coding DNA Sequence Number=SeqID_13363
MEAQDLQGTRAREKVKVTEEPKVKEGDQESPSRSEKESKKKDFDTISLGVLDIQQDWSVGAPDLQ

SEQ ID NO: 55143 - protein, 38 aa, Zea mays
  Coding DNA Sequence Number=SeqID_13364
MAARQTSDTFPIDYEPDIRSTNQKRGDEALAEPVTATF

SEQ ID NO: 55144 - protein, 78 aa, Zea mays
  Coding DNA Sequence Number=SeqID_13365
MEFCIWFGRGALPWANGRATVPSASHAGEEGERKRGRREDGCELTTVTNDDSGKASLDADEDGGARQRCHAGWEGRFG

SEQ ID NO: 55145 - protein, 45 aa, Zea mays
  Coding DNA Sequence Number=SeqID_13366
GIEVDQAKDECPSGRGVALHKIVTVIGGGVLVAKAQCLWKAVVGP

SEQ ID NO: 55146 - protein, 199 aa, Zea mays
  Coding DNA Sequence Number=SeqID_13367
MGGGRRGRGWPRHADGKRKHVSSPSLEDFGDSEYSEEASSDSNRSPTPTSPLASSEDSDDSMGLSTVAWAYWCSIERAGLGGSDESGISSDEADSSNSSDEWSDGDDDDDDEGDGSSSGDDDKGDGSSDDNDEGDGGDDGNDGGKGDVGYSSGDSSNDGGKDDGNSDDSGKGDDGSADDDDNGKGGGSDGKASGIMPLV

SEQ ID NO: 55147 - protein, 229 aa, Zea mays
  Coding DNA Sequence Number=SeqID_13368
DELHDGEEAQREQGTMRVRGVVAGVGVLRGRALAWWARVLARHCGRAPAVRFRQGKRAREESELEQGEGRARLGFYRERERESRGRGHEWPGGRVTGGINGSRLRILAARSRGVAQLLLGLGGVGLGARPILVAGGAPGVGLALQGGVVGRWRLGARLGFLGAGGCHGAGARGRGWPSAGGRVLAWRLGPWSCARAVESRGKEREREERGRKRLLAAAGSREREQGAAG

SEQ ID NO: 55148 - protein, 48 aa, Zea mays
  Coding DNA Sequence Number=SeqID_13369
MAPSAPLAFATVDQVGPNPDLIISTSLAPTKSSPTLVALSKPQPGWPG

SEQ ID NO: 55149 - protein, 334 aa, Zea mays
  Coding DNA Sequence Number=SeqID_13370
MARWVCDGSGRCTRPALHRRRAGNWVDTGPQNRGFDGRGDGRRQQRVRRRDWIRCGTVCETGAEVDAVADVCGVAVLQEDCAARHERPGSDPTRAMVGTVGIRHAGRGEGEVGEGADVRGREWGRGRGGGMRLRAGAGCVSGQNVHHPEVLFFATLSKPQANPRRVGRRGGSSEAEVESVFRGRGRVRAPGSGEAEVVRQRPGRSPSPGVGRSGVRRLLGLSLSPSPGVGRSGVRRLLGLSPSPSPGVGRSGVRRLPGLSPSPSPGSGEAEFAVFRDLARVRALGSGGAEFAVFRDLARVRALGSGGAEFAVFRDLARVRALGRAERSSPSSET

SEQ ID NO: 55150 - protein, 175 aa, Zea mays
  Coding DNA Sequence Number=SeqID_13371
MARYPARNVVGSACVSSTRIVHALNVKMRIKLLATDVPASATKLHSTYAPIAQRSSHPSLGFSTPLAHASIATPARVAHRRGASATMAVIRQPDGGCTQHQCISCYAKHHPGKGASKRSQVARSSLTQATFRHASAPPLGQHSLSDLDLQASGSAAPEDSHPLPINCPHLQSTCL

SEQ ID NO: 55151 - protein, 587 aa, Zea mays
  Coding DNA Sequence Number=SeqID_13372
  Homolog annotation: Hit_ID=Q69P98; Match level="QueryCoverage=98%, HitCoverage=56%, E-value=1e-98, Identity=42%"; Hit description =Putative SNM1
  Pfam annotation: Domain name=SAM_1; Domain location=490-553; Score =68.4; E_value=2.2e-17; Accession=PF00536.20; Description=SAM domain (Sterile alpha motif)
  Pfam annotation: Domain name=SAM_2; Domain location=489-555; Score =52.8; E_value=1.2e-12; Accession=PF07647.7; Description=SAM domain (Sterile alpha motif)
  Pfam module annotation: Pfam domain module=SAM_1::SAM_2; Domain location=490-553::489-555
MPANGKLSAKPSPSPMVAPASRPKFTAVTFLGDCDDDDDFQPPRPRPLKPCIGAAALRFRKKLKAPSSGKENSSAAGGAVTVVGVASTAVKDAETLAAGSRVSGDVPKTKRRKTGESCGLSRYGSDSTKLSCKPKIELDRYGYGKGCCSFLPSAIDSTVLALGAVCDFGVRRCDEAQIAVSRHCTSVLEAGHATEELTPTGSGCDPPKTEKKPGSSEAVEGHHDSRLIEPRLVESDANLEFVTGILGSLTDKQDTKKANGVVFGCGVGFQNGNYHLDSLQPELLTSNSKYDSRVCVSNEIQEPGLGACNLISQERKVAAGHSACATPENVTAENKSSAPEACKGQCHSDSSASKLPESHMIHDFEVDGCDNFEIGTQLSELINLCMKDSIEGQSNFGAAPMEQNTLDSKRLSSDYEAKCPLCGSDISDLSEELRQLHTNNCLDEPAKGKHGVVVRAVSLVPSVVGLKQSLRICGRKESSPNHKKEPSVGQNVETGRVVEWLRNLGLSKYEEVFIREEVDWETLQWLTEEDLLGIGISSLGPRKKIIHALGELLKKHDDPSEMEAVLNSGNTKKTKLPMNGCISLLER

SEQ ID NO: 55152 - protein, 296 aa, Zea mays
  Coding DNA Sequence Number=SeqID_13373
  Gene Ontology: Mol. function=ATP binding; Cellular component =chloroplast; Biological process=protein folding
  Homolog annotation: Hit_ID=Q69QD5; Match level="QueryCoverage=60%, HitCoverage=78%, E-value=6e-74, Identity=65%"; Hit description =Putative chaperonin 21
  Pfam annotation: Domain name=Cpn10; Domain location=169-258; Score =89.0; E_value=1.4e-23; Accession=PF00166.12; Description=Chaperonin 10 Kd subunit
  Pfam annotation: Domain name=Cpn10; Domain location=71-162; Score =131.9; E_value=1.7e-36; Accession=PF00166.12; Description=Chaperonin 10 Kd subunit
  Pfam module annotation: Pfam domain module=Cpn10::Cpn10; Domain location=169-258::71-162
  Subcellular localization annotation: CTP_CleavageSite=43; ConfidenceScore=5.61e-01
MASVQLSGPRVVAAAKPAALGGLLLTPSLAVPKGRRARGLVVRAATVVSPKTCRARLVAAVRFCGCWAYTSIKPLGDRVLVKIKTSEAKSDGGILLPVSVQTRPQGGEIVAVGEGRSFGSNRIEISVPVGAQVVYSKYAGTELKFNDADHLILKEDDIIGILDSDDVKDMKPLNDRILIKVAEAEERTAGGLLLTQATKEKPSVGSVVAVGPGPLGEDGSRNPLSITPGSNVMYSKYAGSEFKGEDGELTSVQLVGELTSTSGSAVLPDVSVVRQGWPTASILLIASRLPFEFFMD

SEQ ID NO: 55153 - protein, 432 aa, Zea mays
  Coding DNA Sequence Number=SeqID_13374
  Gene Ontology: Mol. function=transferase activity; Cellular component= cytoplasm; Biological process=phosphatidylethanolamine biosynthetic process
  Homolog annotation: Hit_ID=Q69QD7; Match level="QueryCoverage=76%, HitCoverage=87%, E-value=1e-157, Identity=81%"; Hit description =Putative ethanolamine kinase 1
  Pfam annotation: Domain name=APH; Domain location=119-351; Score =69.4; E_value=1.2e-17; Accession=PF01636.13; Description =Phosphotransferase enzyme family
  Pfam annotation: Domain name=Choline_kinase; Domain location=142-343; Score=266.1; E_value=6.8e-77; Accession=PF01633.10; Description =Cholineethanolamine kinase
  Pfam module annotation: Pfam domain module=APH::Choline_kinase; Domain location=119-351::142-343
  Subcellular localization annotation: CTP_CleavageSite=77; ConfidenceScore=5.04e-01
MAAGSGYGGGVEAKATTTAVSAAAPAEVPTSAASVDISLPLLKMSPRIMQVPRPHIYLRSSCFGSRSRSRLRPAWSRCEVVSCSGTRDREASYPCSGTSRALCKELVEGWSSIDSSLFSIETVSGGITNLLLKVSVKEDNGNESSVTVRLYGPNTDLVIDRKRELQAIPYLSAAGFGARLLGIFENGVVQSFIYARTLSPADMKEPKIAAEIAKELRKFHQVDIPGSKEPQLWNDIFKFLKKAAALKFEDNMKQKRYEKISFREIQDEVQELKDLLDILRAPVVYAHNDLLSGNLMLNDLEGKLYFIDFEYGSYSYRGYDIANHFNEYAGFDCDYNLYPDKDAQYHFFRNYLHTDRPSEVDAQDMEVLYVETNTFRLASHIYWALWALIQAKVSPIDFDYLGYFFLRYGEYKKQRESCFSLAQSFLSELKNG

SEQ ID NO: 55154 - protein, 176 aa, Zea mays
  Coding DNA Sequence Number=SeqID_13375
MYMHINDNDGYSSKKKDLALKANQEKKGKAKVLVEEESSSDDGLDANIALMPKKNKFNGKKDDESEDEKKEKKFFKKKDGKQKRFHKRKGGKSYIVGDGLTDIASTSGSSSSEEDDEKVVAVAVAVDFSSPPASPSSTTHLCLMDKGERKVQNDVTNEVECGSDSDDEYASLPMMS

SEQ ID NO: 55155 - protein, 43 aa, Zea mays
  Coding DNA Sequence Number=SeqID_13376
MGKTLSTKVLNKTYSTKEKTLKGMLVSKGIQVLLVRLSKVTYI

SEQ ID NO: 55156 - protein, 107 aa, Zea mays
  Coding DNA Sequence Number=SeqID_13377
MPTLRDKLVRSPTFVVDLRGWDAGAFVRELESEAVKIVGKYASKTEMLRSWDIRGGGVGDDRGKQVKPQADKGSSKEKAPVATARKRKLGMGDVETGSRATGVLLRS

SEQ ID NO: 55157 - protein, 87 aa, Zea mays
  Coding DNA Sequence Number=SeqID_13378
MMDSLPIYRDGSQVLRVSRYLRGAANALSHEGCRHFEVFDRANEDFNCGLFQIEDDVLKHFAGALYDRMWGPHGRNIVQERADQALA

SEQ ID NO: 55158 - protein, 133 aa, Zea mays
  Coding DNA Sequence Number=SeqID_13379
MSDLWSSQNVSDAATSAVEDWDSGNCLLSFRVAVKPHRTVECFIATMISALAPRCWVGSGLVLALACRREALRRGVAGASSLSGEGNGRMGLGLKRPGHRPGEEGLVTIDSVMDGLDFIVDTPSSHKDLAVAG

SEQ ID NO: 55159 - protein, 104 aa, Zea mays
  Coding DNA Sequence Number=SeqID_13380
MDFKSEASKGYTFDNLILLKASHRPWGRRGPTTHTGGFQGKRQELRSPLRHSELALLPLPFSGSGKLQYDFFYLLLSFRKEANNGNAFINLTTTEGAKGAYHMH

SEQ ID NO: 55160 - protein, 79 aa, Zea mays
  Coding DNA Sequence Number=SeqID_13381
MTPKKLRPRASRRFATAFTRAQWQRKDHRKGAALAMPPDGRGLSPGTSKSRRSCKLFNHATSYVVHVDDVTIYHLASRY

SEQ ID NO: 55161 - protein, 435 aa, Zea mays
  Coding DNA Sequence Number=SeqID_13382
  Gene Ontology: Mol. function=nucleic acid binding; Biological process= metabolic process
  Homolog annotation: Hit_ID=Q2QXN6; Match level="QueryCoverage=98%, HitCoverage=94%, E-value=0.0, Identity=72%"; Hit description =Calmodulin-binding family protein, putative, expressed
  Pfam annotation: Domain name=IQ; Domain location=23-43; Score=19.3; E_ value=0.014; Accession=PF00612.17; Description=IQ calmodulin-binding motif
MEVEAAGPDRPEPPSPAKGTGENGAATTLQKVYRSYRTRRKLADSAVVVEELWWQALDYVRLEHSTVSFFDEPKPETAASRWNRVSLNASKVGQGLSRDGKALKLAFQHWIEAIDPRHRYGHNLHFYYDEWCQSQAGQPFFYWLDVGEGKDLDLPECPRALLKMQCIRYLGPQEREHYEYIIKEGKVIHKQSGEPLDTRGPKGTKWIFVMSTAKKIYAGQKQRGVFQHSSFLAGGATIAAGRFTAENGVIKSIWAYSGHYKPSAENLLNFMNFLEGNGVDLKEVEVRSSTREDYNEDPVPNDSQKFASATMEPTNLPQLVPPLNTTQGNEGDNAPKIKLGQPTKGPCRAKAILERMKSKSGSKSYQLGHRLSLKWSTGAGPRIGCVKDYPMELRMQALEMVDLSPRASTPSASRRLPPCLSPTEIALPTSLLALI

SEQ ID NO: 55162 - protein, 132 aa, Zea mays
  Coding DNA Sequence Number=SeqID_13383
MGKSKKGSGSSHHSGDKRKRELTPPSEDFGDSEYSEEEFSEFEGSPAPVWTYIRAVERAGLEGSDESEYSSDEEDSLDSSEEGSGGDGGDDGDDGGEGDGGSDSGRGGDGGNKGGNGGGSKGSSKGSNKASG

SEQ ID NO: 55163 - protein, 132 aa, Zea mays
  Coding DNA Sequence Number=SeqID_13384
MPTNPARCVDGVDLPESASWENLGRNPISLEHINPLPRPRHPINVERAKKTHWAESSSSSGQERGPATIRTRLHLYPYPVTGPGASLGRLSAGATPNLAWVAIVIGEFLANVCFHRNAALHRGQYSCARNAW

SEQ ID NO: 55164 - protein, 354 aa, Zea mays
  Coding DNA Sequence Number=SeqID_13385
  Homolog annotation: Hit_ID=Q9SJQ8; Match level="QueryCoverage=28%, HitCoverage=41%, E-value=1e-16, Identity=33%"; Hit description =Expressed protein
  Pfam annotation: Domain name=DUF868; Domain location=79-352; Score =64.6; E_value=3.1e-16; Accession=PF05910.3; Description=Plant protein of unknown function (DUF868)
MHRCQSDVKQYIELEVGRVQWRIHRVCQIGGMVSASSLLLPTSVRDLASCVSDGAVRVACTSPASTLTVSSSSSTTSSPPPATLSVAISYRATPQAPSSPPLLLRLTWSHSRHGPPTLSFAGPTASSPAVLLRRRRGTYCLPSSTSTSTHIPPLALFWDLTAARYSPASSPSPEPASGFYVVAVASAEVVLAVGDLAAEFIKAKFEGQIPWARSILPVSRTDRVVAAAPRPGGAVHTARVRFGEGAPEHEVAVGCCRAGAGRPGEEELWVSVDGKRAVHARRLRWNFRGNQTVFVDGAPVDVLWDLHGWWFQDPPGCAVVMLRARSALESRLWLEEEARAPGFALLVQALRTPP

SEQ ID NO: 55165 - protein, 64 aa, Zea mays
  Coding DNA Sequence Number=SeqID_13386
MADKCSAAFTVHEHVASRLNYAACKTYCNAALLGCCPALRAVSENPVSFEMEPVKIIIFADDNS

SEQ ID NO: 55166 - protein, 159 aa, Zea mays
  Coding DNA Sequence Number=SeqID_13387
  Subcellular localization annotation: CTP_CleavageSite=41; ConfidenceScore=5.31e-01
MRLRPCYVGHLTSALGQSSIVVWSTITVAGYTWTTGRRLTRCAVRRMVSRVQSGVAHGLNLRYYPCRPTDRTGCVVFSPIGEDNPRLTSIVNLAAVLNTKLDDALDELSRARAEIAQLQAERAERCQSVTMRMALPPTSRLSTRTARLMPRTTLTTGPR

SEQ ID NO: 55167 - protein, 130 aa, Zea mays
  Coding DNA Sequence Number=SeqID_13388
MFSESDKKEDDGEQIAPVMSSFFDTFKEEAENDIAGTTLVPKDPMPPDEEESGPNSSEFECTIAAVTPSVVIATEDKGSSKPALAEEKGKGLAKLREAKKLSKMTHRLVKGPSTKSWVAEDIGFTMPQGK

SEQ ID NO: 55168 - protein, 186 aa, Zea mays
  Coding DNA Sequence Number=SeqID_13389
MPQRDVEDVLCCRSSVQREFFFDFDLEGLMRWVLGETRAFKGVLSAREVYCAWKSARSTALVLLKAGCKHVKACIDPNFNVSANLYKDLEEGGKELSIEESIKNREKARQASEKDVDIWKRLQSKKTKVSTSQVVIEVKHTEAEAKDAIAEVEAISVRAIKKAKDDAILKICEQIYDEAMRSDPGN

SEQ ID NO: 55169 - protein, 172 aa, Zea mays
  Coding DNA Sequence Number=SeqID_13390
  Subcellular localization annotation: CTP_CleavageSite=35; ConfidenceScore=5.27e-01
MVPLLLRLRLPLLTRSPVHLTAHAAVFGSSSPDLPAQLPASSLPLSMPRALPARRVAPQLSGVPSSPYARYKFPSPIAARRARCFLELGRDLAVVHQLQRTAELPCLPWPSVQLPCSLISARRTRLSPSSPKSDSVSLSSIPVVKLSGSPAFHPCAHVPAELGPVHLAALGL

SEQ ID NO: 55170 - protein, 44 aa, Zea mays
  Coding DNA Sequence Number=SeqID_13391
MELQRDGARRSRGSRSGQGVTQGEEAEELEWERLGVRREQIGER

SEQ ID NO: 55171 - protein, 172 aa, Zea mays
  Coding DNA Sequence Number=SeqID_13392
  Subcellular localization annotation: CTP_CleavageSite=35; ConfidenceScore=5.27e-01
MVPLLLRLRLPLLTRSPVHLTAHAAVFGSSSPDLPAQLPASSLPLSMPRALPARRVAPQLSGVPSSPYARYKFPSPIVARRARCFLELGRDLAVVHQLQRTAELPCLPWPSVQLPCSLISARRTRLSPSSPKSDSVSLSSIPVVKLSGSPAFHPCAHVPAELGPVHLAALGL

SEQ ID NO: 55172 - protein, 576 aa, Zea mays
  Coding DNA Sequence Number=SeqID_13393
  Gene Ontology: Mol. function=protein serine/threonine kinase activity; Cellular component=nucleus; Biological process=protein amino acid phosphorylation
  Homolog annotation: Hit_ID=Q69L76; Match level="QueryCoverage=49%, HitCoverage=43%, E-value=1e-147, Identity=87%"; Hit description =Cyclin G-associated kinase-like protein
  Pfam annotation: Domain name=Pkinase; Domain location=309-575; Score =131.9; E_value=1.7e-36; Accession=PF00069.15; Description=Protein kinase domain
  Pfam annotation: Domain name=Pkinase_Tyr; Domain location=309-575; Score=-31.4; E_value=1.5e-10; Accession=PF07714.7; Description =Protein tyrosine kinase
  Pfam module annotation: Pfam domain module=Pkinase::Pkinase_Tyr; Domain location=309-575::309-575
  Subcellular localization annotation: CTP_CleavageSite=38; ConfidenceScore=5.10e-01
MAQGHISLSLLPPTSPLGIYRNNGYLMVSCNGGLNQMRAAASRFHLFLLLLRQICDMVTIARRDRTPHLTPPVPEPTEIAGLHLRSSGAPPYRGSTSFSGKEQRALGDWEWLDWLVLEGCDRSRACTFRGDALDFSLIMRASVTIQTTGVVLQSSLISSGGARPKIKGSRLSKQPNLKAAKESRRSSGARAAHPKQAEQSKAGKQPWSSGGGARPCGRRPANAQRVNRTSTRAQQEGRGSHQPGKTAARRKQKPETEKHLENHTQQNKHQHFILCLGIPIIIMWKRNPFGGKAHSGLDGRTIVVRSLKISVRNVIAQGGFSCVYLACDTVHPSKMYALKHIICNDSESLDLVMKEIQVMNLLKGHPNVVTLVAHDVVDMGRTKEALLVMEFCEKSLVSAMESRGSGYYEEKKVLLIFRDVCNAVFAMHGQSLPIAHRDLKAENVLLGSDGAWKICDFGSTSTNHKCFNKPEEMGIEEDVIRKHTTPDYRAPEMWDLYRREVISEKVDIWALGCLLYRICYFKSAFDGESKLQVLNGNYHIPEQPKYSIAVTGLIKDMLEASPNARPDITQARALID

SEQ ID NO: 55173 - protein, 103 aa, Zea mays
  Coding DNA Sequence Number=SeqID_13394
MGVILLKLTPMGCDPAPSFVRIFDEDEEEEEEISLIRKNSGRYRAPTTKRTAGGGAVVWRTGQSGAPPDSPTTVGASSRCSAWCTGQSGATPDSPVNYSGAAS

SEQ ID NO: 55174 - protein, 190 aa, Zea mays
  Coding DNA Sequence Number=SeqID_13395
MASPEPLLAIFTIEIPAKSSWASFSIIHGGDHTVNKEALFPLHSRGSGGCYYMENAMRRGPTSSGGGGDLYYSHLSACSRVYKLSGRGKDPKSLRMIEANANTKWRRKLVKCSPAPPEAVGESAQCRSQKSELRSQNTPDMSGAARGQETSTVNRSKPQRSANVAGTRPLVRCTTGLSGVPIDNNDWNSG

SEQ ID NO: 55175 - protein, 1062 aa, Zea mays
  Coding DNA Sequence Number=SeqID_13396
  Gene Ontology: Mol. function=protein serine/threonine kinase activity; Cellular component=integral to membrane; Biological process=protein amino acid phosphorylation
  Homolog annotation: Hit_ID=Q5Z675; Match level="QueryCoverage=99%, HitCoverage=100%, E-value=0.0, Identity=68%"; Hit description =Putative brassinosteroid insensitive 1 gene
  Pfam annotation: Domain name=LRRNT_2; Domain location=39-80; Score =44.5; E_value=3.6e-10; Accession=PF08263.3; Description=Leucine rich repeat N-terminal domain
  Pfam annotation: Domain name=LRR_1; Domain location=108-130; Score =11.2; E_value=2.3; Accession=PF00560.23; Description=Leucine Rich Repeat
  Pfam annotation: Domain name=LRR_1; Domain location=132-151; Score =0.3; E_value=2.5e+02; Accession=PF00560.23; Description=Leucine Rich Repeat
  Pfam annotation: Domain name=LRR_1; Domain location=158-181; Score =10.3; E_value=3.4; Accession=PF00560.23; Description=Leucine Rich Repeat
  Pfam annotation: Domain name=LRR_1; Domain location=183-206; Score =8.8; E_value=6.4; Accession=PF00560.23; Description=Leucine Rich Repeat
  Pfam annotation: Domain name=LRR_1; Domain location=208-230; Score =11.9; E_value=1.7; Accession=PF00560.23; Description=Leucine Rich Repeat
  Pfam annotation: Domain name=LRR_1; Domain location=232-254; Score =11.5; E_value=2; Accession=PF00560.23; Description=Leucine Rich Repeat
  Pfam annotation: Domain name=LRR_1; Domain location=256-279; Score =11.7; E_value=1.9; Accession=PF00560.23; Description=Leucine Rich Repeat
  Pfam annotation: Domain name=LRR_1; Domain location=281-303; Score =13.5; E_value=0.78; Accession=PF00560.23; Description=Leucine Rich Repeat
  Pfam annotation: Domain name=LRR_1; Domain location=305-327; Score =15.9; E_value=0.14; Accession=PF00560.23; Description=Leucine Rich Repeat
  Pfam annotation: Domain name=LRR_1; Domain location=329-352; Score =9.1; E_value=5.7; Accession=PF00560.23; Description=Leucine Rich Repeat
  Pfam annotation: Domain name=LRR_1; Domain location=353-375; Score =3.2; E_value=72; Accession=PF00560.23; Description=Leucine Rich Repeat
  Pfam annotation: Domain name=LRR_1; Domain location=377-399; Score =7.2; E_value=13; Accession=PF00560.23; Description=Leucine Rich Repeat
  Pfam annotation: Domain name=LRR_1; Domain location=401-422; Score =10.2; E_value=3.5; Accession=PF00560.23; Description=Leucine Rich Repeat
  Pfam annotation: Domain name=LRR_1; Domain location=453-475; Score =12.0; E_value=1.6; Accession=PF00560.23; Description=Leucine Rich Repeat
  Pfam annotation: Domain name=LRR_1; Domain location=477-499; Score =20.1; E_value=0.0079; Accession=PF00560.23; Description=Leucine Rich Repeat
  Pfam annotation: Domain name=LRR_1; Domain location=501-523; Score =11.2; E_value=2.2; Accession=PF00560.23; Description=Leucine Rich Repeat
  Pfam annotation: Domain name=LRR_1; Domain location=558-580; Score =8.4; E_value=7.8; Accession=PF00560.23; Description=Leucine Rich Repeat
  Pfam annotation: Domain name=LRR_1; Domain location=582-604; Score =8.3; E_value=8; Accession=PF00560.23; Description=Leucine Rich Repeat
  Pfam annotation: Domain name=LRR_1; Domain location=606-628; Score =21.8; E_value=0.0025; Accession=PF00560.23; Description=Leucine Rich Repeat
  Pfam annotation: Domain name=LRR_1; Domain location=630-652; Score =4.9; E_value=35; Accession=PF00560.23; Description=Leucine Rich Repeat
  Pfam annotation: Domain name=LRR_1; Domain location=84-106; Score =2.0; E_value=1.2e+02; Accession=PF00560.23; Description=Leucine Rich Repeat
  Pfam annotation: Domain name=Pkinase; Domain location=780-1049; Score= 128.4; E_value=2.1e-35; Accession=PF00069.15; Description=Protein kinase domain
  Pfam annotation: Domain name=Pkinase_Tyr; Domain location=780-1049; Score=82.9; E_value=9.7e-22; Accession=PF07714.7; Description =Protein tyrosine kinase
  Pfam module annotation: Pfam domain module=LRRNT_2::LRR_1::LRR_1::LRR_ 1::LRR_1::LRR_1::LRR_1::LRR_1::LRR_1::LRR_1::LRR_1::LRR_1::LRR_1: LRR_ 1::LRR_1::LRR_1::LRR_1::LRR_1::LRR_1::LRR_1::LRR_1::LRR
  Pfam module annotation: Pfam domain module=Pkinase_Tyr; Domain location=39-80::108-130::132-151::158-181::183-206::208-230::232 -254::256-279::281-303::305-327::329-352::353-375::377-399::401 -422::453-475::477-499::...
  Pfam module annotation: Domain location=501-523::558-580::582 -604::606-628::630-652::84-106::780-1049::780-1049
  Subcellular localization annotation: CTP_CleavageSite=30; ConfidenceScore=5.18e-01
MQSLNWLCSSSSTTRLHVPSFGIALVVLLSCVSVASSCTDQERSSLIDFRDGLSPDGNGGLHMLWANSTDCCQWEGITCSNDGAVTEVLLPSRGLEGRIPPSLGNLTGLQRLNLSCNSLYGNLPPELVFSSSSSILDVSFNHLSGPLQERQSPISGLPLKVLNISSNFFTGQLSSTALQVMNNLVALNASNNSFAGPLPSSICIHAPSLVTLDLCLNDFSGTISPEFGNCSKLTVLKAGHNNLTGGLPHELFNATSLEHLSFPNNNLQGALDGSSLVKLRNLIFLDLGSNGLEGNMPDSIGQLGRLEELHLDNNLIVGELPSALSNCRSLKYITLRNNSFMGDLSRINFTQMDLTTADFSLNKFNGTIPENIYACSNLIALRLAYNNFHGQFSPRIANLRSLSFLSVTNNSFTNITGALQNLNRCKNLTSLLIGTNFKGETIPQYAAIDGFENLRVLTIDACPLVGEIPIWLSKLTRLEILDLSYNHLTGTIPSWINRLELLFFLDISSNRLTGDIPPELMEMPMLQSEKNSAKLDPKFLELPVFWTQSRQYRLLNAFPNVLNLCNNSLTGIIPQGIGQLKVLNVLNFSTNSLSGEIPQQICNLTNLQTLDVSNNQLTGELPSALSNLHFLSWFNVSNNDLEGPVPSGGQFNTFTNSSYIGNPKLCGPMLSVHCGSVEEPRASMKMRHKKTILALALSVFFGGLAILFLLGRLILSIRSTESADRNKSSNNRDIEATSFNSASEHVRDMIKGSTLVMVPRGKGESNNLTFNDILKATNNFDQQNIIGCGGNGLVYKAELPCGSKLAIKKLNGEMCLMEREFTAEVEALSMAQHENLVPLWGYCIQGNSRLLIYSFMENGSLDDWLHNTDNANSFLDWPTRLKIAQGAGRGLSYIHNTCNPNIVHRDVKSSNILLDREFNAYVADFGLARLILPYNTHVTTELVGTLGYIPPEYGQAWVATLRGDIYSFGVVLLELLTGKRPVQVLTKSKELVQWVREMRSQGKDIEVLDPALRGRGHDEQMLNVLEVAYKCINHNPGLRPTIQEVVYCLETIVEPQQVQVQL

SEQ ID NO: 55176 - protein, 348 aa, Zea mays
  Coding DNA Sequence Number=SeqID_13397
  Gene Ontology: Mol. function=nucleic acid binding; Cellular component= intracellular; Biological process=DNA integration
  Homolog annotation: Hit_ID=Q7XBC6; Match level="QueryCoverage=96%, HitCoverage=18%, E-value=1e-113, Identity=64%"; Hit description =Putative copia-type pol polyprotein
  Pfam annotation: Domain name=zf-CCHC; Domain location=143-160; Score =30.3; E_value=6.6e-06; Accession=PF00098.13; Description=Zinc knuckle
MYNRLKTLVNQVRNLGSTKWDDHEMVKVILRSLVFLNPTQVQLIRGNPRYTLMSPEEVIGNFVSFELMIKGSKKIIELDGPSAPEAQPVAFKATEEKKEESTSSRPPIDASKLDNEEMALIIKSFRQILKQRRGKDYKPRSKKVCYKCGKPGHFIAKCPLSSDSDKGDDKKGKRREKKKYYKKRGGDAHVCREWDSNESSSDSSSDEDAANIIVTKGLLFPNVGHKCLMAKDGKRKKVKSRSSTKYASSSDEDNSSENEEDNLHTLFANLNMQQKEKLNELISAIDEKDELLDTQEDFLIKENKKHVKVKNAYALEVEKCEKLSSELSTCHDTMSTLEMRMLIMLRWI

SEQ ID NO: 55177 - protein, 57 aa, Zea mays
  Coding DNA Sequence Number=SeqID_13398
MAEGGGGVGDRQPDARVEAMGTTVEVVGRFPDAVGMVGARLMLWGDLNCKSLKNGKP

SEQ ID NO: 55178 - protein, 109 aa, Zea mays
  Coding DNA Sequence Number=SeqID_13399
MGYPKLELGLCAMSKDDLADSLAYNSLKGDREMADEAIRKNEKESHDAQEEAKRVEEVAEGARLIGHIVAEAEDALLAADHDLGEAPVVGVVVAKPRKLESDLLKQQNP

SEQ ID NO: 55179 - protein, 65 aa, Zea mays
  Coding DNA Sequence Number=SeqID_13400
MKHASFLQILVGAPMQRVAHTREKLLVRCGAQGWLSRAKVKVMWVRADVKDEHWDLIEGSESMGD

SEQ ID NO: 55180 - protein, 63 aa, Zea mays
  Coding DNA Sequence Number=SeqID_13401
VSPSGQIKRRTKNASRSDEGMRDVHAAGALLEKVGKVARRQARKAMARGTLPEARAEASEEEG

SEQ ID NO: 55181 - protein, 95 aa, Zea mays
  Coding DNA Sequence Number=SeqID_13402
  Homolog annotation: Hit_ID=Q7FN01; Match level="QueryCoverage=94%, HitCoverage=30%, E-value=3e-08, Identity=41%"; Hit description=Beta 1,3-glycosyltransferase-like protein II
MRRENRRSNVPASSDVSALLLRCLRPRLGQGPSCHGFPRLSLRHRMVPKVLLVEDKIRNFRCKAIRIKIVEVEMDLSTGQGKSEGYMWGGGETGL

SEQ ID NO: 55182 - protein, 67 aa, Zea mays
  Coding DNA Sequence Number=SeqID_13403
MRGPKRASKMRKLFNLSKDDVHKYVNTYRTFTTKNGKKRKRARITDKKKKIAKESEAAEYQNLLARG

SEQ ID NO: 55183 - protein, 259 aa, Zea mays
  Coding DNA Sequence Number=SeqID_13404
  Subcellular localization annotation: CTP_CleavageSite=54; ConfidenceScore=5.22e-01
MDKLQAGSGGGKARVAAAKQHRSSSAAVPAEMRLEAALTRRWWWPPLRNRATVRTMALPALFVVAAVAAAAAFVLTAGWGSSSSNDMPTSSFFDGRHRAAEGNEWCGRIFSPFTSKQALDQGTRVIEPLPPRRHARLRGAVVAHVYPRSVVTPPQPLPPHRRAHLKGSLPRAPQGEAATLVPPRIRRRGCCHLAVMHTSWGRRRVRALGIRYRNRSHLAAVHASGGLVVRWPQGSVSMSVSPGSTVARLLLESAAVRAS

SEQ ID NO: 55184 - protein, 116 aa, Zea mays
  Coding DNA Sequence Number=SeqID_13405
  Subcellular localization annotation: CTP_CleavageSite=96; ConfidenceScore=5.66e-01
ENNAARPSPTVVPPARVRLTTAKSSLRRNRKLRLARPWASASGGGLRLARPQGSAPASASGGGLRLARPQGSASTSTSGGITSSPDPDLGLRRSLRLARPWAQTDRVAGDTSLPYP

SEQ ID NO: 55185 - protein, 160 aa, Zea mays
  Coding DNA Sequence Number=SeqID_13406
  Subcellular localization annotation: CTP_CleavageSite=43; ConfidenceScore=5.34e-01
MAPNVFNTGSPANLAAVTSPVPAAVTNARPIHAAQRIQPQIPRAAAPFTGEVASHVGRRGAPASAPRHLTQVRSLSMPPCLLHLSTSLISPATRSTAPPSFPYSLAVPFYKDLRRHPGIVLRDQPHVARCAPLLCLWASTFASPCPASRSSMRKERNMGT

SEQ ID NO: 55186 - protein, 374 aa, Zea mays
  Coding DNA Sequence Number=SeqID_13407
  Homolog annotation: Hit_ID=Q1SMS1; Match level="QueryCoverage=37%, HitCoverage=64%, E-value=6e-24, Identity=48%"; Hit description=WD40 -like
  Pfam annotation: Domain name=WD40; Domain location=232-271; Score =13.7; E_value=0.65; Accession=PF00400.22; Description=WD domain, G -beta repeat
  Pfam annotation: Domain name=WD40; Domain location=285-323; Score =13.9; E_value=0.58; Accession=PF00400.22; Description=WD domain, G -beta repeat
  Pfam module annotation: Pfam domain module=WD40::WD40; Domain location=232-271::285-323
MGDPPTLKRPKLEKADDDSTYCPRPSSNGAAPVRTPGATAAIGAAPGDDVEEEDDIAEEAVIALIAHRERDVERCKLKLLHYQSLLDTAEMKLEEAHSRLARFRDRKPPPTRSEPKPPTPPIQREHKPSPPPIQRDLKPSPQPLIQKAPSPAPQPSARPQLVIPGTSNRPTPRPEPMPGLKRAAAPSSSSSPAPPERSRKEEKKPKIKMEQKEHQNLIPSVGKSSATVLRFQGGNLVSSQHRRKLRCLELCPANDQLVVTSALDGLVTLWQVETRGLRQSEVHAFGWKQESSESQSALINQSWSPDGWYMSSGSADPVIHIFDIRHHGQNPCQSVQAHQKRDFASIEDTANSACFRWTCFTIDFLCGRTMQLSS

SEQ ID NO: 55187 - protein, 611 aa, Zea mays
  Coding DNA Sequence Number=SeqID_13408
MGVLRRAVPVPCPPRRGRLRYTRPARGAPLELEKRAGRWTPTDFAFLSSAVVQYQDQPLSGRLSSSTGRHIVHALAHRIASAAAFVHQATIPFPSAAQMPSCPAPAPAVATFLLVALLSCGTRAIRTHGGYVSAVGDPGMRRDGLRVAWEAWKLLQRGRQEAPRHGQPPAETSSDEEGRPVYSVAHLVSDADNRLGAGDPFPGSPPGAARVTDADLYAPAKELYLGDRCQVADTPAPWQFWMVMLKNGNLDTTAAACPENGRPARPFPQTSRFPCPAGAGCMNQPLLFHNRTALDDAGRRLRGGLFGTYDLDAAAGLGAGDVSFYSVTWEKDVAASGRGGGWAFHHKLCTSTKYPWLMLYLRSDATRGFSGGYHYDTRGMTKTVPESPDFKVRLTLDVKQGGGRNSQFYLMDMGSCWKNDGRACDGDTATDVTRYSEMIINPATPAWCSPSRIDQCPPWHTFRNGSRVHRRDGARFPYGAYHVYCSPGNAARAEQPTTYCDAYSNPQAQEILQLLPHPVWGEFGYPTARGQGWVGDPRAWDLDVGAMSQALYFYQDPGTPPARRRWTSLDVGTEIYVSDRAEEAEWTLSGFDILVPDKCIKSQQRASNSCW

SEQ ID NO: 55188 - protein, 181 aa, Zea mays
  Coding DNA Sequence Number=SeqID_13409
MAPRTLPDDGSSPPPYGSKRTKDQGPLREGWPRGDEDETGAHLKPLAPSPAWTLVIPYCKRTRPGCGTNTKAVGFPPLSRLSPATSLPPFALGLASTHLGWGTRRHSLVGLGTPRSRNADTTDSKGHRTRDKMDHLVKYHKAETITDCEVHMCLKMDGEGYAVFELVLEHNHHLHLARPHT

SEQ ID NO: 55189 - protein, 109 aa, Zea mays
  Coding DNA Sequence Number=SeqID_13410
  Homolog annotation: Hit_ID=Q10AI2; Match level="QueryCoverage=44%, HitCoverage=25%, E-value=6e-11, Identity=65%"; Hit description=SnRK1- interacting protein 1, putative, expressed
MARSWPKIADGYESNGPRILRSRMGSTVCAITTCFSDGVLGTVLGACLLSPSLELSLLHEKVHREAAGTASLSDERFDDPVSAAEEAAFCKACARFGFGLYLYHEDETP

SEQ ID NO: 55190 - protein, 104 aa, Zea mays
  Coding DNA Sequence Number=SeqID_13411
  Gene Ontology: Mol. function=metal ion transporter activity; Cellular component=membrane; Biological process=metal ion transport
MESESSPVASPFPVPNSSKEHELEMTKNSTSVVPEMTSSNSMPNLDAAKDGNTKVLSFEFRALEVKLLKGGARESPAGGEGDAVPAAQARPADHKAQQEELHRP

SEQ ID NO: 55191 - protein, 1226 aa, Zea mays
  Coding DNA Sequence Number=SeqID_13412
  Gene Ontology: Mol. function=nucleic acid binding; Cellular component= cytosol; Biological process=transcription-coupled nucleotide-excision repair
  Homolog annotation: Hit_ID=Q7F2E4; Match level="QueryCoverage=94%, HitCoverage=99%, E-value=0.0, Identity=75%"; Hit description =Putative DNA repair and recombination protein
  Pfam annotation: Domain name=Helicase_C; Domain location=729-807; Score=90.0; E_value=7.4e-24; Accession=PF00271.21; Description =Helicase conserved C-terminal domain
  Pfam annotation: Domain name=SNF2_N; Domain location=372-676; Score =294.1; E_value=2.6e-85; Accession=PF00176.13; Description=SNF2 family N-terminal domain
  Pfam module annotation: Pfam domain module=Helicase_C::SNF2_N; Domain location=729-807::372-676
MDEEDDDQRLLHSLGVQTEPKRDDEPGAAVDDPSGSSVAPEFDAQANLHQKLRSVQLEIDAVASTIKRAKNASVDGQDKKKQKQANHTSQDEPHGGALQQALATERLKSLKKAKAQIQKEILQSDPYPSGSDNRKDKMLAMLVEEEPRRKKKSLMPARGPKKTSAPRLKTMSYDDDDDFDAVLDGASAGFMETEREELIRKGLLTPFHKLKGFEKRVELPGPSHRQNDPSEQAEEAIEASRIARVAQSMQQIAQSRPTTKLLDPESLPRLDAPTAPFQRLGRPLKRPVPPSSEGRERKRQRNKTKRPLPDKKWRKANSRKESLLETDGEDVGDFATSVSEDDDQAAEGGLSPVILEGGLRIPGTIYEQLFDYQKVGVQWLWELHCQRAGGIIGDEMGLGKTVQVLSFLGSLHNSGIGKGRPVGGIQNSRWKSYMILQMVRVKRARHIVILTAKVSWDSDQEEVRRAKPAKKWDDLISRVVNSGSGLLLTTYEQLRILGEKLLDIEWGYAVLDEGHRIRNPNAEITLVCKQLQTVHRIIMTGAPIQNKLSELWSLFDFVFPGKLGVLPVFETEFSVPITVGGYANATPLQVSTAYRCAIVLRDLIMPYLLRRMKVDVNAQLPKKTEHVLFCSLTAGQRSTYRAFLASSEVEQIFDGNRNSLYGIDVLRKICNHPDLLEREHAAQNPDYGNPERSGKMKVVEQVLKVWKDQGHRVLLFTQTQQMLDILENFLTACDYQYRRMDGLTPAKQRMALIDEFNNTDEIFVFILTTKVGGLGTNLTGANRIIIYDPDWNPSTDMQARERAWRIGQTRDVMVYRLITRGTIEEKVYHRQIYKHFLTNKVLKNPQQRRFFKARDMKDLFTLQDDEGNGSTETSNIFGQLSKDVNVGVPNDGQQHQVHIASALSSTSEAEPSNGGNSKVDDNSDQADEESSILKSLFGAQGIHSAINHDAIMDANDDQKVRLEAEASQVAQRAAEALRQSRMLRSHDSFAVPTWTGRSGAAGAPSSVRRKFGSTVNSQLIPSSQPSETSSSRNRSLPVGALSGKALSSAELLAKIRGTREASASDALEHQLNVGSSSNLVSSPSGNGGRASNPPNRSMIVQPEVLIRQLCTFIQHNGGSATSTSITEHFKSRIQSKDMLLFKNLLKEIATLQRGAEGDLTRRNLRRCVGVVNTRIGIPTCYDLGERIADSLQATKGSAAVGRKLGTDLHLPRAFIADKRVMLAVRI

SEQ ID NO: 55192 - protein, 113 aa, Zea mays
  Coding DNA Sequence Number=SeqID_13413
  Gene Ontology: Mol. function=protein binding; Cellular component =nucleus; Biological process=protein transport
  Homolog annotation: Hit_ID=Q9FTZ4; Match level="QueryCoverage=90%, HitCoverage=54%, E-value=2e-40, Identity=70%"; Hit description =Putative CGI-34 protein
  Pfam annotation: Domain name=Snf7; Domain location=1-89; Score=-27.3; E_value=0.0054; Accession=PF03357.11; Description=Snf7
MAERRGMSGKMNAMKAANKELKGMMKTVKIDEIDNMQDEMTDLMDVSNEIQETLGRSYNIPDDVDEEELMGDSDFDADLNLPAAPSRPAMVPAGGLQEDELGLPAVPRASLRS

SEQ ID NO: 55193 - protein, 200 aa, Zea mays
  Coding DNA Sequence Number=SeqID_13414
  Homolog annotation: Hit_ID=Q9FZ07; Match level="QueryCoverage=23%, HitCoverage=24%, E-value=3e-08, Identity=56%"; Hit description =Patatin-like protein 2
MSGAPEDSNSKLVTFGKFQRRLRYNSPDCPVYTGHVRCSKEESPQELASLGNSFQLLRYNSPDCPVYTGLSSVTAGQRLLLAPTATCVALNARQRAQRSGTPMLAHRTLNSTCPVRHRTSRRAQKSELQRSEPNGFGDMAGAPDCPDLDRLEARLADYFDYIARTGGLVITLLTSPGKDKRPLYVAKNINHLFLHPFTSP

SEQ ID NO: 55194 - protein, 119 aa, Zea mays
  Coding DNA Sequence Number=SeqID_13415
MMHAPDSGSITPEHELALDYSTHHAGEAHHRCPPVKPRMPKCREEQRNEEYERECLTDERGEDKDRWTTQQRSRGNHGINITRLGKEINLDNRFRMAVRTIGMREQQFCCDDPVDTMNG

SEQ ID NO: 55195 - protein, 290 aa, Zea mays
  Coding DNA Sequence Number=SeqID_13416
  Gene Ontology: Mol. function=transferase activity, transferring acyl groups, acyl groups converted into alkyl on transfer; Cellular component=intracellular; Biological process=carboxylic acid metabolic process
  Homolog annotation: Hit_ID=O04973; Match level="QueryCoverage=57%, HitCoverage=28%, E-value=4e-58, Identity=70%"; Hit description=2 -isopropylmalate synthase A
  Pfam annotation: Domain name=HMGL-like; Domain location=3-197; Score =47.7; E_value=3.9e-11; Accession=PF00682.9; Description=HMGL-like
  Subcellular localization annotation: CTP_CleavageSite=39; ConfidenceScore=5.19e-01
MTSKGHAASLLRPLRSRPERRRRPSHLPLSRRTPRWPTRAALLQLCPLVRADVEFRPEDADMSNREFLYHILEEVIKVGATTLNIPDTVEYTLPYEFGKLISDIKENTLRIENAIISTHCQNGLGLATANTLAGAHTGARLLEVTINGIGERAGNASLEEVVMAIKCRQELLDGLYTGINSQHITLTSKMVQEHNGLHVQPHEAIVGANAFAHESGIHQVLTVGDVPIGSVTKVLVVGNINNVIFVSKLTVLEGSFCNLNLRFKGGLPPEAVYNIIIDPKNKRVFMISNI

SEQ ID NO: 55196 - protein, 80 aa, Zea mays
  Coding DNA Sequence Number=SeqID_13417
MEVVEQNLVRKMDSKWKTSVAPNVFMVLKDDIIDHDLMARAEARGDYSRIYTGSARFELRNTLLPVGGIDVDFWSVGIIS

SEQ ID NO: 55197 - protein, 738 aa, Zea mays
  Coding DNA Sequence Number=SeqID_13418
  Gene Ontology: Mol. function=RNA-directed DNA polymerase activity; Cellular component=intracellular; Biological process=RNA-dependent DNA replication
  Homolog annotation: Hit_ID=UPI00004C1731; Match level="QueryCoverage =94%, HitCoverage=52%, E-value=0.0, Identity=84%"; Hit description =UPI00004C1731 related cluster
  Pfam annotation: Domain name=RnaseH; Domain location=312-439; Score =10.8; E_value=5.8e-06; Accession=PF00075.14; Description=RNase H
  Pfam annotation: Domain name=rve; Domain location=452-609; Score =100.0; E_value=7e-27; Accession=PF00665.16; Description=Integrase core domain
  Pfam module annotation: Pfam domain module=RnaseH::rve; Domain location=312-439::452-609
MPFGLRNAGATYQRCMNHVFGEHIGRTVEAYIDDIVVKTRKASDLLSDLETTFRCLKAKGVKLNPEKCVFGAPRGMLLGFIVSERGIKANPENIAAITSMGPIKDLKGVQRVMGCLAALSRFISRLGERGLPLYRLLRKAECFTWTPEAEEALGNLKALLTKAPILVPPAAGEALLVYVAATTQVVSAAIVVERQEEGHALPVQRPVYFVSEVLSETKIRYPQVQKLLYAVILTRWKLRHYFEAHPVTVVSSFPLGEIIQCREASGRIAKWAVEIMGETISFAPRKAIKSQVLADFVAEWVDTQLPTAPIQPELWTMFFDGSLMKTGAGAGLLFISPLGKHLRYVLRLHFPASNNVAEYEALVNGLRIAIELGVRRLDARGDSQLVIDQVMKNSHCRDPKMEAYCDEVRRLEDKFYGLELNHIARRYNETADELAKIASGRTTVPLDVFSRDLHQPSVKIDDTSEPEKAPGGYTHLLVAIDKFSKWIEVRPLNSIRSEQAVAFFTNIIHRFGVPNSIITDNGTQFTGRKFLDFCEDHHIRVDWAAVAHPMTNGQVERANGMILQGLKPRIYNDLNKFGKRWMKELPSVFWSLRTTPSRATGFTPFFLVYGAEAILPTDLEYGSPRTRAYTDQSNQVSRENSLDQLEEARDQALLHSARYQQSLRRYHARGVWSRDLQVGDLVLRLRQDARGRHKLMPPWEGPFVIAKVLKPGTYKLANNQGEVYDNAWNIQQLCRFYP

SEQ ID NO: 55198 - protein, 215 aa, Zea mays
  Coding DNA Sequence Number=SeqID_13419
  Homolog annotation: Hit_ID=Q6Z3S1; Match level="QueryCoverage=22%, HitCoverage=7%, E-value=7e-07, Identity=55%"; Hit description =Putative leucine-rich repeat/receptor protein kinase
MEPTEPRTSIKVAGTKRETEKVVTDNEGARAVGSVGAVVAAIVGTIEVESASAARVYASEKREGRATEGPSRRGVAARGGVEGRWSERHRSEERGTGKVEHASMLEGEERQQVVGGEGGPRPRGWSSLRGKRRRGGDKCWRVGGVGAGREAIVGFWDPRLVLPGCTRTLDLERKVAQARIVVDRGEALVDDQADGERDPQRSRQMKTGEVVNDRV

SEQ ID NO: 55199 - protein, 99 aa, Zea mays
  Coding DNA Sequence Number=SeqID_13420
MEKRANVKEDAHMTGKRRHKSRGGGGNDEVGAPCVLLLRSEGSGEDSRGRDDACSGARGELADGLVHVRHRMEEGAQTRASGGEVQQCLAPAQARTRRE

SEQ ID NO: 55200 - protein, 280 aa, Zea mays
  Coding DNA Sequence Number=SeqID_13421
MNVVVTSHRLVCLYSPTGEEGEPPRRAYRLISGLIELVMKKRPRPNTAKALLLEVFFSAEGPQDEDIVCVSFITFVQRSLYPKGDNASKDEVCIASPSLEVASNVPTPRASSRASPVLGPCHATRWSHATPDPCRAGSARAVPRRGHVTPAAPPEPRRGCSLRVETQYPRSQAFPVVLFRGRSGAWPKFAADGGGMTGSSIKLASCSPASVPEIRCRCKQYPEDKDVRKRTRSRRLAVGESSVWRINRRPHFKGDIGAIDGSHVKVVVSTEEVIKLPLSP

SEQ ID NO: 55201 - protein, 154 aa, Zea mays
  Coding DNA Sequence Number=SeqID_13422
MEDSARWRSREGAALARPWNRKARDMGECRELAMGAVSRGAGSSGDGEGPEERERKGSQEWAPAGSRGSFGLTRGGRSEPENCRAGRSSPWESRAGGWGKLSRRSAVEQRERREKQGAQAAMAGDRVEGGRARQGELRAGARPAPWAGELTVGD

SEQ ID NO: 55202 - protein, 510 aa, Zea mays
  Coding DNA Sequence Number=SeqID_13423
  Homolog annotation: Hit_ID=Q8LQU3; Match level="QueryCoverage=86%, HitCoverage=20%, E-value=1e-154, Identity=63%"; Hit description =Putative RST1
MVCTPPNLPIKLYSLEQNPLSPGKEFGRAGQRLSLSLLESLPSLAIHGFVLPLALQWISPMLKRDSNSVLYAMAVRLLCKIWAVTDWAFPNLQDERHQGKQDPYNMSITSRILKGFTICGTKMNIEFYGSLNPLINKRSSIKKILNVVLDPENFSNFISDREISASIATSIRDVCKQNPDRGVDIILSVSFCIESRDSVVQALGLESLSYLCEADVVDFYTAWKVISKQVLDYYVEPAVAHSLCILLRCGAMDAEAYSVISGNLVRTLWRIGTSKKNNPDPLWDKARGTAFHSLSNYKVSLIQDAIPDFWKLNYEFFTNEHNLAVLKAMEHLQDEIIRYEHICLVSLLTDEPCSHRNRRRVTTDKRTAVHKFEKLLEVFPRAVFKGMLSHHQLPGAALLTLNFTPKDILNEGKPKDLPRVHSAFEQAFVEIAESMYVSRNIVVALLALQSWKSFVSNWMQAVVALLDTKDSSKLNKAMKAANDIFKVYICIFSVFPISFLFVCSTLSDVA

SEQ ID NO: 55203 - protein, 834 aa, Zea mays
  Coding DNA Sequence Number=SeqID_13424
  Homolog annotation: Hit_ID=Q8LQU3; Match level="QueryCoverage=96%, HitCoverage=44%, E-value=0.0, Identity=70%"; Hit description =Putative RST1
MCSLERGDNFLLITGTQVPAHFCSRGSAKVISKTESCLVKGACGLALGYVCHGLLTRAHNAVDSEVEAITQLNERASVEDILHALVTLLIQLCPSSCYSLKKLSIYGISSMGGMEENIHSFSDDPWAVAGLVIGLGNSVVALYRLGAYEAVTEVKDVLISWIPNVDSNSALFDEIDSVSLCMGSCLALPSVVAFCQRVELLNDDLDALFNRYTSLASELLNLNKSGIIFQNLLMAICIGAGSFLSSILNDGVHAMEFNGVKGFLDTLRHIYTHPFPPLVHLGGMFGVVNAFGAGAGDLTGVFSKPMTSQIKHEESSFVSGSLLTSPVGETLSTSMIQEIFLLAKDAKDKHIQDYAAWAISFLRSRWSKNQNQILYEDNGSNRSPDDHDQASSFSEQSLVWNLSLWLSDLKFEKSGDVVPISTVGTVLKCLSKAPRLPTTDWGAIVRRCIKAEAQISHKLTNQEDPKILKEACLYLTLAHAAHISPLLQFLDDLTDILRFQRLDINVQSILLKHLLHLMKLFSDSRLDKLHEDFTEYLYSPTSSYLNYSSEQKSMLRMSFWEGIYTCLVDVSEESGVFSFIEKCIQCLLPLLTLHSDGQPEFMKEWSVAILCLTNAQKKWLDDILQIRSTALVNEGHVDVAKKIILRARLCATGCGSTHELGNIKTAILCTKADGVWWSVLVEITSALNSAENIIKRQWLLDALDIGCVTAHPSTVLCFVGLLCGSCCIYMPLLLVNSINVLSDLPVTLPAFLSTIVSDDFRNSVADRLWLLTTDIYTWAEQLAHGHDQPGHDRIHRSETEIATFLANILLSTCITVEDYLSVDKRLKLANLEAL

SEQ ID NO: 55204 - protein, 146 aa, Zea mays
  Coding DNA Sequence Number=SeqID_13425
MASRAGPPPAVQLISAPPLLLLLAHRQNILQNHVTTTVLAERDGHEKALLEVAIRPSQPALTAKRKTCGVLVMLPYVSPSVSSEPLFAPVEASREVDASEGRCRPADTGVHSARLGHQQQPSLCSLPGSATSRQRAHPRPLPSEVG

SEQ ID NO: 55205 - protein, 129 aa, Zea mays
  Coding DNA Sequence Number=SeqID_13426
MQLSMPPSRLRRRTAAAFVFVALLVLPSMLQAARTTPSDGRHGRVQQQQEEEEVRAAAATTTTSGGGGCAGSTPAPASSSVQERPHPLTLLPPPPPPLTTTTTVEEEASSSSSPRSRMLGSVPSPGVGH

SEQ ID NO: 55206 - protein, 167 aa, Zea mays
  Coding DNA Sequence Number=SeqID_13427
  Homolog annotation: Hit_ID=Q109P8; Match level="QueryCoverage=22%, HitCoverage=13%, E-value=3e-09, Identity=78%"; Hit description =Exonuclease family protein, putative, expressed
  Subcellular localization annotation: CTP_CleavageSite=44; ConfidenceScore=5.34e-01
MTPTSCASATTLPTRTRTPPSRVLYKSGSIIVLSRTDFLRPDMLASLANYFGLGKQRRRSLDDVKMNIDVLKNCATVLFLPHFFVLISFKTDDTRSSGAFSGFVELDDVSTESIKISGPRAIVQHKGSPLQLISPGLEVRWVNTKGSQTAHIDQRIPTFGSGHTAVC

SEQ ID NO: 55207 - protein, 530 aa, Zea mays
  Coding DNA Sequence Number=SeqID_13428
  Homolog annotation: Hit_ID=Q9ZV88; Match level="QueryCoverage=12%, HitCoverage=20%, E-value=2e-16, Identity=59%"; Hit description =BES1/BZR1 homolog protein 4
  Pfam annotation: Domain name=DUF822; Domain location=460-530; Score =85.1; E_value=2.1e-22; Accession=PF05687.4; Description=Plant protein of unknown function (DUF822)
  Subcellular localization annotation: CTP_CleavageSite=32; ConfidenceScore=5.25e-01
MDSALLACSSAAVAMVRLQQTCSRQCASQRTVVERASEGISSLGASGHRKGEPQRMRTTCPPPPPGFRDHVVVAARTQQQWPASLLQCCRGVRLAPCAGWTPAPERRRWDGDGPRRSRACCAVLPLPHSDGHTVAWCGQCHFPAPPAPAPAPHARSRVCPLPAWWWRQSSPTHPPALGAEWSGVPEWVPPTLTREIPSPAAPRCLFRDRGTVRVRARAVRCGAAAAASCLPCPPAETGLYFFIKILYVGGWAPLDVDRAPRARAAETRFVACRCLVGPLFPILPPALGDPTARDPRASLASGGTPAAPLLPRTARPSKRAGSGSRGNTCPSPGVLSSASHTGRRESLSRLTPLLPSPPVPHPPPHPRLPRSPRAACCLSVWSLLAPGFSTRPPQHPHLLRSPAPSLLPSPPLPTQTSARGDPDPVSRTPIPSSPSEPSCERCSRGRPMASGGGGGLGAAGAGGRMPTWRERENNKRRERRRRAIAAKIFAGLRAHGGYKLPKHCDNNEVLKALCNEAGWVVEPDGTTYRQ

SEQ ID NO: 55208 - protein, 141 aa, Zea mays
  Coding DNA Sequence Number=SeqID_13429
  Gene Ontology: Mol. function=protein binding; Cellular component =nucleus; Biological process=regulation of timing of transition from vegetative to reproductive phase
  Homolog annotation: Hit_ID=Q5QN32; Match level="QueryCoverage=50%, HitCoverage=40%, E-value=4e-29, Identity=81%"; Hit description =Putative terminal flower1
  Pfam annotation: Domain name=PBP; Domain location=3-125; Score=-5.3; E_value=0.00012; Accession=PF01161.10; Description=Phosphatidylethano lamine-binding protein
MSSARAPSRRFGSSLRGVKRERNSGRICGREVVGWTWKSWARLTAIAARGWLGTLGLRLLGREVICYESPRPPAGIHRVVFVLYQQTARGAVDQPPLLRHNFCTRSFAVDHGLGAPVAAAFFTCQPEGGTGGRRHVLRQPA

SEQ ID NO: 55209 - protein, 59 aa, Zea mays
  Coding DNA Sequence Number=SeqID_13430
MSGEPNGYEGALAFTRGKYERLEPWVFMGGPSSDLDVSSHGCLREGLATTMGPNIHWGL

SEQ ID NO: 55210 - protein, 185 aa, Zea mays
  Coding DNA Sequence Number=SeqID_13431
  Homolog annotation: Hit_ID=Q01G74; Match level="QueryCoverage=60%, HitCoverage=20%, E-value=7e-18, Identity=43%"; Hit description =Homology to unknown gene
MEDMEFDSLFYSTSWSLMLYLKNLLDIQRSIFGMVKYIHYQGMELKDTPAPLEKFFFAIFIAFFALSVGPGIYLKGCDNILAQLHTAHPEFCDTFGGILAMHIDDLRALAPLWLSKTEEVRQDKSHWSTNITGDIYGMGWISEMYGYSFGAAEVGLRHKINDDIMIYPGYTPRPGIEPLILRLPV

SEQ ID NO: 55211 - protein, 292 aa, Zea mays
  Coding DNA Sequence Number=SeqID_13432
MKVHKKHICGPSYIKEHDMFAVDFFHKITGLTTEFVVVNTPLRVVEVIAYLLAGLPIDYDPFVAYITIKAELLFLDDMFVHLVVYNFNTWPYYRCNTLPLPTSWIMTTPLMVVSLVTMATVDTLMVILAAITLVLNARFVASLATHHHQSPAADARAHSSSFTQTAPAPARPSPCRSAALPEAAVEAAPEPPRPRPPSRPPLPDARAPSRRRGRPRPARGRRRGRPRPALRRRPCPTPARLATPPPRPALRRRPCPTPRAPSRAAAPARAAPPLRHAATRPRAERATPPRPS

SEQ ID NO: 55212 - protein, 484 aa, Zea mays
  Coding DNA Sequence Number=SeqID_13433
  Gene Ontology: Mol. function=GTP binding; Cellular component =intracellular; Biological process=electron transport
  Homolog annotation: Hit_ID=Q69NK1; Match level="QueryCoverage=95%, HitCoverage=79%, E-value=0.0, Identity=73%"; Hit description=GTP -binding protein-like
  Pfam annotation: Domain name=MMR_HSR1; Domain location=230-325; Score= 20.5; E_value=1.3e-05; Accession=PF01926.13; Description=GTPase of unknown function
MQSSDPELPGFFLLPSAKSPNYRARLAPVTADDTRISASLKSGHLREDIQPSGGDKPAAAAAEMAEAKGEGKVLVCARCHSLRHYGRVKHPDAERLLPDFDFVAAVGPRLASPSGARSLVLLLADASDFDGSFPRAVARLVAAAGEAHRADWKHGAPANLPRALLVVTKLDLLPTPSLSPDDVHAWAHSRARAGAGADLRLAGVHLVSATRGWGVRDLLEHVRELAGTRGNVWAVGARNVGKSTLLNAIARCCGIVGRPTLTEAPVPGTTLDVIKLDGVLGAQAKLFDTPGLLHGHQLTSRLTSEEMKLVQTEHSIHIGGLVRLDVEELTVGSIYVTVWASPLVPLHMGKTENTTTLIKEHFGLQLQPPIGQERVKELGKWVRKQFKVSGNSWDTNSKDIAIAGLGWFGIGLKGEAVLGLWTYDGVDVISRSSLVHERASVFEEAGFTVSQIVSKADSMTNKLKSTKKPKKERMKRTSPTEPEA

SEQ ID NO: 55213 - protein, 102 aa, Zea mays
  Coding DNA Sequence Number=SeqID_13434
MESSRLTYPDRFYAVAAYAPHKDEAIVGSPSPSFLWDEPFPSSVTATAAAAGGMGQLLLMCSFGGRIIPCSTVSTDKDHDNLVDEYDYIVVTSYDGGSSRTS

SEQ ID NO: 55214 - protein, 50 aa, Zea mays
  Coding DNA Sequence Number=SeqID_13435
AAGRTKVAGNPDNYAWLEAINTPVNINMHTGMNFRHDVKMNRSIKQQLET

SEQ ID NO: 55215 - protein, 115 aa, Zea mays
  Coding DNA Sequence Number=SeqID_13436
MPCRGACLQAAADALLASLSFFYLSVGGPPAEFSSNRLRTKSQLLGWYYLRCKQVGWQQRSPSKGRQMGKEALQSGPPRLPRFVRSGVPLFPNFVGTSVWAAHFAGHIDNSRIRP

SEQ ID NO: 55216 - protein, 76 aa, Zea mays
  Coding DNA Sequence Number=SeqID_13437
MDGGLISFIPRGSYGKLPGRKGIGEFWPLDFARTAQIRFHPRRTGGKARDISLFRVGGIVHDITETKKQNLAGGDK

SEQ ID NO: 55217 - protein, 53 aa, Zea mays
  Coding DNA Sequence Number=SeqID_13438
MNVCELTLAVSHPPQVKNRYRRMRRMEDIAMHPCFLRDAHDGAPAWRWCDSPE

SEQ ID NO: 55218 - protein, 669 aa, Zea mays
  Coding DNA Sequence Number=SeqID_13439
  Homolog annotation: Hit_ID=Q74P70; Match level="QueryCoverage=100%, HitCoverage=50%, E-value=0.0, Identity=85%"; Hit description =Membrane protein, putative
MAGIVKGIRDDHRSNKEKTKARKEGEEDKKEDADNPKNALGANLGTDVGTTSRAARMLKVGQIGSMVGKATGGLAGLAMGAGLGPEGMAVGTFAGSKAGGVPGAVTGRTLAAGLEGVTSAGKHIGSSVKKGLDTYKGLNGEQYPELTDEDIAQDLATKDFENWKADNPDSAVASRLKQAFPGASDAEIAKKVAKTNSDQMSHFKNQRKQDLQNMKKNATPYGNARDLVNAATNAFQKGYEADHKDAFMSQLPENMSAEEKEKKWNDHLNSKVQGFRNHAEQAAIKAGAMPVDAKDKQGNNLFDKSYVNKDAFASQLALGKVGKAVEGVKGETLESGHQNMGQVDSLVGASTAAFKKAYTADHKAGFMKQFPADVPQQEKEAAWNKHLSQKVQGFKNHAQKAAEQAGIVQQKDGTSYANKEAFASQLSQQLQNNPNINAMGVSSVSGIQKAVNGVKTHSLANGYGNQKQKGVSNVGNLVQASTESFKQGYAAENKANFMKNLSPTMSQAQKVEAWQSHLNDKGNEFKAVAQQAAVQAGAMPVQAKDTSGKSLHNQSYVNKDAFASQLTKGLQSHASLGTVSQQVGSGITSAIQGVRSHGVATGGAINKAVFAATQTQASMARAGNLSVSEIERSYADASASIANISQSAGKMTIPTSAVGRMTQQSKMVG

SEQ ID NO: 55219 - protein, 47 aa, Zea mays
  Coding DNA Sequence Number=SeqID_13440
MPPFKGPRISSQDVEQPVVHDCVAEDLPEQQPGEGKCPLTYYVLYTL

SEQ ID NO: 55220 - protein, 105 aa, Zea mays
  Coding DNA Sequence Number=SeqID_13441
  Subcellular localization annotation: CTP_CleavageSite=81; ConfidenceScore=5.63e-01
MARAVASLLRARPHHACVLEAASYSHSSSSTACSQARAASSSASFSRSAHVAPVPRRLAMPTTPAPVPHIGTHTASCPPPRPDTAAPSLQCVRCEQRAKKGDIVE

SEQ ID NO: 55221 - protein, 247 aa, Zea mays
  Coding DNA Sequence Number=SeqID_13442
  Gene Ontology: Mol. function=centromeric DNA binding; Cellular component=chromosome, pericentric region; Biological process=mitosis
  Homolog annotation: Hit_ID=O48626; Match level="QueryCoverage=87%, HitCoverage=25%, E-value=2e-50, Identity=47%"; Hit description =Centromere/kinetochore protein zw10 homolog
MKRDFYKDASLSSARVAKEFCFAARDVLLLYRAIVPVQLEKQFDSLSQVAAIVHNDFYHLSQEILGLAFQICHMYKLFILYLPYFFVYAADLSVRSIFFVTYRADFPSDLQKQVVFVDLAPIFSLMANAILRRQIQLTVDTISEAIDGAEGFQNTHQPQHYESAKFSIEQVVFILEKIRIMWESILPRSIYRKSMCNVLGSVFSRITRDMLLIDDMAAEETLQVIHVMPYWFEVIHIMPYWFEVIKS

SEQ ID NO: 55222 - protein, 285 aa, Zea mays
  Coding DNA Sequence Number=SeqID_13443
MIEDMGLEAFPIDEEEHEKLSTLFDIPLKEIQEAAEDTWGAIAETIDGISPKHKEKISILLDCYPVRGKQQMKTVAIFDALEPKGIVTIQQFNNELSRGETAVTFKDFYLALKEVMEQGTQDNTHYSSGVLPKGCVKHEVLSKSGDKQAVWIEAPKAQWDIQFFERPFQQVGFPRLLFRYTVYQKRVTNISVFAVKEDMELEEGMKLYQFPYSNVHPSGSVCTGRVVIPEFRTLKDLETFHVLFFASSFNHDLTHTHTEPVGELFKRFENQSFDDSILMESEMTF

SEQ ID NO: 55223 - protein, 80 aa, Zea mays
  Coding DNA Sequence Number=SeqID_13444
  Gene Ontology: Mol. function=metalloendopeptidase activity; Cellular component=extracellular region; Biological process=proteolysis
  Homolog annotation: Hit_ID=Q81MX8; Match level="QueryCoverage=95%, HitCoverage=13%, E-value=7e-23, Identity=72%"; Hit description =Neutral protease
  Pfam annotation: Domain name=Peptidase_M4_C; Domain location=1-80; Score=-39.9; E_value=0.00013; Accession=PF02868.6; Description =Thermolysin metallopeptidase, alpha-helical domain
MEVKVGYLIASGVNHNGVNVQGVGEDKMFDIFYYANTDELNMIFDFKELKEGCIRVATNLYGRNSSEVQAVQQAFKAAYI

SEQ ID NO: 55224 - protein, 58 aa, Zea mays
  Coding DNA Sequence Number=SeqID_13445
  Gene Ontology: Cellular component=chromosome, pericentric region; Biological process=mitosis
  Homolog annotation: Hit_ID=O48626; Match level="QueryCoverage=98%, HitCoverage=7%, E-value=3e-08, Identity=45%"; Hit description =Centromere/kinetochore protein zw10 homolog
MADAILRRQIQLTVDTISEAIDGAEGFQNTHQPQHYESAKFSIEQVCSIVKEYGLFEP

SEQ ID NO: 55225 - protein, 110 aa, Zea mays
  Coding DNA Sequence Number=SeqID_13446
MKYQNIESSPRRREKGCRRWGAPSTVLFVPVVRIRSLIDNHGTCSSRLQEESRSITWLGVRRGRAAVGDHCAAMGSGVGIKAYPYGRADMQKNPRTSMKSTRSLYVVLEY

SEQ ID NO: 55226 - protein, 87 aa, Zea mays
  Coding DNA Sequence Number=SeqID_13447
MAFWFVRRGLCGAYKNVLHEEVHVLYDQLHPNMPSKVAEMGAGVAGADDGGLYGELDIFGAPPPMNVADNHPPKASSGSGATKDVED

SEQ ID NO: 55227 - protein, 324 aa, Zea mays
  Coding DNA Sequence Number=SeqID_13448
  Gene Ontology: Mol. function=protein binding; Biological process =defense response
  Homolog annotation: Hit_ID=Q9FS52; Match level="QueryCoverage=17%, HitCoverage=32%, E-value=3e-11, Identity=51%"; Hit description =Resistance gene alike
MADAGVTGVLAKLGELAAEEATALLRVDAEIRALRRKLAYLQALVRGADRQRRGRASELLLLWLRETREVAFEVEDAVDEFHLRVEACRPGARWRRRRRWWWGWHRDAVSLVQDLATQMICFGAFFLKSINAEKEKKCIIHEVYMREIYAEYEMGFFVRHGLSNQISKINERIDELNQNKETYQIESSPSEIWSSSSVEMDPEWYEDKYVIGSREREFAILKDLIINKEGDMPHRAVISIFGERGIGKTTLAKQLYNDPDIIKHFEVHAWVCLPPHVRFRDYVEIMHMQVNPQIPEASEKNDNTTFALGNEETTDMEFNLSAEP

SEQ ID NO: 55228 - protein, 91 aa, Zea mays
  Coding DNA Sequence Number=SeqID_13449
MAKGAGKLKWQYRAVRSMGSFAITGYKDEIGRENHADFGRRCACDGIASPARNLRRPARVSPQTGEEDQQETGSTDLAGPRASAQAQKHRD

SEQ ID NO: 55229 - protein, 105 aa, Zea mays
  Coding DNA Sequence Number=SeqID_13450
  Subcellular localization annotation: CTP_CleavageSite=36; ConfidenceScore=5.39e-01
MSRRSNGGLYSPIGSVCLRPVVALTARRRSKCRHPAAALGAGGFTCAHGRRAVPAPAMVPELQAEAPVPTTNPLSSSLLTTPKSSKSAFDIPEGVQWRNNEFLSA

SEQ ID NO: 55230 - protein, 263 aa, Zea mays
  Coding DNA Sequence Number=SeqID_13451
  Gene Ontology: Mol. function=rRNA N-glycosylase activity; Biological process=negative regulation of protein biosynthetic process
  Homolog annotation: Hit_ID=Q00531; Match level="QueryCoverage=95%, HitCoverage=42%, E-value=1e-51, Identity=51%"; Hit description=60 kDa jasmonate-induced protein
MSAGEAASTKSRGGMSGLRCSACSSASVAIRTDTMKHGYGQDRSDPLSSCILVPKQGNLVLTGPSMATSAESPIAFTFYLHDGSPQAGEAAEDDEDIGRIICDCIGDDFSNYNRAIVETVQMGYGLAEVIYAVLNNGVQGRVAVKLARLPVSKAGEEDATAILGRIVARSKLFDVGCVLFYKEGDNGVSVRPGGLIQLAREALAVPLHMPLTIELDLHRCSGDEIVGGVLEFNPAIDGQHTERLVGQNGAELEVAISWSEYPW

SEQ ID NO: 55231 - protein, 88 aa, Zea mays
  Coding DNA Sequence Number=SeqID_13452
MVNARRGRSGSILSLLLVAVLQRNHPCKVALAPKPGYGGRHMGIGFYKPVTPSVGSCPVVTRLLQAPTIFLGWFSVRARMQGAPRVGV

SEQ ID NO: 55232 - protein, 80 aa, Zea mays
  Coding DNA Sequence Number=SeqID_13453
MVNARRGRSGSILSLLLVAVLQRNHPCKVALAPKPGYGGRHMGIGHRRFFWDGSAFVLVCRVPHMSVSDMEGTYVPGSYQ

SEQ ID NO: 55233 - protein, 88 aa, Zea mays
  Coding DNA Sequence Number=SeqID_13454
MVNARRGRSGSILSLLLIAVLQRNHPCKVALAPNPGYGGRHMGIGFYKPVTPSVGSCPVVTRLLQAPTIFLGWFSVRARMLGAPRVGV

SEQ ID NO: 55234 - protein, 147 aa, Zea mays
  Coding DNA Sequence Number=SeqID_13455
MTVAALEIRSVADLVELREVARWAENTRTNPFIRLERAWSMCPRFARGGLHRRDKSARTFRRRKTSSTCGGHGTARWGPHASDWWRKETGLARGRACPAGPTGRCNGEEEDMGTTDLEGPHVSAILLFWAAHKESKEEVGRGNLRPS

SEQ ID NO: 55235 - protein, 74 aa, Zea mays
  Coding DNA Sequence Number=SeqID_13456
MGRTLHLSFLLLATAKGRRVKMPDMVCAGHSLLISKRCGAQGRWSMTEVKVTQARVDGQGAVKGKGSVLTDRPK

SEQ ID NO: 55236 - protein, 362 aa, Zea mays
  Coding DNA Sequence Number=SeqID_13457
MGTQGQDLVLQQVPNQEGLCNSPPAGKDPSRSDNLGSGSGEWALVSWGGPDLGRGRLPGVADNPFRYAGIQPRHIKLASQAGGQVVLVVSPAEATTFALGSLTSGSDHLCNKQTPPAEPPGGIGAAWPAAQATLWVRRTCARRDFRPCDGRIATPHSVAGGSVGGGTKAVQPKGPDTRQLTALVASRPRVAEVCLLRKAGQHPSPPNAGGRSGSPAMRKAGPRLGSRSTPARMMNILEAKGRGRPQPGSLLSTTRLKSANPHGVAPLQQQQEEDKIGSTTVQETKSARSSAVRPLGGDPNVDSPSEHRRAPSRGSEGGRAQWMREMRGMATARGVSPFLKADFPARATKRHGQVSPNAHQGT

SEQ ID NO: 55237 - protein, 58 aa, Zea mays
  Coding DNA Sequence Number=SeqID_13458
MVRELRLRVDDYGEKELTPVGPHVRECKCAKEYGPLSDEGLVELVVVVEVVVVVVKMS

SEQ ID NO: 55238 - protein, 489 aa, Zea mays
  Coding DNA Sequence Number=SeqID_13459
  Gene Ontology: Mol. function=protein serine/threonine kinase activity; Cellular component=membrane; Biological process=protein amino acid phosphorylation
  Homolog annotation: Hit_ID=Q6ZD33; Match level="QueryCoverage=65%, HitCoverage=54%, E-value=1e-165, Identity=90%"; Hit description =Receptor protein kinase PERK1-like protein
  Pfam annotation: Domain name=Pkinase; Domain location=190-461; Score =165.0; E_value=1.9e-46; Accession=PF00069.15; Description=Protein kinase domain
  Pfam annotation: Domain name=Pkinase_Tyr; Domain location=190-461; Score=157.9; E_value=2.6e-44; Accession=PF07714.7; Description =Protein tyrosine kinase
  Pfam module annotation: Pfam domain module=Pkinase::Pkinase_Tyr; Domain location=190-461::190-461
MPTQGRGAQGIHVGEEVADTGESRLLGSSDGGAGSADPEVDGSEESRRASDGCGGRGAAYAACSAGLVGGCAATGRARLRRWARCRSSAGPAARVLVAAALAASLDADPVGLRRRIPRLCRRREGRSRGRAPAGRGGAGASAADAAATTSMDKSALSTSQADSSSGVPGITVDKSVEFSYEELFNATEGFSMSNKIGQGGFGAVYYAELRGEKAAIKKMDMQASHEFLAELKVLTHVHHLNLVRLIGFCTESSLFLVYEFIENGNLSQHLRGTGYEPLSWAARVQIALDSARGLEYIHEHTVPVYIHRDIKSANILIDKNYRAKVADFGLTKLTEVGNTSLPTRGIVGTFGYMPPEYARYGDVSPKVDVYAFGVVLYELISAKDAIVRSTESSSDSKGLVYLFEEALNTPDPKEGLQRLIDPALGEDYPIDSILKMTVLARACTQEDPKARPTMRSIVVALMTLSSTSEFWDMNAIQENQGVVNLMSGR

SEQ ID NO: 55239 - protein, 212 aa, Zea mays
  Coding DNA Sequence Number=SeqID_13460
MGAETRAHASNLPSWPVPSAAESRNPYERIQAKGGTRPRTRGDARGRRSRRDHVRRCGSHLRPEHGRVIEFGEIHGLPPPPRLTQSPAARRLLPAHPRGTLRALSGRRLWLPPVRPDPTRQAGGGEDDGREKVRWQRDRRGRAGKGMAAIWARGGRGNWSGGSARSEASEEGSERGREGKERSGAWCEVVEMRKRREGWMENAALSPTLSLS

SEQ ID NO: 55240 - protein, 135 aa, Zea mays
  Coding DNA Sequence Number=SeqID_13461
MSGAPEDSDLIVFALGNFQRPLRYNSPDCLVCTGHVRCSKKERPQELASLGFSRQSLRHNSPDCPVCTGLSGASTGQRLLQAPTATCGAFIARQRAQSFALFTPPLGDYHQHAAGPYLARQLSAFRTQGILNRTD

SEQ ID NO: 55241 - protein, 343 aa, Zea mays
  Coding DNA Sequence Number=SeqID_13462
  Homolog annotation: Hit_ID=Q7XAB1; Match level="QueryCoverage=35%, HitCoverage=26%, E-value=1e-19, Identity=43%"; Hit description=AP2 domain-containing protein AP29
  Pfam annotation: Domain name=AP2; Domain location=193-257; Score =139.8; E_value=7.3e-39; Accession=PF00847.10; Description=AP2 domain
  Subcellular localization annotation: CTP_CleavageSite=94; ConfidenceScore=5.11e-01
MEPDRVSPVLIASLCSHATNSQPPTREQAQGRRLASRALAPRTDTQAWIAPPLIGASSVATGVRRRRRRPVVAACHRRREAAVSLGAAPGCAPRTSTPSSSRRWLTSSAPGRGARHRPGSASKVRAHVLVVHGPTCSAPHFLPTAGWIWMNRFYSLLHLCDDDLTGRHAPLSCVDSVTHRRAVHAPATEPQRRPRYRGVRQRPWGKWAAEIRDPVKAARVWLGTFATAEDAARAYDDAALRFRGAKAKLNFPANAGHGTAAAFQPRYRGQHRPGTPSAAAAPVGCHEEPSSSFPDLGQYARILQSGGGDLDLQAAFAGGVAPAGRSSTSAASASASSPWQGAT

SEQ ID NO: 55242 - protein, 53 aa, Zea mays
  Coding DNA Sequence Number=SeqID_13463
MAFTSPRRRFPDAMPQSPGKFHSTSSSIASVAAGASAGDCHQRDPNILALPLA

SEQ ID NO: 55243 - protein, 84 aa, Zea mays
  Coding DNA Sequence Number=SeqID_13464
MEGDARALTEDEVVQNTPYLNLIVSMLCAIHQVPKVQHKPIKSPRKGLNKKEQNQLKAALVWRTVATFGFLGMPLRYNSPDCRM

SEQ ID NO: 55244 - protein, 182 aa, Zea mays
  Coding DNA Sequence Number=SeqID_13465
  Subcellular localization annotation: CTP_CleavageSite=68; ConfidenceScore=5.15e-01
MASNYVDTTGEEGRFHGPHSHSTSTTPTGGAAAAAASPRNFRRSFSSASSAGHSHGGGGGGAKCVCAPATHAGSFKCRLHRTNSQGHGHGHPHPSPPASPAAPAQGVSSSASSRTVEALCRGRGGKRQRWHGEEAVAFDDSTSTAVDWRGGGGCLFGGRILHDIYDLADDEALDSDRGGAFR

SEQ ID NO: 55245 - protein, 114 aa, Zea mays
  Coding DNA Sequence Number=SeqID_13466
MEVSVCPDGPNTLGGRETTGEFVGWISLCCRKGLCHLSLFVLENRLKQVQEMQSNCDKGLKHMSCEAPLLGPMAELWKLKNPDISESEWAVQAAAASIYSTCNMTMITENVPCF

SEQ ID NO: 55246 - protein, 158 aa, Zea mays
  Coding DNA Sequence Number=SeqID_13467
  Gene Ontology: Mol. function=nucleic acid binding; Cellular component= intracellular; Biological process=DNA integration
  Homolog annotation: Hit_ID=Q8H6I0; Match level="QueryCoverage=99%, HitCoverage=10%, E-value=2e-56, Identity=63%"; Hit description =Putative gag-pol polyprotein
MKKVVYYETDSSSPSTSGSESASTTSKRHERKKYSKPPMLEGEDYSMWSDKMRHHLTSLHKSIWDIVEYGAQVPKRGDKDYDSEEVDQIQHFNFQATTILLASLSREEYNKVQGLKSAKENWDVLKTAHEGDEVTKITKRETIEGELGRFMLHQGEEP

SEQ ID NO: 55247 - protein, 108 aa, Zea mays
  Coding DNA Sequence Number=SeqID_13468
MAKRDENLRKSDVRTRKSHAPLSRAEGIRRRCGAAEEASPTEYRPCDSTWERTSAPSGVVAAPWLPAIPSLRCGVGEAASTQSQSIGGKISVSIAAKDRGRDFGPSFV

SEQ ID NO: 55248 - protein, 336 aa, Zea mays
  Coding DNA Sequence Number=SeqID_13469
  Gene Ontology: Mol. function=protein serine/threonine kinase activity; Cellular component=cell surface; Biological process =protein amino acid phosphorylation
  Homolog annotation: Hit_ID=Q9ATQ1; Match level="QueryCoverage=89%, HitCoverage=90%, E-value=1e-83, Identity=56%"; Hit description=TAK14
  Pfam annotation: Domain name=Pkinase; Domain location=43-291; Score= -36.7; E_value=2.2e-06; Accession=PF00069.15; Description=Protein kinase domain
  Pfam annotation: Domain name=Pkinase_Tyr; Domain location=120-291; Score=-103.9; E_value=4.3e-06; Accession=PF07714.7; Description =Protein tyrosine kinase
  Pfam module annotation: Pfam domain module=Pkinase::Pkinase_Tyr; Domain location=43-291::120-291
MHFIRLGEYSAPIIVSSAVRAVDAGGQDAGGQGDPEECGVKAYELVCSNDKATIRINTGTYFVTSIDYINRSFWVVDANLDMHNSCPLPRWDPLLAICMLDTAPYTRAYYSQQAICMLPSRCWATPTAMGASSFSTIGRIHHINVVRLVGFCAEEMRRALAWESTTYLHLGCDMQILHFDIKPHNILLDNNFVPKVSDFGLAKLYPRDKSFVPASAMRGTIGYIAPEMISRSFGAISSKSDVYSFAEQEAGEISVAADMHELERKLCIVGLRCIQMKPQDRPTMGEIIEMLECGTHGLGLQMPSRPFFCDDDDPNMPAADSYHFSSELTAISEEDG

SEQ ID NO: 55249 - protein, 431 aa, Zea mays
  Coding DNA Sequence Number=SeqID_13470
  Gene Ontology: Mol. function=serine carboxypeptidase activity; Cellular component=cellulose and pectin-containing cell wall; Biological process=proteolysis
  Homolog annotation: Hit_ID=Q69MD7; Match level="QueryCoverage=89%, HitCoverage=77%, E-value=1e-157, Identity=68%"; Hit description =Putative serine carboxypeptidase
  Pfam annotation: Domain name=Peptidase_S10; Domain location=90-428; Score=417.1; E_value=2.5e-122; Accession=PF00450.12; Description =Serine carboxypeptidase
MMMRTNTLFLLSLAILLGTSLAVTDVSQEAQLSKFMTTRALKRLTTKRPRVNGPEETDPWADPSAFAHLAERCKGPPSGSKEADRVLGLPGQPPRVNFRQYSGYVTVNEEHGRELFYYFVESPHDAASKPLILWLNGGPGCSSLGFGAMKELGPFRVNPDGTLRRNKHSWNNLANVIFLESPAGVGFSFSRNATDYDTVGDRRTAEDTYVFLAKWLDRFPEYKGRAFYVTGESYGGHYVPELATVILYMNRFPDLLTPINLQGIFFGNPLLDDYLNGKGELEFLWSHGVISDEVWARILANCTFTPSDDWPCFVAAHSFQRGNIDKYDIYAPVCLQSDNGTYYSSSHSLPGYDPCSYYYIEPYLNNHAVKQALHARVDTNWTGCSEDLAWNDAPEFMVPIIKRLINEGLKYGYTGVIRSGPLLMITESCYD

SEQ ID NO: 55250 - protein, 391 aa, Zea mays
  Coding DNA Sequence Number=SeqID_13471
  Gene Ontology: Mol. function=phospholipase A2 activity; Biological process=lipid metabolic process
  Homolog annotation: Hit_ID=Q29VI1; Match level="QueryCoverage=97%, HitCoverage=87%, E-value=1e-140, Identity=65%"; Hit description =Patatin-like protein
  Pfam annotation: Domain name=Patatin; Domain location=19-227; Score =268.9; E_value=1e-77; Accession=PF01734.12; Description=Patatin-like phospholipase
MEKGKHIQPPTYGNLVTILSIDGGGIRGIIPAVVLTFLESELQKLDGEEARLADYFDVIAGTSTGGLVTSMLVAPNNTNRPLFAAKDIQAFYMNHAPKIFPQQRGPFGRVMRIFRSLSGPSYDGKYLHDVVRKKLGITRLHETLTDVVIPTFDIKRLQPIIFSSYEVKNEKYNTMDALLSDICISTSAAPTYLPAHYFKTEDCHGNTKEFHLIDGGVAANNPALVAIGEVTKQIFKENPDFFPIKPMDYGRFLVISLGTGSAKFEANYNAQTAKSWGLLGWLLGSGSTPLVDIFTQASADMVDIHISAVFKALHSEQNYLRIQDDTLQGTLSSVDVATKENMEKLARVGDMLLKKPVSQANLETGHMVPACHRAEMTNEEALKRLALPLHL

SEQ ID NO: 55251 - protein, 358 aa, Zea mays
  Coding DNA Sequence Number=SeqID_13472
  Gene Ontology: Mol. function=nucleic acid binding; Cellular component= cytosol; Biological process=regulation of mRNA stability
  Homolog annotation: Hit_ID=Q9LEB3; Match level="QueryCoverage=83%, HitCoverage=76%, E-value=1e-103, Identity=57%"; Hit description=RNA Binding Protein 47
  Pfam annotation: Domain name=RRM_1; Domain location=141-214; Score =63.2; E_value=8.6e-16; Accession=PF00076.12; Description=RNA recognition motif. (a.k.a. RRM, RBD, or
  Pfam annotation: Domain name=RRM_1; Domain location=224-289; Score =85.1; E_value=2.2e-22; Accession=PF00076.12; Description=RNA recognition motif. (a.k.a. RRM, RBD, or
  Pfam annotation: Domain name=RRM_1; Domain location=48-119; Score =49.6; E_value=1.1e-11; Accession=PF00076.12; Description=RNA recognition motif. (a.k.a. RRM, RBD, or
  Pfam annotation: Domain name=RRM_3; Domain location=224-314; Score= -0.1; E_value=0.0043; Accession=PF08777.1; Description=RNA binding motif
  Pfam module annotation: Pfam domain module=RRM_1::RRM_1::RRM_1::RRM _3; Domain location=141-214::224-289::48-119::224-314
MAPPQFAAAQFVPFHAVVQSPQLAAPVPAVVLGSPAPHQAGQEENKTIWVGDLHFWMDENYLHNCFGYTGEVVAIKVIRNKQTGQSEGYGFVEFYSHAAAERVLEGFSGHIMPNTDQPFRLNWASFSMGDRRSDVASDHSIFVGDLASDVNDATLLEVFSSRYSSVKGAKVVIDANTGRSKGYGFVRFGDDSEKTHAMTEMNGTSGSNGSSARPDGGDLTNTTVFVGGLDPDVSEEDLRQAFSQYGEISSVKIPVGKQCGFVQFAQRKNAEDALQGLNGSTIGKQAVRLSWGRNPANKQFRGDNGNMQWKNGGVYYAAPPFYNGGYGYPAAAPFPDPGMYAAPAYGAYPFYGNQQQVS

SEQ ID NO: 55252 - protein, 256 aa, Zea mays
  Coding DNA Sequence Number=SeqID_13473
  Gene Ontology: Mol. function=protein serine/threonine kinase activity; Biological process=protein amino acid phosphorylation
  Homolog annotation: Hit_ID=Q4U400; Match level="QueryCoverage=58%, HitCoverage=21%, E-value=6e-10, Identity=29%"; Hit description=Wall -associated kinase-like 1
MYHIKKLLKILDMRYEKVDVGKDGRMLFGEDNGKEENCKVSIKPSPGDEAQHPVKLLLGDGVEVLDISLPDRTVRIQTKISWVEYAAEFNGSWSVPAPDGPLMVSTARNSFVAFGCNVLAKLIPYGTVLSYASTCAAACMNTPDVSSCSGVRCCQTSIASLGSDLPWYGIQVKHLEGETGNYYHRAVFIVDQDWFNRVEAAMASNFSTLFFGNRFYEQVVLVDSVPVVLEWSLNLIRDSGLFVLSPIGPNRQTSDA

SEQ ID NO: 55253 - protein, 257 aa, Zea mays
  Coding DNA Sequence Number=SeqID_13474
  Homolog annotation: Hit_ID=Q8SA97; Match level="QueryCoverage=36%, HitCoverage=18%, E-value=3e-11, Identity=61%"; Hit description =Ornithine carbamoyltransferase
  Subcellular localization annotation: CTP_CleavageSite=48; ConfidenceScore=5.41e-01
MWELLRSRGRVCLPWPRSGPSPRFGRGGDRRLVPGRSPSPGVGRSGVRRLLGSSPSPSPGSGEAEIVVFWDLVRVRALGRAEFAVFRDLARVRALGRAEFAVFRDLARVRALGRAEFAVFRVLARVRALGWAEFTVFRDLARVRALGWAERSFLWCLWPGLTACQSHSIKWHHSRSGTGGAVLLSGRSVERRSEGGHFGFAGWGACVRIKGLGRAGNMFAAEGGPRARRKSSGLCADGGYQLRIRSLEGTPNYGPRQ

SEQ ID NO: 55254 - protein, 70 aa, Zea mays
  Coding DNA Sequence Number=SeqID_13475
MTVWRLATARSGFAAEHQSQPLELSDHRGGDWVVLELETMRGRVYIRVGHTPPQEAAGREFAADFDVFVT

SEQ ID NO: 55255 - protein, 79 aa, Zea mays
  Coding DNA Sequence Number=SeqID_13476
MAHIEEVEDLGDLDSTLPEASGAEPTPPSDAGEGPSATPRQLELESSDEGLDYFAALDVAAAESPPRDIVWGWSVAVFG

SEQ ID NO: 55256 - protein, 236 aa, Zea mays
  Coding DNA Sequence Number=SeqID_13477
MALPIDVAGLCPRSGDVEAPPKPRSSLSSTAEAESEPLGRARRRSSAEVRAVSEPWGLSPSPSPGSGGAEFAVFRVLARVRALGRAERSSPSSGAEPESEPWVGRSGVRRLPGLSPSPSPGVERSGVRHLPGLSPSPSPGLGGAKFVVFQVLARVRALGRAERSSPSSGAEPESEPWVGRSFLWCLWQGLAPCQHHSVKWRCSRSGAGGAVLLSDQSVERRSDGGHFGSAGGRVSG

SEQ ID NO: 55257 - protein, 288 aa, Zea mays
  Coding DNA Sequence Number=SeqID_13478
  Homolog annotation: Hit_ID=Q1S7J8; Match level="QueryCoverage=97%, HitCoverage=97%, E-value=4e-80, Identity=56%"; Hit description =Cyclin-like F-box
MASLSADLFYDILKRLDAAALARAGCACADFRAISNEEDLWENACTSLWPSMRRDDVIWGIPSSDSANGWFYNYPFRIDLSQHSAENNENNNGDVFLSTVSGVSPVPSMEQERKDGKLWRELNDGVKLSWIVVNKKMKRAVNLTSWHPLSGQRHWPTDADFVLRFGSVLPAKEVLPCQVAECILLMKFRVTGMGGEEAGEPSTLALTELSMQIQDMGGVHLNGRCSLLLLKEALSCHRSRNYDEVLESCNLYLKAQSELKEEKIRSECRFDTLCVFSGIAIFAAICTM

SEQ ID NO: 55258 - protein, 67 aa, Zea mays
  Coding DNA Sequence Number=SeqID_13479
MKLIDYCDGVQAIRGDEGDGIEPQHLEDPVEVQGQESAQSRCTGQCPVRQAGSGEKAALRKSSAAYV

SEQ ID NO: 55259 - protein, 355 aa, Zea mays
  Coding DNA Sequence Number=SeqID_13480
  Gene Ontology: Mol. function=protein dimerization activity; Cellular component=intracellular; Biological process=regulation of transcription, DNA-dependent
  Homolog annotation: Hit_ID=Q2QRD1; Match level="QueryCoverage=92%, HitCoverage=31%, E-value=1e-104, Identity=59%"; Hit description=HAT family dimerisation domain containing protein
  Subcellular localization annotation: CTP_CleavageSite=21; ConfidenceScore=5.16e-01
MSAAPCGDVGGTGSSSATRIEASTGNKGQTRKRASSSPVWEDFEHVFNFENDGSLLRWEYSSEVARTELVRLIAREDLPLSFGESDAFEEYIARAHNPRFVKSSRQTTARDFVKHYNGRVEMLIEVFKTGVSSVALTSDIWSGKAKEDYISVVAHFVNPNWELEKRLLGLRPIEDGHTGKNIAERVSLVVDEYGLTDKIFAITLDNASSNKTAMSYLIPLFSSYLGIPDYELDDTHNMSSILLHQRCACHIINLIVKSGLKRLNSCVNDFRTAITYLNSSNQRIAVYKSYCLSMGIRPRKFGVDMDVRWNSTYIMLKHVLSHRSTFSVFIKTQYPLATDGTPLLTDNHWIIAENC

SEQ ID NO: 55260 - protein, 35 aa, Zea mays
  Coding DNA Sequence Number=SeqID_13481
MSPIRVVPPTLRVGIQDSSGKATTTPRGHGHMKRF

SEQ ID NO: 55261 - protein, 372 aa, Zea mays
  Coding DNA Sequence Number=SeqID_13482
  Gene Ontology: Mol. function=RNA-directed DNA polymerase activity; Cellular component=intracellular; Biological process=RNA-dependent DNA replication
  Homolog annotation: Hit_ID=UPI00004C1733; Match level="QueryCoverage =99%, HitCoverage=27%, E-value=0.0, Identity=92%"; Hit description =UPI00004C1733 related cluster
  Pfam annotation: Domain name=RVT_1; Domain location=35-222; Score =94.1; E_value=4.1e-25; Accession=PF00078.17; Description=Reverse transcriptase (RNA-dependent
MKQPLCRFDKEKRKAIGEEIHKLMAAGFIKEVFHPEWLANPVLVRKKGGKWRMCVDYTGLNKACPKVPYPLPRIDQIVDSTAGCETLSFLDAYSGYHQIRMKESDQLVTSFITPFGMYCYITMPFGLRNAGATYQRCMNHVFGEHIGRTVEAYVDDIVVKTRKASDLETTFKCLKAKGVKLNPEKCVFGVPRGMLLGFIVSERGIEANPEKIAAITNMGPIKDLKGVQRVMGCLAALSHFILRLGERGLPLYRLLRKIERFTWTPEAEEALGNLKALLTSAPILVPPVAGEALLIYVAATTQVVSAAIVVERREEGHALPVQRPVYFISEVLSETKIRYPQIQKLLYAVILTRRKLRHYFESHPVTVVSSFP

SEQ ID NO: 55262 - protein, 268 aa, Zea mays
  Coding DNA Sequence Number=SeqID_13483
  Gene Ontology: Mol. function=transcription regulator activity; Cellular component=nucleus; Biological process=regulation of transcription
  Homolog annotation: Hit_ID=Q8L9U3; Match level="QueryCoverage=82%, HitCoverage=73%, E-value=4e-47, Identity=51%"; Hit description =Putative lipoamide dehydrogenase
  Pfam annotation: Domain name=HLH; Domain location=108-155; Score =16.8; E_value=0.0024; Accession=PF00010.16; Description=Helix-loop -helix DNA-binding domain
MAGQPPPSGASEDDFLEHFFAFPSAASAGAAGGHAGAGVGGDHPFPLALSLDAAAEAKPDRDPVQLAGLFPPVFAGAGGVHQPHLRGPPPPQMFQAQPKPGEGGMAPQPPAPRPKLRRERIAERMRALQELVPNTNKTDRAAMLDEILDYVKFLRLQVKVLSMSRLGGAGAVAQLVADIPLSVKGEAGDGGGAPQQQQQQHVWEKWSTDGTEKQVAKLMEEDIGAAMQFLQSKALCMMPVSLAMAIYDTQHPLDGHGHSLKPEPNASS

SEQ ID NO: 55263 - protein, 102 aa, Zea mays
  Coding DNA Sequence Number=SeqID_13484
MTTTHYARGFRKPYLKSGIGVNEQSLQESRIPEDASTPPLNACSYLRSAPKRSPAKEKESSGAVHEETMGGGGTFARGHTNHQNMEDIVCKTEHFAIHRMPR

SEQ ID NO: 55264 - protein, 114 aa, Zea mays
  Coding DNA Sequence Number=SeqID_13485
  Gene Ontology: Mol. function=tryptophan synthase activity; Cellular component=chloroplast; Biological process=tryptophan metabolic process
  Homolog annotation: Hit_ID=Q6ZL61; Match level="QueryCoverage=88%, HitCoverage=31%, E-value=2e-37, Identity=77%"; Hit description =Putative tryptophan synthase alpha chain
  Pfam annotation: Domain name=Trp_syntA; Domain location=5-114; Score=- 78.4; E_value=1.2e-08; Accession=PF00290.11; Description=Tryptophan synthase alpha chain
MAFFLKQYPGESDKVVPLGIGFLMVSTVGVTGTRANVSGKVQSLLQDIKKVTEKPVAVGFGVSTPEHVRQIAGWGADGVIIGSAVMKTLEEAASPEEGLKKLEEFAKNLKAALP

SEQ ID NO: 55265 - protein, 96 aa, Zea mays
  Coding DNA Sequence Number=SeqID_13486
  Subcellular localization annotation: CTP_CleavageSite=49; ConfidenceScore=5.00e-01
MASRRRPDAAAPQPFPTYPMTLKRRRNNRESVGGNLTDVGAPQPPPDTECTAEIDDLKLPTPRQSSIDCELGGEAVDGCKRGKGERWTATELPLTA

SEQ ID NO: 55266 - protein, 564 aa, Zea mays
  Coding DNA Sequence Number=SeqID_13487
  Gene Ontology: Mol. function=GTPase activity; Cellular component =signal recognition particle, endoplasmic reticulum targeting; Biological process=immune response
  Homolog annotation: Hit_ID=Q10C30; Match level="QueryCoverage=92%, HitCoverage=89%, E-value=0.0, Identity=60%"; Hit description =Guanylate-binding family protein, putative, expressed
  Pfam annotation: Domain name=GBP; Domain location=29-324; Score=50.4; E_value=6.2e-12; Accession=PF02263.9; Description=Guanylate-binding protein, N-terminal domain
MGCAPVVWAAVWLLAAAVAGFADPGGLERAPLSQWLIALHEYGVIGPYRSGKSFLLNQLLSLSCDNGFGVGHMRDTKTKGIWVWGSPVEVDIGGSKVSVLYLDTEGFESVGKSNVYDDRIFALATVLSSVLIYNLPETIREADISRLSFAVEIAEEFYGSLSFANIFPFCPLACGKLESRSISKSCRGALQGQDVAFEPAKLLWLIQRDFLRTYIFESNFHDPEGKSVQQMVDEALQRVPNNNGDTNIDEFLLKKITLVLHQLNQIRDSLAVMGDNSTAFSLPQPHLQRTKLCDMEDQELDPLYVKKRDQLKEVVASMIKPKIVQGRTLNGTEFVSFLGQIVDALNKGEIPSAGSLVEIFNKAILERCLKVYSEIMGRAGLPVSVDELREFHDLAKDEARRLFNKQHFGKHHAARSILKLDEEIKKMLARSRALFIKEYNNKLFNWLAIFSLAMVVVGRFLVKFFLLEVAAWVMFAFLETYTRLFWSSESLYYNPAWHAIVSSWETVVYSPVLDLDRWAFPICAVLLFLAFYWRCLGGRRGIARSLLPLYNGAYYRSSSRTRTD

SEQ ID NO: 55267 - protein, 249 aa, Zea mays
  Coding DNA Sequence Number=SeqID_13488
  Gene Ontology: Mol. function=tryptophan synthase activity; Cellular component=chloroplast; Biological process=tryptophan metabolic process
  Homolog annotation: Hit_ID=Q6ZL61; Match level="QueryCoverage=81%, HitCoverage=61%, E-value=4e-75, Identity=72%"; Hit description =Putative tryptophan synthase alpha chain
  Pfam annotation: Domain name=Trp_syntA; Domain location=62-246; Score= 190.3; E_value=4.5e-54; Accession=PF00290.11; Description=Tryptophan synthase alpha chain
  Subcellular localization annotation: CTP_CleavageSite=42; ConfidenceScore=5.77e-01
MAFALKAAAAGSASFSAAGPRRRAAATGRVSFRSAAPVVAVRAAAAAAAAVAEDKRSISGTFAELRQQGKTALIPFITAGDPDLATTAKALRILDACGSDVIELGVPYSDPLADGPVIQASATRALAKGTTFEDVISMVKGVIPDLSCPVALFTYYNPILKRGVPNFMSIVKEAGVHGLVVPDVPLEETDVLRSEAAKNNLELVLLTTPTTPNERMEKIAQASEGFIYLIQEQLQYLRFKNNCSTQLHI

SEQ ID NO: 55268 - protein, 85 aa, Zea mays
  Coding DNA Sequence Number=SeqID_13489
MALPVSITLALCFVCLVTSSISCKLDVQEHDTSVSLNSDSCISGYGSRKPLMIGHVQVLKSLLILKLLLSYGIRGQQWLFYFILV

SEQ ID NO: 55269 - protein, 58 aa, Zea mays
  Coding DNA Sequence Number=SeqID_13490
MDSRKDHRRWIRLVEGRGETVEERGDAGTAVRELRVSGTREEDDGAQFQILDFVIERK

SEQ ID NO: 55270 - protein, 1079 aa, Zea mays
  Coding DNA Sequence Number=SeqID_13491
  Gene Ontology: Mol. function=protein-tyrosine kinase activity; Cellular component=integral to membrane; Biological process=protein amino acid phosphorylation
  Homolog annotation: Hit_ID=Q7EYF8; Match level="QueryCoverage=97%, HitCoverage=98%, E-value=0.0, Identity=80%"; Hit description =Putative phytosulfokine receptor
  Pfam annotation: Domain name=LRRNT_2; Domain location=34-80; Score =41.4; E_value=3e-09; Accession=PF08263.3; Description=Leucine rich repeat N-terminal domain
  Pfam annotation: Domain name=LRR_1; Domain location=108-130; Score =9.8; E_value=4.2; Accession=PF00560.23; Description=Leucine Rich Repeat
  Pfam annotation: Domain name=LRR_1; Domain location=132-154; Score =13.2; E_value=0.93; Accession=PF00560.23; Description=Leucine Rich Repeat
  Pfam annotation: Domain name=LRR_1; Domain location=156-178; Score =15.7; E_value=0.17; Accession=PF00560.23; Description=Leucine Rich Repeat
  Pfam annotation: Domain name=LRR_1; Domain location=180-202; Score =19.3; E_value=0.014; Accession=PF00560.23; Description=Leucine Rich Repeat
  Pfam annotation: Domain name=LRR_1; Domain location=204-226; Score =10.6; E_value=3; Accession=PF00560.23; Description=Leucine Rich Repeat
  Pfam annotation: Domain name=LRR_1; Domain location=228-251; Score =8.2; E_value=8.3; Accession=PF00560.23; Description=Leucine Rich Repeat
  Pfam annotation: Domain name=LRR_1; Domain location=252-274; Score =4.2; E_value=46; Accession=PF00560.23; Description=Leucine Rich Repeat
  Pfam annotation: Domain name=LRR_1; Domain location=280-304; Score =9.2; E_value=5.5; Accession=PF00560.23; Description=Leucine Rich Repeat
  Pfam annotation: Domain name=LRR_1; Domain location=306-327; Score =17.3; E_value=0.056; Accession=PF00560.23; Description=Leucine Rich Repeat
  Pfam annotation: Domain name=LRR_1; Domain location=329-348; Score =10.3; E_value=3.4; Accession=PF00560.23; Description=Leucine Rich Repeat
  Pfam annotation: Domain name=LRR_1; Domain location=355-376; Score =5.8; E_value=23; Accession=PF00560.23; Description=Leucine Rich Repeat
  Pfam annotation: Domain name=LRR_1; Domain location=377-396; Score =7.3; E_value=12; Accession=PF00560.23; Description=Leucine Rich Repeat
  Pfam annotation: Domain name=LRR_1; Domain location=398-419; Score =4.6; E_value=39; Accession=PF00560.23; Description=Leucine Rich Repeat
  Pfam annotation: Domain name=LRR_1; Domain location=422-445; Score =14.0; E_value=0.56; Accession=PF00560.23; Description=Leucine Rich Repeat
  Pfam annotation: Domain name=LRR_1; Domain location=446-468; Score =9.7; E_value=4.3; Accession=PF00560.23; Description=Leucine Rich Repeat
  Pfam annotation: Domain name=LRR_1; Domain location=470-493; Score =12.0; E_value=1.6; Accession=PF00560.23; Description=Leucine Rich Repeat
  Pfam annotation: Domain name=LRR_1; Domain location=494-519; Score =6.3; E_value=19; Accession=PF00560.23; Description=Leucine Rich Repeat
  Pfam annotation: Domain name=LRR_1; Domain location=520-542; Score =18.2; E_value=0.03; Accession=PF00560.23; Description=Leucine Rich Repeat
  Pfam annotation: Domain name=LRR_1; Domain location=544-566; Score =13.2; E_value=0.98; Accession=PF00560.23; Description=Leucine Rich Repeat
  Pfam annotation: Domain name=LRR_1; Domain location=568-587; Score =6.8; E_value=15; Accession=PF00560.23; Description=Leucine Rich Repeat
  Pfam annotation: Domain name=LRR_1; Domain location=590-612; Score =10.3; E_value=3.4; Accession=PF00560.23; Description=Leucine Rich Repeat
  Pfam annotation: Domain name=Pkinase; Domain location=794-1076; Score= -6.1; E_value=3.4e-08; Accession=PF00069.15; Description=Protein kinase domain
  Pfam annotation: Domain name=Pkinase_Tyr; Domain location=798-1076; Score=-22.3; E_value=4.2e-11; Accession=PF07714.7; Description =Protein tyrosine kinase
  Pfam module annotation: Pfam domain module=LRRNT_2::LRR_1::LRR_1::LRR_ 1::LRR_1::LRR_1::LRR_1::LRR_1::LRR_1::LRR_1::LRR_1::LRR_1::LRR_1: LRR_ 1::LRR_1::LRR_1::LRR_1::LRR_1::LRR_1::LRR_1::LRR_1::LRR
  Pfam module annotation: Pfam domain module=Pkinase_Tyr; Domain location=34-80::108-130::132-154::156-178::180-202::204-226::228 -251::252-274::280-304::306-327::329-348::355-376::377-396::398 -419::422-445::446-468::...
  Pfam module annotation: Domain location=470-493::494-519::520 -542::544-566::568-587::590-612::794-1076::798-1076
MGLRAGFLLLPPPPLLLLLLLLLLLISPARGQLPSQDILALLAFKKGITHDPAGYVTDSWNEESIDFNGCPASWNGVVCNGASVAGVVLDGHGISGVADLSVFANLTMLVKLSLAGNNLSGGLPGNVASLKSLKFMDVSRNRFSGPVPDGIGNLRSLQNLSLAGNNFSGPLPESVGGLMSLQSLDVSGNSLSGPLPAGLKGMKSLVALNASYNAFTKGIPSGLGLLVNLQSLDLSWNQLDGGVDWKFLIESAVAHVDFSGNLLTSTTPKELKFLADISETVLYLNLSNNKLTGSLIDGVELSTFGRLKVLDLSNNQLSGDLPGFNYVYDLEVLRLANNAFTGFVPSGLLKGDSLVLSELDLSANNLTGHINMITSTTLQVLNLSSNALFGDLPLLAGSCTVLDLSNNKFRGNLSVIAKWASDLEYVDLSQNNLTGPVPDASSQFLRLNYLNLSRNSLSETIPEAIAQYPKLTVLDLSSNQLRGPMPANLLTSSMLQELYIRDNMLFGGLSFPGSSSKNLSLQVLDISGNRFNGSLPDDIASLSGLRVLDISTNNFSGPLPAAVSKLGALTDIDISTNQFTGPLPEDLPDNLQSFNASYNDLSGVVPENLRKFPESSFHPGNSKLEYPASSSGSGSSPSGSAGGKSLSTGAKAAIVAASIVLLVILILIAIVCHYKRISRQFSSSEKVSDKSLHRTTKDSAVMQGKDNKGGLVSADELATPRKGSTSEALSQEEKSAAGGFSPSKGSRFSWSPDSGEAYGQEGLARLDVRSPDRLAGELHFLDETITLTPEELSRAPAEVLGRSSHGTSYRATLENGVFLTVKWLREGVARPKKEFAKEAKKFANIRHPNVVGLRGYYWGPTPHEKLILSDYVAPGSLASFLYDRPGRRGPPLTWAQRLKIAVDVARGLNYLHFDRAMPHGNLKATNVLLDGLDLNARVADYCLHRLMTQSGVAEQILDLGVLGYRAPELAASKKPAPSFKADVYAFGVALLELLTGRCAGDVVSGPEGAAGVDLTDWVRLRVAEGRGSDCFDAAMASDSESNPQAVKGMKEALGIALRCIRPVSERPGIKSVYEDLSSI

SEQ ID NO: 55271 - protein, 197 aa, Zea mays
  Coding DNA Sequence Number=SeqID_13492
MGSHDLRAEWGSRLVGKVGNLCRVLETGGDAGNMEDFEEFQDYDEFYALLHASSAPILLESPRLYSHRVGLWGGWPHPARDCPSPPKIAAVEMYHAQPAPRLPPSSSMSTVVLFLSVGPSSSSDSDQRQQPHHYPFLNATAATSLPAPRLHCHDVPPHCAARACEVSSGLEVPAWVSLPTRAVPSAATTRRLILLPE

SEQ ID NO: 55272 - protein, 136 aa, Zea mays
  Coding DNA Sequence Number=SeqID_13493
MEIQRRRGGCTLGEEERWLHLGEEEMGGQLGLDEAFENKSPTLAPTSGEPFFDHLRQALTFVMPPKKASVPRGCPLYSPLDPNQGDLFSFKRARTRKRKGPLSQHFQKEELELEIINMGKNPPQSTKEEGKNGPTG

SEQ ID NO: 55273 - protein, 134 aa, Zea mays
  Coding DNA Sequence Number=SeqID_13494
  Gene Ontology: Mol. function=DNA binding
  Homolog annotation: Hit_ID=O48526; Match level="QueryCoverage=91%, HitCoverage=92%, E-value=2e-11, Identity=33%"; Hit description =Expressed protein
MGRGRGRGKKQTTVRSHEDKGSSGEEVVPAKKRRGRPQTCFASKIDQADVENFVEQVDADQEEAGDAKLKNSAAAGGPKRGRLLKGRSNIAIEDTNSTVRLSSDESTRTNGFTQIGSRRKNKPRRASEAGLECK

SEQ ID NO: 55274 - protein, 54 aa, Zea mays
  Coding DNA Sequence Number=SeqID_13495
MPLHLVYIVKDGDLEMYLYRILLAISMEQGIVHIFASMRKLTTELQEVMDLLNE

SEQ ID NO: 55275 - protein, 65 aa, Zea mays
  Coding DNA Sequence Number=SeqID_13496
MVEEPPIDLTNTEYDNHVGATVGDGGATGGGAPKGGASTSTSATALENTANINTSQKGCYFLLLS

SEQ ID NO: 55276 - protein, 1071 aa, Zea mays
  Coding DNA Sequence Number=SeqID_13497
  Gene Ontology: Mol. function=nucleic acid binding; Cellular component= intracellular
  Homolog annotation: Hit_ID=Q6ZAQ9; Match level="QueryCoverage=84%, HitCoverage=90%, E-value=1e-20, Identity=40%"; Hit description =Putative S-locus protein 4
  Pfam annotation: Domain name=DUF618; Domain location=157-217; Score =9.5; E_value=0.00062; Accession=PF04818.4; Description=Protein of unknown function, DUF618
  Subcellular localization annotation: CTP_CleavageSite=33; ConfidenceScore=5.28e-01
MEASASARRSAAGPDPRAKKPRLAPPPRDPRSYAATASSNGNTSAAEQALVDELLGQYRTALGELTFNSKPIITNLTIIAGENLQAAKPIAALICANILEVTFVFDSSYARQTAVFPSSFSIDHVKVILRRHQVVTSTHWLSVMLDISHVLGGAVPSEQKLPSLYLLDSIVKNIGKDYVKHFSARLPEVFCKAYKQVDPSIHHSMRHLFGTWKGVFPLPPLQMIEKELGFQSSANGSSSAAPSRTDSQSPRPSNSIHGILGSGAKTTVIADTGGDIERPNRLGTDRNAGRRLDASNARPNIQRTQRDPSSNSLHEKQAVRDVGGLGFSNISQQAVVGTGQVRSKPKAQDGIGGPYYASGVGSSEEQFDRRSNFYASKDARPSGSVRLESALLPTPSINADRVGKPSSNKSWKHSEEEEYVWDDVHSKAAEYGGSHNVIKGEWMSDDGNAKFANLQRAKWADAGPVERIDPNTHKLDNVSRFGLGAGQERRISEYMDQEEYLLGKREVEARIDKEIRSDGQQFPAARGSPLWVSQEKTLLDIGLEPRISRFSTQPAERSTIYTGTMSAGITSSVPVGLSGNYAGRSSLDTANGMPIRSTEAFGQQKHRYWSSSPPQADTSSSTAPFARQGSPNPAESDFYPSRSLSRQNPQEYSKRALPVLAKDSHVVVHNDGFTQGQPSLQATRQTQKYPILQSKSHIKPSDQLQASFSRENSPSLFRPSIELGEVSLPSDSTPISSDLTSASNLLASLVKSGFKPNNHSDAQALGPSGPLPVASLSLQNAAGENTTLQAHTPNTSRPPLPPPPSTQSAEKAAPLSSLLSSLVAKGLISSPAYDSSSAVISQPNKASSMNVKDATASAVPLLALRPSVGKASSNSDSSAPTNASLTKAIEIKMSDLIGLEFKPEKLRKYHEHVISSLFDDDQSHQCKTCGNRFRLEELSLHTSSCGQRKSETIYTGIAPKRWYPSKNIYIDGSHEIEDSTEASDGDLGSAEEVCEFMVPSDERQIICALCGEPFDDIYSFEKGDWMYKDAVFLDYPKGESSCRNSVEGEEHVPIVHVRCMPRGSNDGMEVD

SEQ ID NO: 55277 - protein, 120 aa, Zea mays
  Coding DNA Sequence Number=SeqID_13498
MACLKYLYKYSGVNDPDHHSPDPLRLAEVEAWVKEIGPMASCLLPLPEDVSIKAEKKRKRDVNAKASTRDKPVVDLFALVVPTERYMEDARARHDDSWRCVAVTPLAHRIVRCYTRQSGE

SEQ ID NO: 55278 - protein, 314 aa, Zea mays
  Coding DNA Sequence Number=SeqID_13499
  Gene Ontology: Mol. function=UDP-3-O-[3-hydroxymyristoyl] N -acetylglucosamine deacetylase activity; Biological process=lipid A biosynthetic process
  Homolog annotation: Hit_ID=Q10PS1; Match level="QueryCoverage=72%, HitCoverage=59%, E-value=4e-71, Identity=69%"; Hit description=UDP-3- 0-acyl N-acetylglucosamine deacetylase family protein, expressed
  Pfam annotation: Domain name=LpxC; Domain location=91-314; Score= -32.2; E_value=8.9e-11; Accession=PF03331.4; Description=UDP-3-O-acyl N-acetylglycosamine deacetylase
MGKTGDEKAERQKQLFAAAETLEGAVEECSKGRPRPFFGATASDRHTLGRDRFLPPLPSPPPPCPPPPPGPSHPSPAQPSPGSRLTLLCQTGRPQQTLAAAVSRSGVGLHSGARVTATLFPTQAGEGRYFLVEGDEEARVAAEVGNAEPLSQLCTTLRRGEGAHTRVRTVEHLLSAMEALGVDNCRIEVSGGDEFPIFNVGRCRVIVVFSIYVKVIKQCQIPLLDGSAQEWVEAVQGVGLCAAEDANGEKLDKLAPEIQEPVYLRKHDCFIAAFPSPQIHITCGIDFPKILASPLVRMAQEKMIQQEKMKHQKD

SEQ ID NO: 55279 - protein, 136 aa, Zea mays
  Coding DNA Sequence Number=SeqID_13500
MEPCLCTSMGRSCLHLPSGHLPLAMATALGKHHRVIKVLKQGRVKAERTQKGLAAEGKAVAVNFGRDIRRSEVRKNGGAVKHVFIAVAVTPVVYGEFRGGHGNAMARLGHAVANGEGTTAVSTLPAGGEPGKMYYG

SEQ ID NO: 55280 - protein, 233 aa, Zea mays
  Coding DNA Sequence Number=SeqID_13501
MEPIHSPPVLNQTHPKITRKISSQGVLQGICAAQLMDPHAPLHIQQQTAKPKQSQARPGELSFEVRARRVSSSPGCGFRLAETATERRAGPRRVADGDGCQLRTTISTGGSNGGEAADPPSATANGWTNPFRRGRSRKPRGETAELQRAAGACTFGRLFSISRHFIVVAKFSHARENVALRVQSSTRASQCHLNAVRGYPQGKGGATTTWRPATPSHSHWVVAMDPNPNVSSQ

SEQ ID NO: 55281 - protein, 629 aa, Zea mays
  Coding DNA Sequence Number=SeqID_13502
  Gene Ontology: Mol. function=RNA-directed DNA polymerase activity; Cellular component=intracellular; Biological process=RNA-dependent DNA replication
  Homolog annotation: Hit_ID=UPI00004C1733; Match level="QueryCoverage =99%, HitCoverage=47%, E-value=0.0, Identity=83%"; Hit description =UPI00004C1733 related cluster
  Pfam annotation: Domain name=RnaseH; Domain location=334-461; Score =1.5; E_value=4.2e-05; Accession=PF00075.14; Description=RNase H
MKESDQLATSFITPFGMYYYVTMPFGLRNAGVTYQRCMNHVFGEHIGRTVKAYVDDIVVKTKKASDLLSDLETTFRCLKAKGIKLNPEKCVFGVPRGMLLGFIVSERGIEANPEKIVAITNMGPIKDLKGVQRVMVCLAALSRFISRLGERGLPLYRLLRKTERFTWTPEAEEALGNLKALLANAPILVPPAAGEALLIYVAATTQVVSAAIVVERREEGHALLIQRPIYFISEVLSETKIRYPQIQKLLYAVILTRRKLRHYFESHPVTVVSSFPLGEIIQCREASGRIAKWAVEIMGETISFAPRKAIKSQVLANFVAEWVDTQLPAALIQLELWTMFFDGSLMKTGAGARLLFISPLRKHLRYVLRLHFPASNNVAEYEALVNGLRIAIELGVRRLDARGDSQLVIDQVMKNSHCRDPKMEAYFDEVRRLEDKFYGLEVNHVARRYNETADELAKIASGRTTVPPDVFSRDLHQPSVKTDETPEPEKASAQPEAPSAQPEAFLAPEGFYWPTAVADANRIVCTCQGCQFYAKQTYLLAQALQTIPITWSFAVWGLDLVGPLQKAPGGYTHLLVAIDKFSKWIEAVAFFTNIIHRFGVPNSIITDNGTQFIGRKFLDFCEDHHIRVD

SEQ ID NO: 55282 - protein, 347 aa, Zea mays
  Coding DNA Sequence Number=SeqID_13503
  Gene Ontology: Mol. function=phospholipase A1 activity; Cellular component=cytoplasm; Biological process=lipid metabolic process
  Homolog annotation: Hit_ID=Q6BTJ4; Match level="QueryCoverage=62%, HitCoverage=26%, E-value=3e-20, Identity=39%"; Hit description =Similar to CA1621|CaIFF6 Candida albicans CaIFF6 unknown function
  Pfam annotation: Domain name=AT_hook; Domain location=154-166; Score =8.2; E_value=0.88; Accession=PF02178.9; Description=AT hook motif
  Pfam annotation: Domain name=AT_hook; Domain location=230-242; Score =8.2; E_value=0.88; Accession=PF02178.9; Description=AT hook motif
  Pfam annotation: Domain name=Extensin_2; Domain location=35-347; Score=-129.9; E_value=0.031; Accession=PF04554.4; Description =Extensin-like region
  Pfam module annotation: Pfam domain module=AT_hook::AT_hook::Extensin_ 2; Domain location=154-166::230-242::35-347
MTASKKGPGKGDTPKRILLREGNRPRASLLIRGSKAGPSEGFNSRLRALGFRAHYWSEVRRPVPRKGSTAISGHSGSAPTTDQGENDLVTESHQREASSPRTPSKGDRVRQITRRARTRAQPQKTANSALPDPRARTRAQPRKTANSAPPDPRARTRARPRKTTNSAPPDPRARTWAQPRKTANSAPPNPRARTWAQPQKTTNSAPPDPRARTRAQPRKTANSTPPDPRARTRARPRKTTNSATPDPRAQTWAQPRKTANSAPPDPRARTWAQPRKTTNSASPDPRARTRAQPRRTTNSASPDPRARTQPWHQPTVSASSDPGARTRPRPWKTDSTSTSEEPPPRPT

SEQ ID NO: 55283 - protein, 635 aa, Zea mays
  Coding DNA Sequence Number=SeqID_13504
  Gene Ontology: Mol. function=RNA-directed DNA polymerase activity; Cellular component=intracellular; Biological process=RNA-dependent DNA replication
  Homolog annotation: Hit_ID=UPI00004C1733; Match level="QueryCoverage =98%, HitCoverage=46%, E-value=0.0, Identity=92%"; Hit description =UPI00004C1733 related cluster
  Pfam annotation: Domain name=RVT_1; Domain location=56-225; Score =141.4; E_value=2.4e-39; Accession=PF00078.17; Description=Reverse transcriptase (RNA-dependent
  Pfam annotation: Domain name=RnaseH; Domain location=455-582; Score= -13.7; E_value=0.0011; Accession=PF00075.14; Description=RNase H
  Pfam module annotation: Pfam domain module=RVT_1::RnaseH; Domain location=56-225::455-582
MPGIPRDVAEHSLDIRAGARPVKQPLRRFDEEKRRAIGEEIHKLMAAGFIKEVFHPEWLANPVLVRKRGGKWRMCVDYTGLNKACPKVPYPLPRIDQIVDSTAGCETLSFLDAYSGYHQIRMKESDQLATSFITPFGMYCYVTMPFGLRNAGATYQRCMNHVFGKHIGRTVEAYVDDIVVKTREASDLLFDLEVTFRCLKAKGVKLNPEKCVFGVPRGMLLGFIVSERGIEANPEKIAAITSMGPIKDLKGVQRVMGCLAALSRFISCLGERGLPLYRLLRKAECFTWTPEAKEALGNLKALLTNAPILVPPAAGEALLIYVAATTQVVSAAIVVERREEGHALPVQRPVYFISEVLSETKIRYPQIQKLLYAVLLTRRKLRHYFESHPVTVVSSFPLGEIIQCREATGRIAKWAVEIMGDTISFAPRKAIKSQVLADFVAEWVDTQLPTAPIQPELRTMFFDGSLMKTGASVGLLFISPLGKHLRYVLRLHFPASKNVAEYEALVNGLRIAIELGVRRLDARGDSQLVIDQVIKNSHCHDPKMEAYCNEVRCLEDKFYGLELNHIARRYNKTADELAKIASGRTTVPPDVFSQDLHQPSVKTDDTPEPEKASVQPEAPSAQSEIPSAQSEVPSA

SEQ ID NO: 55284 - protein, 363 aa, Zea mays
  Coding DNA Sequence Number=SeqID_13505
  Gene Ontology: Mol. function=binding; Cellular component =mitochondrial inner membrane; Biological process=transport
  Homolog annotation: Hit_ID=Q10R11; Match level="QueryCoverage=89%, HitCoverage=75%, E-value=1e-120, Identity=71%"; Hit description =Mitochondrial carrier, putative, expressed
  Pfam annotation: Domain name=Mito_carr; Domain location=168-259; Score=82.8; E_value=1.1e-21; Accession=PF00153.17; Description =Mitochondrial carrier protein
  Pfam annotation: Domain name=Mito_carr; Domain location=270-360; Score=80.4; E_value=5.6e-21; Accession=PF00153.17; Description =Mitochondrial carrier protein
  Pfam annotation: Domain name=Mito_carr; Domain location=73-157; Score= 35.1; E_value=2.5e-07; Accession=PF00153.17; Description =Mitochondrial carrier protein
  Pfam module annotation: Pfam domain module=Mito_carr::Mito_carr::Mito_ carr; Domain location=168-259::270-360::73-157
MDDAHSFHRQSPVAPAPSRNEELNWKEAVLEETMSFGTVGMEEESGAAAAAAAAEEIRRLPAEVNWEMLDKSRFFVLGAALFSGVSAALYPAVVVKIHLQVAPPPQAARATTAAILRRDGLRGFYRGFGASLGGTVPARALYMAALEATKSSVGPAAVRLGVSEPAASAAASAAAGVSAAVAAQVVWTPVDVISQRLMVQTPACCRYRGGVDACRKILLADGVRGLYRGFGLSILTYAPSNAVWWSTYAVAQRCLWRAVGPERSESCASLMAVQGASAAVAGGAAALVTMPLDTVKTRLQVMEADAARPTLASTVRGLLREGGWAACYRGLVPRWGSMSLSAATMVTTYEFLKRLSAKDGSLG

SEQ ID NO: 55285 - protein, 495 aa, Zea mays
  Coding DNA Sequence Number=SeqID_13506
  Gene Ontology: Mol. function=Rab GTPase activator activity; Cellular component=intracellular; Biological process=regulation of Rab GTPase activity
  Homolog annotation: Hit_ID=Q69NG6; Match level="QueryCoverage=99%, HitCoverage=79%, E-value=0.0, Identity=82%"; Hit description =Putative GTPase activating protein
  Pfam annotation: Domain name=TBC; Domain location=228-433; Score= -64.1; E_value=0.0052; Accession=PF00566.9; Description=TBC domain
MGSFVMVEGSFSRKFAVVHVVISSVIEVFCILESNCITDINAPLLLYQGIEASIRAEVWPFLLGVYDLNSSEEERNSIKIKKRKQYEKLRRQCQQILNGYKGNGLKAITELNSDECSSLDGIAEGSESPCFEDANAIRAPVSLEEVKPEQNEADQPDNILCDVVECMEEDADELAYAYPCKAESESSDSESSDEDDPGGISVSGDENCDPDTKFTMSNSFKADFFRSSRTSEDFATWQRIIRLDAIRSNSEWILFSRNQSEVPKERALQSAASVGLKDYEHLEPSMIYHAARLVGLLEAYAVYDPEIGYCQGMSDLLSPIIAVMEDDDEAFWCFVGFMRKARHNFRLDEVGIRRQLKIVSQIIKRKDSHLYRHLQKLQAEDCFFVYRMVVVLFRRELTFEQTVCLWEVMWADQAAIRAGIGRSTWGRIRLRAPPTDDLLLYAIAACVLQRRKLIIEKYSSMDEILRECNSMAGQLDVWRLLDDAHDLVVNLHDKI

SEQ ID NO: 55286 - protein, 91 aa, Zea mays
  Coding DNA Sequence Number=SeqID_13507
  Gene Ontology: Mol. function=RNA binding
  Homolog annotation: Hit_ID=Q5ZC75; Match level="QueryCoverage=81%, HitCoverage=16%, E-value=1e-29, Identity=89%"; Hit description=30S ribosomal protein S1-like
  Pfam annotation: Domain name=S1; Domain location=3-76; Score=48.5; E _value=2.3e-11; Accession=PF00575.13; Description=S1 RNA binding domain
MTYLKEGTLLQGTVCKIFPYGARVRIAGTNRSGLLHISNISRGNVLSVSDILKIDDEVKVIVIKSNVPDKIAVSCELAAVFVWILPNTFFV

SEQ ID NO: 55287 - protein, 97 aa, Zea mays
  Coding DNA Sequence Number=SeqID_13508
MGYLWRVRLSSFAAGAATASAAGFFLLYKDHLLARAAIISQKYYNLMMNFPFMSLFSLIRPVEDIKETSEKHYAALNKRISALESRREPGTIKEASD

SEQ ID NO: 55288 - protein, 277 aa, Zea mays
  Coding DNA Sequence Number=SeqID_13509
  Gene Ontology: Mol. function=DNA binding; Cellular component =nucleosome; Biological process=chromosome organization and biogenesis (sensu Eukaryota)
  Homolog annotation: Hit_ID=Q6WS85; Match level="QueryCoverage=86%, HitCoverage=96%, E-value=9e-81, Identity=60%"; Hit description =Single myb histone 1
  Pfam annotation: Domain name=Linker_histone; Domain location=138-189; Score=-13.5; E_value=0.098; Accession=PF00538.9; Description=linker histone H1 and H5 family
  Pfam annotation: Domain name=Myb_DNA-binding; Domain location=36-88; Score=28.6; E_value=2.2e-05; Accession=PF00249.21; Description=Myb -like DNA-binding domain
  Pfam module annotation: Pfam domain module=Linker_histone::Myb_DNA -binding; Domain location=138-189::36-88
MTEPCPNRESGTEGSLSNKTTGPRGPDNPCYRNISIGRWTPEEEAALKAGVAKHGPGKWRTILRDSDFSALLRLRSNVDLKDKWRNLSVTAGGYGSREKARMALKKGRRVVPKLTAEPMDVDEKDMDNAHDTVIDVEPLDDLIVEAIRKLNEPSGSNKAVISGYIEVNQKYRIAPSSSLGGISTKVSSSEGMNTENNNVKRLTKPQVVAELEKMKGMTREEAAAFAAKAVAEAEVAMAEAEEAARVAEAAENDAEAAKAFLDAVILSMRNRNAASMV

SEQ ID NO: 55289 - protein, 89 aa, Zea mays
  Coding DNA Sequence Number=SeqID_13510
  Homolog annotation: Hit_ID=Q69LJ7; Match level="QueryCoverage=44%, HitCoverage=3%, E-value=3e-13, Identity=90%"; Hit description =Putative respiratory burst oxidase protein E
  Pfam annotation: Domain name=NADPH_Ox; Domain location=9-80; Score =18.1; E_value=1.9e-07; Accession=PF08414.1; Description=Respiratory burst NADPH oxidase
MTHISGLCDTNRSRAAQGSAPVHDSSVAGMVDSKEFAVGIFDALARRRRQNLERISKDELYKFWLQISRYGCTGDRRKDSKRRTDEAFP

SEQ ID NO: 55290 - protein, 328 aa, Zea mays
  Coding DNA Sequence Number=SeqID_13511
  Gene Ontology: Mol. function=DNA binding
  Homolog annotation: Hit_ID=Q651V3; Match level="QueryCoverage=66%, HitCoverage=56%, E-value=8e-37, Identity=37%"; Hit description=NAM -like protein
  Pfam annotation: Domain name=NADPH_Ox; Domain location=1-45; Score= -16.1; E_value=0.00049; Accession=PF08414.1; Description=Respiratory burst NADPH oxidase
MVDSKEFAVGIFDALARRRRQNLERISKDELYKFWLQISRMENGQLSNEWAEEQNEQYLHDDWADSLGVFIENPEYANTFEDDTTSQQTFPSHEKAKGKEQKKLGKQKNVAHRGSAFTKEEDAVICSAFLHIDDAVKMYEEKEAFQFLHYWKLLHNEPKWNDKVLELNNTPTRKTQQPEGPCNPVGTQPNTENAAITRPEGRDTAKKRRFKEDTASSSAAVEVLQQMQERNEKTEEKQDEQMQEILTLKGNKMRLTEKMFDLQKHEMEVKNKLKEEQLSLTKQDIEARAKQSEAQLLTAELGIMGADLDKLSPSVRAYYVAMQQQIME

SEQ ID NO: 55291 - protein, 77 aa, Zea mays
  Coding DNA Sequence Number=SeqID_13512
MAKEVHRPDDLRTENIDGDVPEEARGMGGPARRREEGTYEDGGENEGGTGGGVGGSLGGSADDDGDVSVYIEPWRRI

SEQ ID NO: 55292 - protein, 57 aa, Zea mays
  Coding DNA Sequence Number=SeqID_13513
MDDHLFTPSRFSQLVLELVSSVESTEEMDLKGKGKVTNEKETIPIDDKPKGEKIIDS

SEQ ID NO: 55293 - protein, 261 aa, Zea mays
  Coding DNA Sequence Number=SeqID_13514
MQIADRRSQHVAVAATKEERRKRNRRRVIVVFMYSTGLLGCKWNYMYKWARFYRALNQLAQSNDQILISLQDYFKSKSLSQRPMAREDLTQVLGKRVVSDEDTLSKAQRLAAKRNLEISEYSFLPFKPKVIATKLNNVGIRLGRNDKEVLTSAISIKNIEVDRLMASSISSPSIRRAVLNEEDDNDIDEHLSHAIKRWDENSEHDDLEWGYDLSAVPCRVNPVVFDVGAIDEGDHYSKFLLRNKSDDFKWGRFQYNEAARG

SEQ ID NO: 55294 - protein, 129 aa, Zea mays
  Coding DNA Sequence Number=SeqID_13515
MEDRWCGDSDRPHQTATTKTSHYPGSEVPVTLCGLPNMEPLPNIRSAKSAEGHLAASYFRGDSHYPRVWRMIEGKLVRRFSRTPSAGMPRTARYNPAGSTPGGPLVSVTCGLAIASLFPNCQSSSGVRM

SEQ ID NO: 55295 - protein, 261 aa, Zea mays
  Coding DNA Sequence Number=SeqID_13516
MAPPLALATVPASHLASLAASCHVPALRKSHGVPCHYLVGGEDPYSQIWFFGAPTLRLVHVTSIFARISQGLGHYEKHCFNRRAKSSTRLLWRPKVQRINEAVANSERVQTALEVVPLALEQPKVLPATGPTKSTSKSDLLHSDDCNCSVPPSEKTPPSPRLGFSPKKSRILQSSTSLIMANFAAYLRPFIPQELVIDDGGNDRRSRVRIHLALEQEARRDDFIIATDVKGVVPPLDGGHPHELHVYPSGGGLLWQAVEVA

SEQ ID NO: 55296 - protein, 284 aa, Zea mays
  Coding DNA Sequence Number=SeqID_13517
  Gene Ontology: Mol. function=microtubule motor activity; Cellular component=microtubule associated complex; Biological process =microtubule-based movement
  Homolog annotation: Hit_ID=Q9SV36; Match level="QueryCoverage=97%, HitCoverage=23%, E-value=9e-77, Identity=55%"; Hit description =Kinesin-like protein
  Pfam annotation: Domain name=Arm; Domain location=1-37; Score=3.3; E _value=4.8; Accession=PF00514.13; Description=Armadillobeta-catenin -like repeat
  Pfam annotation: Domain name=Arm; Domain location=122-162; Score =19.6; E_value=0.011; Accession=PF00514.13; Description=Armadillobeta- catenin-like repeat
  Pfam annotation: Domain name=Arm; Domain location=38-79; Score=31.3; E_value=3.4e-06; Accession=PF00514.13; Description=Armadillobeta -catenin-like repeat
  Pfam annotation: Domain name=Arm; Domain location=80-121; Score=14.7; E_value=0.18; Accession=PF00514.13; Description=Armadillobeta-catenin- like repeat
  Pfam module annotation: Pfam domain module=Arm::Arm::Arm::Arm; Domain location=1-37::122-162::38-79::80-121
MAKFHVPVGLPNVLALLKSEDLDVQIHAVKVVANLAAEDVNQERIVEEGGLDALLSLLETSENTTIHRVTAGAVANLAMNGSNQGVIMNKGGARLLANVASETDDPQTLRMVAGAIANLCGNEKLHLMLKQDGGIKALLGMFRSGHADVIAQIARGIANFAKCESRMISQGHRKGRSLLIEDGVLSWMVAHSTMFSASTRRHIELAFCHLAQNGKHIEVCSRPFCADILPNIAHIFAEDNTCDIIASGGIKELLRISRESPREDTRNLAKKALDSNPAFLREIQ

SEQ ID NO: 55297 - protein, 58 aa, Zea mays
  Coding DNA Sequence Number=SeqID_13518
MANEVATTEARTVIIVRRDARLSLLVLEFRIARSVKKYELLFLYKLLLLKSFLMSYGK

SEQ ID NO: 55298 - protein, 173 aa, Zea mays
  Coding DNA Sequence Number=SeqID_13519
MELNGRRHKYNLYQDSSSRPLALIPSAVAALPPPAAVAALSYALLRALPAAVAATAHCPPAPALLCARQPPSRPSLCAARAASRRRGHRIVRPPLRSFARAPALSAAPPASAPRICLRLRASLLRLQRRSPLLRGSASVCVQPCSVCSTDRPCSAVAALPPSAKAPALPDSLC

SEQ ID NO: 55299 - protein, 135 aa, Zea mays
  Coding DNA Sequence Number=SeqID_13520
MYLLRPIYKTQGQQQVDSMEKNLADLKQVLEDNMAVVHDLTSWKPQIVAEVGSLRTDLGKVSDTVDNLDMVSGCRAFYYGLRRLLIVRQLMRQCLGISLCICPVQDPLLIALTEHHRKVPRARLNAQEKRPVRPT

SEQ ID NO: 55300 - protein, 65 aa, Zea mays
  Coding DNA Sequence Number=SeqID_13521
MALTSTSDMNRWIPRWCTQVVAEKRMDDSVRCARLVSGELAPLGNSSAAYGYNSPDYPVVHRTVR

SEQ ID NO: 55301 - protein, 130 aa, Zea mays
  Coding DNA Sequence Number=SeqID_13522
MNTSVDMRTRSISGVPGVGGAMMRAIYGGRLGGSRPRFRWTEAYRLARIRRSIIRLEERPAARQLFSRRCDDFYPQVVGRHAVPEVRAPDSHAVHEDLRQAFMEVGISADERKVYQDSTSKPQVRAFKPC

SEQ ID NO: 55302 - protein, 149 aa, Zea mays
  Coding DNA Sequence Number=SeqID_13523
MEFAGDAQRSIQSPTAHPEWLTTDYCAGESGHAVVSLDEVRRAIARTAVLFHTNGAHQRLRDILVDVPGGASGVGSWYRGGSSVLVAEARRTVAKLAGSNGDLGHGRGKRRPTNGPELSARSAQRTQTPDQWVPMRGETGSCGGARKRS

SEQ ID NO: 55303 - protein, 111 aa, Zea mays
  Coding DNA Sequence Number=SeqID_13524
MGSLGPSVVTLQEQQQQPKPRKPAAAGGGCHELEQQSSNCGGSSFRMPLHYPRYKKADYEAMPEWRVDCLLREYGLPVAGDLRGKREFAMGAFLWPGSSDSVCISSFSIVP

SEQ ID NO: 55304 - protein, 167 aa, Zea mays
  Coding DNA Sequence Number=SeqID_13525
  Homolog annotation: Hit_ID=Q6K241; Match level="QueryCoverage=36%, HitCoverage=35%, E-value=2e-18, Identity=68%"; Hit description =Putative 50S ribosomal protein L21, chloroplast
  Pfam annotation: Domain name=Ribosomal_L21p; Domain location=87-143; Score=25.7; E_value=4.9e-09; Accession=PF00829.11; Description =Ribosomal prokaryotic L21 protein
  Subcellular localization annotation: CTP_CleavageSite=41; ConfidenceScore=5.34e-01
MATATLPLRLLPSKTLTLSTLPSLRRSLSVAALEPRRWRLRAAAEEAPEAVEVEFVEPETEAEEKPAVPEPIEAQLAAAGAGKDADIFAVVMIILNKVLLVSTREKAYIGMPVGRDDKVIVFKYKKKKKYQRKLGHRQPNTRLRITGISGYEEYPADPILDPAAALN

SEQ ID NO: 55305 - protein, 73 aa, Zea mays
  Coding DNA Sequence Number=SeqID_13526
  Subcellular localization annotation: CTP_CleavageSite=21; ConfidenceScore=5.27e-01
MAAVAVVPRSEVVAVVPKSVVAAPRSRGRATAGLLCGQVAASPGPRGGDTPKASEQAALPDVRVATASHEARV

SEQ ID NO: 55306 - protein, 165 aa, Zea mays
  Coding DNA Sequence Number=SeqID_13527
  Gene Ontology: Mol. function=peptidase activity; Biological process =protein targeting
  Homolog annotation: Hit_ID=Q00Z49; Match level="QueryCoverage=91%, HitCoverage=36%, E-value=8e-34, Identity=46%"; Hit description=[S] KOG0324 Uncharacterized conserved protein
  Pfam annotation: Domain name=DUF862; Domain location=2-156; Score =196.0; E_value=8.7e-56; Accession=PF05903.5; Description=Eukaryotic protein of unknown function (DUF862)
MKEVVLHVYDVTNSDSEKTNNTILQINRIFKDRIGLGGIFHSAVQVYGEDEWSFGFCESGSGVFSCPIGKNPMYTYRERIVLGETECGIAAVNRILRELSREWPGHSYDLLSRNCNHFCDVLCERLGVPKLPGWVNRFANAGDTAVVVAENTAVKVWSFKYRLCA

SEQ ID NO: 55307 - protein, 88 aa, Zea mays
  Coding DNA Sequence Number=SeqID_13528
MSAPTGLVGSLSWENLGRQVWFWPSLYMSWKSTTTISYDWKEKYFHDTWITKERRPAFTASMYQIWNLLTSHDSSMSLPKVNMNLRGS

SEQ ID NO: 55308 - protein, 265 aa, Zea mays
  Coding DNA Sequence Number=SeqID_13529
  Homolog annotation: Hit_ID=O24564; Match level="QueryCoverage=44%, HitCoverage=8%, E-value=5e-46, Identity=80%"; Hit description =Embryogenesis transmembrane protein
MASTAATPEAGNNHSEDDTIVELPIVVIGSTGQESIDTPSTRYLLAPSHHVSSSSFTVDIELLWRLRKYLLLLGILAVGVTYNTGLTPPGGFWSKNTQGQSGHEAGDPVLRALFFPRHEGSDSASAPEDDELDLAQPQGSDSVLASDDGLRLARPGARTRPRPRKTDSTSTSEEPPPRLTQGSDRPRHRGGHHYPTPSYLRLQGTRPVSHLARPGKQIMMVPRVLHDDGGSQPLTEARRRQQGLDSPDSCPSARLQRSSDGHDIT

SEQ ID NO: 55309 - protein, 291 aa, Zea mays
  Coding DNA Sequence Number=SeqID_13530
  Homolog annotation: Hit_ID=Q41850; Match level="QueryCoverage=99%, HitCoverage=100%, E-value=1e-103, Identity=72%"; Hit description =Rab28 protein
  Pfam annotation: Domain name=SMP; Domain location=162-223; Score =107.3; E_value=4.6e-29; Accession=PF04927.3; Description=Seed maturation protein
  Pfam annotation: Domain name=SMP; Domain location=227-289; Score =96.7; E_value=7e-26; Accession=PF04927.3; Description=Seed maturation protein
  Pfam annotation: Domain name=SMP; Domain location=23-82; Score=107.1; E_value=5.3e-29; Accession=PF04927.3; Description=Seed maturation protein
  Pfam module annotation: Pfam domain module=SMP::SMP::SMP; Domain location=162-223::227-289::23-82
MSQEQPRRPSGHEETSGGGEQGAVRYGDVFPAVSGGLAEKPVAPQDAATMQSAENLVFGQTLKGGPAAAMQSAATANERMGAVGHDQATDATAVQGVTVSETRVPGGGRIVTEFVAGQAVGQYLARDDDDGAAATAGGGIAGPGAGAGGGASAGVAGKDITKVTIGEALEATALAAGDAPVERSDAAAIQAAEARATGLDANVPGGLAAQAQSAAAANSWAWGDEDKATLGDVLANATARLVADKPVESADALGVAGAENRNRNDGTARPGGVAASMAAAARLNRNEAVWE

SEQ ID NO: 55310 - protein, 175 aa, Zea mays
  Coding DNA Sequence Number=SeqID_13531
  Homolog annotation: Hit_ID=Q10RG6; Match level="QueryCoverage=73%, HitCoverage=80%, E-value=1e-33, Identity=60%"; Hit description =Expressed protein
MRIHPASPTAGGKKDLRRLPHVYSKVLELPLPADTDVQVFEGPDAFHFVAAPAAGARAAATVRVRTVRIHPGVTKVVVQAGAAERAADDDAASDSMELDRWRSRLPEPTCPAMAVAGYVDGQLVVTVPKGPGAEEGADAGQGEVTWRATQPEVLQLDEPCSDVLEKSPKINEKII

SEQ ID NO: 55311 - protein, 747 aa, Zea mays
  Coding DNA Sequence Number=SeqID_13532
  Gene Ontology: Mol. function=protein serine/threonine kinase activity; Cellular component=membrane; Biological process=protein amino acid phosphorylation
  Homolog annotation: Hit_ID=Q9FPR5; Match level="QueryCoverage=83%, HitCoverage=77%, E-value=0.0, Identity=67%"; Hit description=EDR1
  Pfam annotation: Domain name=Pkinase_Tyr; Domain location=664-746; Score=-161.9; E_value=0.015; Accession=PF07714.7; Description =Protein tyrosine kinase
  Subcellular localization annotation: CTP_CleavageSite=76; ConfidenceScore=5.71e-01
MKSLFKSKIRWQHRSNDPASPSGQPQPQPQQALGPPSPSPSSSPSSAAPLSVSTAATSSPSSPPSAAATPTGAGAAAAAGAGAAGEDYIASEEEFQMQLAMALSASSNSDCVGDLDGEQIRKAKLISLDRFAAHRDEGHTAESLSRRYWDYNFLDYHEKVIDGFYDIFGSMESSRQGNMPSLADLQTGIGDLGFEVIVVNRAIDSTLQEMEQVAQCILLDFPVANIALLVQRIAELVTDNMGGPVKDANDMLTRWLEKSTELRTSLQTSLLPIGCIKIGLSRHRALLFKILADSVGILCKLVKGSNYTGGDDDDAINIIKMDNEREFLVDLMAAPGALIPADILSWKGNSLNSNRKLGLSQTAGSSSTVGANMGPSVLPLEPKDGPSTSAGTSSQQKVVPQNEHPRNLNRLPDLQEIPESKNLFADLNPFGDTKSKKTSVPFKGPDQRNNELQKRRENIVPNGGRPQQRLVMKNWSPYNDVSNNKQYNYVEDSFARRNVGNNAASSSSQITQQAARSNLNSGLRNDASYHNYDSIMAGTSATNITSTAETGKVPERVLRGDLDKGQTNYRLQDQHVVGQPPQERLPWGNPAEGRVPMNRFQNQAKQHMGNIDTKQDHKKLLPDPKKSPLDRFMDTSLPSRNLDVRSQRLDFDDVSECEIPWEDLVIGERIGLGSYGEVYRADWNGTEVAVKKFLDQDFYGDALDEFRSEVRIMRRLRHPNIVLFMGAVTRPPNLSIVSEYLPRGKLI

SEQ ID NO: 55312 - protein, 977 aa, Zea mays
  Coding DNA Sequence Number=SeqID_13533
  Gene Ontology: Mol. function=helicase activity; Cellular component =cellular_component; Biological process=multicellular organismal development
  Homolog annotation: Hit_ID=Q10RG1; Match level="QueryCoverage=98%, HitCoverage=100%, E-value=0.0, Identity=73%"; Hit description=RNA helicase SDE3, putative, expressed
  Pfam annotation: Domain name=UvrD-helicase; Domain location=395-837; Score=-203.5; E_value=0.0043; Accession=PF00580.11; Description =UvrDREP helicase
MGVHRRNYSDDEFSVAGERPEVEFMDFQNDDTFQDYSCEDTPVLVSAPFPFEDGKPKSALVGETSADTIQIENTSPESVNLWSVRIFSSNPEDSYVLSMMRPPSDDANEEEKHAFLALTSVEDRTLLPGQTLTVWLSCTPKDIGLHTSIVHVDIGDEKIERVAFLLADDNVSQALFSDKPYSRRRDQVKKFGPSPTVPGRRPTKQHVQGFKHRLPQYAIPAHIRELIESKQKPDVLYDELSMVNYAEYFSTLLVMEELNLEEEMRTYDMEGVLMRRRGMHFLSLEVPGLAEKRPSLVQGDFVVARYAGNHAQAYQGFIHRVEADEIFLQFDHQFHMNHHDRNRYHVSFTYNRVNMRRLYKSIDDAKYLGPGILFPRQSPCRVLKRWPFNPLNPHINTEQADAVAMVLACRGGSPYVIYGPPGTGKTMTIVEAVLQLYTGKKRANILICAASNTAADHVLEKLLQASYLIRPSDIFRLNAQSRQYEDVSTDFIKFCFFQDRVFMCPPLQALVRYRIVISTYSSSYQLQAEGIRQGHFTHIFLDEAGQASEPEAMVPLSGLCGRDTVVVLAGDPKQLGPVVYCKQAEKDGLGTSYLERLLTDFEPYGTRNPNYVTKLVRNYRCHPAILELPSELFYEGELIPCKEGESSAYDCIGLPDKSFPVLFIGIQGCDEREGANPSWFNRIEVSKVVSIIRNLTRGGDVDASDIGVITPYRQQVAKIKKALEAFEMPGLKVGSVEQFQGQEREVIIISTVRSTVKHNEFDRFFNLGFLSNHKRFNVSITRAKSLLVIVGNPYIITKDRHWDRLLRYCADNGSYQGCPLPPPESHAYSDGTRFFSEHDDGHQAGPSGQDDYYNQEATYCSYNNQEPSDFGFRLGQWVLNLLRRTKSYRPRSCLRTRSSHYSATPKRISRRRRSRTSSRKGLHREACWPTRHRRQPPTISSRVHMRRSTASLLAGATFRASRRKAGATDRQTCDRHW

SEQ ID NO: 55313 - protein, 146 aa, Zea mays
  Coding DNA Sequence Number=SeqID_13534
MADRPSERASATHARGHAYEPQRRPNAAHACTTRVDDCPTQWDPTGNLPTLTLSPLFSRLRQTDPACQTGTRTRNHATDQRAWTHRGPLLVAPRTGALSCASPFTPCRCPWGPRVSRTRPARSNLDRGFEIRWLRESDTPLPHAFC

SEQ ID NO: 55314 - protein, 146 aa, Zea mays
  Coding DNA Sequence Number=SeqID_13535
MSQTCVTFVLSVDGGASCPSSQNSAFKKRYEKDVVKEGLQLQAPRQADANRPRHRTQKGRRTLFRNRKRVVGCGVPARGHGRSRRRRADGVGGGGTTPGTVMPFIFCPIPFRANDATRSFRRYMMLGAAAEGDKNGYEWLFVSHSP

SEQ ID NO: 55315 - protein, 135 aa, Zea mays
  Coding DNA Sequence Number=SeqID_13536
  Subcellular localization annotation: CTP_CleavageSite=64; ConfidenceScore=5.07e-01
MAVPAPAKAARLLAASAAVLVLLWCVHFRGGLSFGSPTNKGLIFNVPGSLVLLESDYRLREPIPARRRRVHEDDATIQGRYASAVATSGGKHLDGSQTWRNKVFLTLPTIVYMDKLKKACTWGLIWIDSLLHSRS

SEQ ID NO: 55316 - protein, 89 aa, Zea mays
  Coding DNA Sequence Number=SeqID_13537
MSWCGVAVWCRRLGLQGQCAVEAESGSAGTAAPPLKESHEKRSAQRLIDRDWAAEFNKVFMQFVTLRKKSGMLFTGGRTSGLERNNLKF

SEQ ID NO: 55317 - protein, 133 aa, Zea mays
  Coding DNA Sequence Number=SeqID_13538
  Gene Ontology: Mol. function=carboxyl- and carbamoyltransferase activity; Cellular component=ornithine carbamoyltransferase complex; Biological process=amino acid metabolic process
  Homolog annotation: Hit_ID=Q8SA97; Match level="QueryCoverage=90%, HitCoverage=24%, E-value=3e-19, Identity=47%"; Hit description =Ornithine carbamoyltransferase
MAPPVDVAGLRPRLGNVEAPPKPRSSLSSVAEPESEPWVGRSGVRRLPRLSPSPSPGSGEAELPMVPSAGPDCLSASLCQVAPQSVWRRRRCPSVRPLYADGGYQLRIRSLEGTPNYGPRQMAHRIVNEANTK

SEQ ID NO: 55318 - protein, 78 aa, Zea mays
  Coding DNA Sequence Number=SeqID_13539
  Homolog annotation: Hit_ID=Q1SX87; Match level="QueryCoverage=84%, HitCoverage=4%, E-value=5e-13, Identity=58%"; Hit description =Polynucleotidyl transferase, Ribonuclease H fold
MALHYVLHLQPSPPSIMIVYIDADWARCSDTHRSTFDYVVFLNTNLIYWLSKRQNTVTQSNVEIFEYRGRDLEDVVGK

SEQ ID NO: 55319 - protein, 691 aa, Zea mays
  Coding DNA Sequence Number=SeqID_13540
  Homolog annotation: Hit_ID=Q5ZD36; Match level="QueryCoverage=89%, HitCoverage=27%, E-value=0.0, Identity=66%"; Hit description=Zinc finger-like
MALIEEDACWCSGNDMWVERLVGYVAMSSRTFVVASVVGDGVINNICSDSSSPAISYTRLIGSEILLWLRKLYGLISEGKLSDALAVSDRCLRNGASDNLLQLLIEQKEEKGPGTGQIHPYGSHSLGNDTSQYCLRLRDKKVAAQLALKYLHSWDLDAATNVLTMCMCHLPENDPMRSEVLHMKQSLQRYGHIMSADEHYTRWQEVEADCEDDPEGLALRLAAKGAVSAALEVAESASLSIDLRRELQGRQLVKLLITDPLNGGGPAAASRFLSTLRDSNDALPVAIGAMNLLPDLRSKQLLVHFFLKRTVGNLSDAEIARLNLWALGLRVLSLLPLPSQQRCSSLHEHPQLIVEVLLMMKQLQSASLILKEFSSLRDDKLIIAYAKKAISINREARKAFSWVPRDSGTKTPPKDILRKRKSSGSGGDRSSWEAMPGLQEERTPVYPSEAQERLPFVSAPDEWVLTGDPDKDDATRSSHKYETSPDITLFKVVEKFRKKALISLCTNESVAAKGALELCMTQMKVVLSSQQLPLDASMDNIARAYHATETYVQALSYAKNLFKKLVGSSDLSSGSERSKEVDDVSVDTGSSSTGSQYLDELSDFLTQADMWLGRAELLQSLLGSGIIASLDDIADKESSSRLRDRLVNDERYSMAVYTCRKCKIDAVPVWVAWGHALVRMEHYAQARVKFK

SEQ ID NO: 55320 - protein, 77 aa, Zea mays
  Coding DNA Sequence Number=SeqID_13541
  Subcellular localization annotation: CTP_CleavageSite=43; ConfidenceScore=5.08e-01
MDFIDGLPKAHSSKVISSSLSYPISYFKLHSINSAVYSANQCSAQPYVQPVVNGLKGARLHDVFHMGLLKPFHGDPQ

SEQ ID NO: 55321 - protein, 436 aa, Zea mays
  Coding DNA Sequence Number=SeqID_13542
  Homolog annotation: Hit_ID=Q5JNK6; Match level="QueryCoverage=32%, HitCoverage=23%, E-value=2e-38, Identity=56%"; Hit description =Putative glutamate carboxypeptidase
MEVIAKPNVATKDGASKFNVGMEDTTSKLTVADTAAVEPTLLETSIAAGSTVVAGNEQCDNSNSSGASLQQQAIDNVLMSTVMLAEDIATPVATAELKPARRFTRLLLKNHEPNKEESAACESQATPDGSKDTSFDFALLLEKPQRRFTRSLLKTKVESNLVGSDDALDSASDARPSVKKMEMKMRRRRRRRRWRPSATHSIALAVLAATDRRRDTLMCEEVEELVVLVSGEAGNDVGVSIDGDVESTLFLSLGSNATAAAHQRALTLRPHVAGIEANAAAARYVLHAFSSLSFPAHITPYSVLLSYPVHTAPSPSPRHPALPPGRSPWCMRPIKVLPTYFAYSGSGSDNAEVVYANYGHNEDYAYLASRGVDVAGKVTLVRYSDIHCENMAGGRGLRVRGGDCGARADRWRGRAPLRALAWACWSWIRGGCGARA

SEQ ID NO: 55322 - protein, 355 aa, Zea mays
  Coding DNA Sequence Number=SeqID_13543
  Gene Ontology: Mol. function=N-acetyltransferase activity; Biological process=metabolic process
  Homolog annotation: Hit_ID=Q75GC2; Match level="QueryCoverage=51%, HitCoverage=94%, E-value=2e-54, Identity=71%"; Hit description =Putative acetyltransferase
MEVQVQQRGSPAPAAELEVSLREFTLSDADAEAFMSWASDPRVVRFQRRDAYEHVDQARRYIADHVLPHPWYRAICAGAGAPLPVVGSISVKAGPAEDGRLFRASVGYRLAHAHWGRGIATRAVRAAAAAVFTAWPLAAAAGGRGGRGQPGVAARAGEGRVRQGGRAAEVRPAQGPAQGHGHVQHRRRDGAGQSGWAVDRGPRCYGLLAFRCCVTFQAAMYHVLSYMWTTMIDVAISKLESETGENLMLTEIVGLEQIAEVMSRWTGIPVTRLGYNDKERLVVLADRLHQKLVGQTDVEKGGHRIATVDVPIKWPEGRRDHLPQCRDTNERFLGFPETNCRFKGSVREMFKIYPY

SEQ ID NO: 55323 - protein, 67 aa, Zea mays
  Coding DNA Sequence Number=SeqID_13544
  Homolog annotation: Hit_ID=Q53VM3; Match level="QueryCoverage=67%, HitCoverage=10%, E-value=3e-07, Identity=61%"; Hit description =Ser/Thr protein kinase
MRMENPKVGLPNSPIPTCSRAKEGEGGHSEFQKFYRSLSTQLKDVVWKCDSESQFCNKFFGLFVDGE

SEQ ID NO: 55324 - protein, 130 aa, Zea mays
  Coding DNA Sequence Number=SeqID_13545
  Gene Ontology: Mol. function=ATP binding; Cellular component =membrane; Biological process=anion transport
  Homolog annotation: Hit_ID=Q6Z2T4; Match level="QueryCoverage=68%, HitCoverage=22%, E-value=2e-34, Identity=80%"; Hit description =Putative ATPase
MGGEMRSAAEARPRGADLLRLLGDADANGFGREEMGRPERVMAISESSRLHSSLQKESVPIRRLIVNQVLPPSTSDCRFCAIKRKDQTHALDMIRTGLELKGLNIIQAPLVDMEIRGVLAHNFLGDILWK

SEQ ID NO: 55325 - protein, 363 aa, Zea mays
  Coding DNA Sequence Number=SeqID_13546
  Gene Ontology: Mol. function=structural constituent of cell wall; Cellular component=cellulose and pectin-containing cell wall; Biological process=protein amino acid phosphorylation
  Homolog annotation: Hit_ID=Q8L3T8; Match level="QueryCoverage=90%, HitCoverage=57%, E-value=1e-138, Identity=69%"; Hit description =Extensin-like
  Pfam annotation: Domain name=LRRNT_2; Domain location=75-114; Score =20.9; E_value=0.0047; Accession=PF08263.3; Description=Leucine rich repeat N-terminal domain
  Pfam annotation: Domain name=LRR_1; Domain location=124-146; Score =1.1; E_value=1.8e+02; Accession=PF00560.23; Description=Leucine Rich Repeat
  Pfam annotation: Domain name=LRR_1; Domain location=148-170; Score =9.5; E_value=4.8; Accession=PF00560.23; Description=Leucine Rich Repeat
  Pfam annotation: Domain name=LRR_1; Domain location=172-194; Score =11.9; E_value=1.7; Accession=PF00560.23; Description=Leucine Rich Repeat
  Pfam annotation: Domain name=LRR_1; Domain location=196-219; Score =13.6; E_value=0.7; Accession=PF00560.23; Description=Leucine Rich Repeat
  Pfam annotation: Domain name=LRR_1; Domain location=242-264; Score =0.6; E_value=2.2e+02; Accession=PF00560.23; Description=Leucine Rich Repeat
  Pfam module annotation: Pfam domain module=LRRNT_2::LRR_1::LRR_1::LRR_ 1::LRR_1::LRR_1; Domain location=75-114::124-146::148-170::172 -194::196-219::242-264
MTTPPRNATLPVLLVLLLLAPHLLATAPAFASRGLSASDAAHIRRRQLLQYHGGGAGNGSGVVVDPSYAFPNPRLRDAYVALQAWRRAILSDPHNVTGSWTGPDVCAYAGVYCAPSPQDPDLTVVASVDLNHADLAGHLPEELGLLADLAVLHLNSNRFCGLVPRSLDKLHALHELDLSNNRLVGAFPDVVLRLPSLRYLDLRFNDFEGPVPSELFDRPLDAIFINSNRFRFQIPDNFGNSPASVLVLANNDFGGCLPASVANMSSTLNEIILMNTGLKSCVPPGARRAHGPHRARPQLQQADGRHPRRARAPPQHRAARPRPQPPRRRRAGGDLPPAAPPELHLFLQLHHRRAARLPARQEP

SEQ ID NO: 55326 - protein, 114 aa, Zea mays
  Coding DNA Sequence Number=SeqID_13547
MGMELEETPVGEKEEGGDGDGGGGDGGGGEGGGGDVGGGEGGGGDGDGGGGDGGGGEGGGGDGDGGGGDGGGGEGGGGRGGDGRMNFLHLKASQLTWWWFLKKLHCSGDLWSGR

SEQ ID NO: 55327 - protein, 188 aa, Zea mays
  Coding DNA Sequence Number=SeqID_13548
  Gene Ontology: Mol. function=protein binding; Cellular component =integral to membrane; Biological process=protein transport
  Homolog annotation: Hit_ID=Q8N2H4; Match level="QueryCoverage=76%, HitCoverage=92%, E-value=7e-28, Identity=45%"; Hit description =Protein SYS1 homolog
MFYGAMVWDPWLIVSQIVCLQCLYYLSLGVAMALLVGTRVPRLTLLYFFDFATLTPRTPTGWCAIASFILAAVAGAGFMLYVIERAKKCLDFAATLYIIHLFICIVYGGWPASITWWVVNITGLAIMALLGEYLCIRRELKEIPISRLRANLQYNAIPALAFKMLLLSFSFYDKCSNLHQTIGVRKGL

SEQ ID NO: 55328 - protein, 195 aa, Zea mays
  Coding DNA Sequence Number=SeqID_13549
  Homolog annotation: Hit_ID=Q69V30; Match level="QueryCoverage=82%, HitCoverage=16%, E-value=4e-15, Identity=28%"; Hit description =Hydroxyproline-rich glycoprotein-like
MSCIVDLVDHEKSTKKPKIFTIKIRRSTRDDYQNVPKQYVSGRPLLTWDKLKTVPAGIKRLHDWYMRVSSVGHEATIITFEDIWLMMNLKKLDVQLVTMFALMQYDQHKICYGSDPQPNASTWLGYLNPMRICKISTYSLLVQTPKELMERSPEEAKKCIEEMKKNFEDKYVVYLGHAMLQFHHKESIMAPYNFG

SEQ ID NO: 55329 - protein, 63 aa, Zea mays
  Coding DNA Sequence Number=SeqID_13550
MAGNLHPATTPYHGVGRGLLEAVFAESKRFFSLPMEEKMELLSYLIRLHMNLGTRCSGLRKIP

SEQ ID NO: 55330 - protein, 130 aa, Zea mays
  Coding DNA Sequence Number=SeqID_13551
  Homolog annotation: Hit_ID=Q6ZBF6; Match level="QueryCoverage=45%, HitCoverage=10%, E-value=6e-14, Identity=56%"; Hit description =Putative proton pump interactor
  Subcellular localization annotation: CTP_CleavageSite=36; ConfidenceScore=5.31e-01
MDDNRCLPTPGAQFQSTGCINRFQNSVKASCWSASLCTMKTVGVWEWRSLVLKQHQQRRKANAKEREEAAVFGSETTTNVTDLAPPKDVKDEWPKPKQTYAFYFIKVRSFEDLKLRAKLEQSNKKFQKKI

SEQ ID NO: 55331 - protein, 135 aa, Zea mays
  Coding DNA Sequence Number=SeqID_13552
  Pfam annotation: Domain name=DUF292; Domain location=21-99; Score= -43.2; E_value=0.076; Accession=PF03398.5; Description=Eukaryotic protein of unknown function, DUF292
MAKKNRPWQDKSICTGHNNSLCKDNREKHSHATFQKKCHAEPINNGQLILHECPQEALEAVSTRIFAAARFPDLPELCDLRHLFTERYGSSVEPFVNYEEDASRSFARVKLHQQSTKRSQCCEEEQVVTLCYFIV

SEQ ID NO: 55332 - protein, 97 aa, Zea mays
  Coding DNA Sequence Number=SeqID_13553
MAGARARSAWAPGLLEVGASRLGGDGRKVFGRGRPGRALACGLLAALGRVVPWLRKREKRRGRRGEDAREKERLRQPPIITHEAVNAMRETDSQHDS

SEQ ID NO: 55333 - protein, 144 aa, Zea mays
  Coding DNA Sequence Number=SeqID_13554
  Homolog annotation: Hit_ID=Q6QP54; Match level="QueryCoverage=46%, HitCoverage=24%, E-value=3e-19, Identity=69%"; Hit description =Putative kinase
MSAFRDRGVPKPTSECRCVPQPRWVDARPSAKGGSEVAGDGRERGGNPAAFVFVPRPAPPKPRSSPSSVAEVESETLVRARRRPSAEARVESEPWGRAEQSLSSSGAEPKSEPWVGRSGVRRLLGLSPSPSPGSGGAEFIVFWG

SEQ ID NO: 55334 - protein, 78 aa, Zea mays
  Coding DNA Sequence Number=SeqID_13555
MGRAASESDRDEDKKGKKKEKKRYYKNKGGEAHMGREWDSDESSSDEDAANITVYKGLLLPNVGHKCLMDKDGKKKKM

SEQ ID NO: 55335 - protein, 216 aa, Zea mays
  Coding DNA Sequence Number=SeqID_13556
  Subcellular localization annotation: CTP_CleavageSite=45; ConfidenceScore=5.09e-01
MTRFLSLMLETTERPTPRISPSTRPSLCSGLSFPVRPSAELGGVCAAARRGLPTWQSAWPAVAALVELPFVHGLRSCCARLARAACRRSRSARPRVPGVARLRGGAACARRGQLCPQRDCMRPPRCSPHARQHRRSPKQRLAASFIVTLLSSLCNRVYIALVVAEVSFVYLGLLSVYFMHDACLPPVYLFYPLHVRAFAPFARVVVAVRVRGRLSH

SEQ ID NO: 55336 - protein, 761 aa, Zea mays
  Coding DNA Sequence Number=SeqID_13557
  Gene Ontology: Mol. function=cellulose synthase (UDP-forming) activity; Cellular component=membrane; Biological process=cellulose biosynthetic process
  Homolog annotation: Hit_ID=Q3Y6V1; Match level="QueryCoverage=87%, HitCoverage=87%, E-value=1e-97, Identity=34%"; Hit description =Cellulose synthase-like protein CslG
  Pfam annotation: Domain name=Cellulose_synt; Domain location=21-761; Score=178.8; E_value=1.3e-50; Accession=PF03552.5; Description =Cellulose synthase
  Subcellular localization annotation: CTP_CleavageSite=37; ConfidenceScore=5.34e-01
MEDGAEKATTPDSSSSQAAPPALSAVYVNRRLVAGNRAMAAVHVALVATVIGQRALALLSAGTSSASPASRSLQVQHVAMALADLTLLFVWALSQSGLWRPVTRAAFPGRLLAAVPRGALPRVDVLVVTADPDKEPPLGVVNTVVSAMALDYPGGKLSVYLSDDAGSPLTLLAARKAYAFAARAWVPFCRRHSVQCPWPDRYFAGDDDDADGDRRREELAEERARVRKLYEKLKADIEAAKNDETISGSWSKDKRQNHDAYVEIIEDGDGVEEIPALVYVAREKRRAWPHHFKAGALNALLRVSGVVSNAPYVLVLDCDMACNSRASALDAMCFLLDRRPPPDSLAFVQFPQLFHNLSHKDIYANELRYIFGTRWFGLDGVRGPPLSGSGFYVRRDALYGATPTADFMPDATAVAELKTRFGHSDRLVASLRSPGVPPEAEAMMSLAALASCAYEAGTAWGAGVGFMYQSVVEDYFTGFQRFFARGWTSAYCYPEPRPAFLGSVPTNLNDVLVQNKRWMSGMLAVGVSRRHSPLACRPLLRASLLQAMAYAYFGFAALCAVPVLCYATLPQLCLLRGVPLFPCPAATAAAFASSLLQHMAEVCVSRRGRLDLRTWWNEQRFWVLNALTAQLFGCVSAAQELLGARALDFDLTSKAAVDGSLYQDGVFDFTGCSALLLPATTLSVLNAAAIVAGTWKMSSSSSSSSGGFHFAPQLFLMCYGAALSYPLLEGMFLRRDPARVPPRITALSVALAAVLLAAMLG

SEQ ID NO: 55337 - protein, 69 aa, Zea mays
  Coding DNA Sequence Number=SeqID_13558
MGWRPEANGGMKKKKLEKESSLDWELFNLRRRPCQMSGQHPASPKVIGQYKAPDLSSVGSCGTSDTSRA

SEQ ID NO: 55338 - protein, 67 aa, Zea mays
  Coding DNA Sequence Number=SeqID_13559
MAARVRMLGLMGLRLHEDEFQASRGQDSRRPKIGVWTDMCIPPMTNNSGSMKMSSRHQEVKIPGGLK

SEQ ID NO: 55339 - protein, 172 aa, Zea mays
  Coding DNA Sequence Number=SeqID_13560
  Homolog annotation: Hit_ID=Q2R8U1; Match level="QueryCoverage=28%, HitCoverage=18%, E-value=3e-12, Identity=77%"; Hit description =Expressed protein
MEEAMPPQQSYAQGGQDGRGRRTSIAPSAPGSYGQPSAPGSYGQPNTPDRGLDQHMVEITGKEVLVSILAQVKDKETGRGLLTDQVLEDLTMYLRRQREGGDDAGAVVASSRDDNDVETMPESSEPYQHASSRDDDIKAMPESSDPYQGPAHACQEMGRRPIFIPCSSYVWD

SEQ ID NO: 55340 - protein, 112 aa, Zea mays
  Coding DNA Sequence Number=SeqID_13561
  Subcellular localization annotation: CTP_CleavageSite=9; ConfidenceScore=5.53e-01
EPASSASGRAASGMSSDEKNQRQRDARVLMPPPRSLAPNRGRHADKRAISSSSSTSNSTSGESFKNRRVPNRPADNNSNLSSNSDVHKPRRKRRHKKKRKLSHNAASVSQQA

SEQ ID NO: 55341 - protein, 246 aa, Zea mays
  Coding DNA Sequence Number=SeqID_13562
  Homolog annotation: Hit_ID=Q9FG92; Match level="QueryCoverage=95%, HitCoverage=64%, E-value=7e-39, Identity=43%"; Hit description =Genomic DNA, chromosome 5, P1 clone:MQD19
  Subcellular localization annotation: CTP_CleavageSite=19; ConfidenceScore=5.35e-01
MAHGGYPRRGAAVRRPKSSASAAVADRKRKRTAAAAKTTSLKNQIRSTERFLRKDLPDEIRVAQEKKLEELKRQQELQNQLVVQRTLQFRDRKIKFFERRKIERMIRRLEKQQRSNGDGVNNNLSKLREDLEYVRVGGSNQPFFICTCLNPEFFPKNEKYVSLFTGGNSQDIVQERNKWRKQIKENFMGAAANGKDLEETASDGDTLDVSDDDFFMFGSSSDEEADDEWTDKSAKYGSQPPTFVPC

SEQ ID NO: 55342 - protein, 180 aa, Zea mays
  Coding DNA Sequence Number=SeqID_13563
  Gene Ontology: Mol. function=DNA binding; Cellular component=nucleus; Biological process=regulation of transcription, DNA-dependent
  Homolog annotation: Hit_ID=Q5WA77; Match level="QueryCoverage=100%, HitCoverage=43%, E-value=1e-27, Identity=56%"; Hit description=MYB transcription factor-like
MDFSCFQPHMGVCSYLPFDPYMQQDGRYELHPVEHHHPFEAIGDYTPATFDDLGRQLFFAESKKPVSGHASPIGRSRVGSSQLPLLTPKAEVSHLMDISGLAGSYKAYETNGRFLPRKKTSSNKANVVKGQWTAEEDSEAGKTSGTVWAEEVVLHSTAAARKSGKAVQREMAQPFEAEHQ

SEQ ID NO: 55343 - protein, 195 aa, Zea mays
  Coding DNA Sequence Number=SeqID_13564
  Gene Ontology: Mol. function=methyltransferase activity; Biological process=DNA methylation
  Homolog annotation: Hit_ID=Q7Y1I7; Match level="QueryCoverage=83%, HitCoverage=9%, E-value=9e-16, Identity=39%"; Hit description =Putative DNA (Cytosine-5-)-methyltransferase
MQMLRSEAVKCMKVQTSIHRHARLGKEEYLLLRALAQGAPLRSIRVRISHQWKNGASKPTIQYWLGLLLVLPMVHATVSWFQKIRGVTVFLSEHISMEMNDLAEYHQGASTFQNDWQKPLEETVTNHAPFANGYASTCQPVEWWTCCPTPPKGTINGRGSMGGWTGRAASPTSVSDPQPVGKLGMCFHPEQILYL

SEQ ID NO: 55344 - protein, 167 aa, Zea mays
  Coding DNA Sequence Number=SeqID_13565
  Gene Ontology: Mol. function=receptor activity
  Homolog annotation: Hit_ID=Q7Y1J0; Match level="QueryCoverage=82%, HitCoverage=61%, E-value=1e-12, Identity=37%"; Hit description =Putative prenylated Rab receptor
  Pfam annotation: Domain name=PRA1; Domain location=60-166; Score =10.3; E_value=1.1e-06; Accession=PF03208.9; Description=PRA1 family protein
  Subcellular localization annotation: CTP_CleavageSite=58; ConfidenceScore=5.43e-01
MSSSTASWSRYGALPTSPPAPQLKPEDVAAAGGDAAPSSSSAAATAAEAGVAFFSRARAFAGAAAGRPRAWREVLDPTAFSCPDSCGEARARARRNLAYFRANYALAALALVFLGLVYRPASMLAFQALFVAWLGLYFGRGGGEPLGILGGSDPLSDFARRSSSLVL

SEQ ID NO: 55345 - protein, 128 aa, Zea mays
  Coding DNA Sequence Number=SeqID_13566
MAMDRSRRNRRCVVVEEGCTHQRSRAAVASKGARARGRGLGEVTAGGTLGRSVDELQEPSRALSGGGAPWKGEEGALAMEKQGDGRSPSGEELGDRGAQGDGKAMRCVGERYGRESSTAEVEDDLAMG

SEQ ID NO: 55346 - protein, 234 aa, Zea mays
  Coding DNA Sequence Number=SeqID_13567
  Homolog annotation: Hit_ID=Q75LF6; Match level="QueryCoverage=30%, HitCoverage=39%, E-value=2e-17, Identity=56%"; Hit description =Putative transfactor
MSGTTGGVVGVQTTAAAVPDLSLHISPPSPPPAGGVEALPEPRLLLGLGLGPGPGLELDDDDDAVATKKVDDDDDAAAAAREHNLHAQRLRLQLHQPSQTAHGFKKSSSGTAAGGGRRSSRAPRMRWTTALHAHFVHAVELLGGHERATPKSVLELMNMYRTVKGSTDRSCVAAAGHGGHAGDMVLLRRRGAGEGDGGYYDVPICNKNPVNTTVDPTFFNNNNSNITDRFALLH

SEQ ID NO: 55347 - protein, 53 aa, Zea mays
  Coding DNA Sequence Number=SeqID_13568
MATNGPRFGGGRGGPTTGMVSPSGRELLGSDVGAGLTAVGRLEDVLRVCITSM

SEQ ID NO: 55348 - protein, 459 aa, Zea mays
  Coding DNA Sequence Number=SeqID_13569
  Gene Ontology: Mol. function=DNA binding; Biological process =regulation of transcription, DNA-dependent
  Homolog annotation: Hit_ID=Q2QMT2; Match level="QueryCoverage=83%, HitCoverage=98%, E-value=2e-78, Identity=44%"; Hit description=B3 DNA binding domain containing protein, expressed
  Pfam annotation: Domain name=B3; Domain location=307-407; Score=14.3; E_value=0.0018; Accession=PF02362.12; Description=B3 DNA binding domain
  Pfam annotation: Domain name=B3; Domain location=50-144; Score=63.3; E_value=7.7e-16; Accession=PF02362.12; Description=B3 DNA binding domain
  Pfam module annotation: Pfam domain module=B3::B3; Domain location =307-407::50-144
MGINGHLDLDTGSKSVVQKMNLMVGAKGCERCRDWQEHYYWEHMDASKIRFFRCMTGDFAHRISVPEKFAKNFKGQITEEFHLKSPSSAETWHVGVEKHGDKLFLVSGWENFAKAHELEENDLLLFACSGNSSFEVLVFGASGCEKVSSLFGSGLGPDMGKQFNDVVRRHGVHHSVTVSDSEDTVAPSQLVRSPRNALPLKEPSGKARPSKYESPNSSNFIVRHVATGKEGTDDEYANSNYYYSLSANRLGDEEKEEIIGLAPHPTEQSCICDPSEEKPCSAQKQLSGEFIHIAKVNENGWIIDLHILVLCKLDSDLFCNLTIIPSKFAADHLGERAHNIILRRPNRKEKWHVSYYHSRHTRCFQNLALFKFTRENKLHEGDICVFELMKGERRVTMTVHVVRKANGRGSIANWKCLVMLARNATAVLCHVRSPIWYSSAFELQKYYFKEEKGIVGWST

SEQ ID NO: 55349 - protein, 336 aa, Zea mays
  Coding DNA Sequence Number=SeqID_13570
MTTLHPRSKNSGGTSKGLTKGFDDDEDGLRSKHEIDDTRRGEWRMNERAAAPMRTMRSDEGYAMQGRTTRSLLRFSSSRFNARLEGVLLLLFGATRCPGAWHKLAATRPPRRDLRVNSRTHDEHGWCRGCSPQSGVEVMASDETDPDHGGTRRRSSGRRNAAGAEGYQCRPQPVWRSSRRQGRDAGNEGLPHVPSIARAERRVAVEVRALGAQRTRGRGQDGWRPWGGKLEDPRRGDCRTWGKKFWASRDRANWIRPGAGRRGGELPAPRNGGGRDLRALWQSSERGGERRGVGRHGGPALAGEKGSLLPNAVENGGSVERGAGGVEEEDRVMLLH

SEQ ID NO: 55350 - protein, 152 aa, Zea mays
  Coding DNA Sequence Number=SeqID_13571
MAARGGGARGAATLLEQRDTNAVHNQCGGVRGERRVAVEVRALGAQRTRGRGQDGWRPWGGKLEEIHGEGIAGLGARNSGRAGIARIGSGLELDGVGENFLRLGMEGEGICVRYGRAPSGEEKGEGSDAMEALLLLGRRALCCQTPWRMGAR

SEQ ID NO: 55351 - protein, 384 aa, Zea mays
  Coding DNA Sequence Number=SeqID_13572
  Gene Ontology: Mol. function=hydrolase activity; Cellular component =cellulose and pectin-containing cell wall
  Homolog annotation: Hit_ID=Q6ESF3; Match level="QueryCoverage=68%, HitCoverage=70%, E-value=1e-88, Identity=60%"; Hit description =Hydrolase, alpha/beta fold protein-like
MLRLSLMVIDCDFGLNAALDFDKYPCHFPCAVCRLWMGWEHGTLVRSRAGGIVASSRAQAAPRSPIETNGSARVRAQAAEASPFRSVAAAGPWTQLAHQPMAGTDVAGSARGSDAALGKTGEPPAAARSGAAKKVTLALLASFSALLYSQIQPPPSKIPGTPGGPPVTAPRTRLKDGRHLAYLESGVPKEKAKYKIIFVHGFDCCRYDVLNVSQGLLEELGIYLLSFDRPGYAESDAHPARTEKSVALDIAELADNLQLGPKFHLIGFSMGGEIMWSCLKYIPHRLAGVAILAPVGNYWWSGFPPDVFKEAWRVQFPQDQRAVWVAHHLPWLTHWWNTQKLFRGSSVKDGDPAMLSKEDRLVADKFEKRTYEASGHWRRRLLKS

SEQ ID NO: 55352 - protein, 114 aa, Zea mays
  Coding DNA Sequence Number=SeqID_13573
MAPRYVLRWHKRTSWRRRGTELGAMNLGAELRSVQKTCLAQLVKYKVLKLVVVGSSPTDQNAKNSGTHATKPQTPGQAESLACAQPGSNKGAVIPWTRLDFNWATKIEIRILRI

SEQ ID NO: 55353 - protein, 100 aa, Zea mays
  Coding DNA Sequence Number=SeqID_13574
MALPIPPLTGGTDAAAVATAPDAGASTDLPTSAAALAPALLFPTGKDAATPTPPPLDWLLARAQLQSRPCLHADMGRHAWLTLKEQFLGNRDAQALHLDA

SEQ ID NO: 55354 - protein, 171 aa, Zea mays
  Coding DNA Sequence Number=SeqID_13575
MADCQFASPGNSDSKEKATWASRGLMWEECIMERTPLDMLQWQEEPRPYRGVFGEVSCHNIPNLSMQVLSPLFIVDLKWGPNKNIVDDVEGKATKRVGPIVDSEVAINVEIQKGNIWVNPIFRLMCVKYGAHVVIDKGKGVVLGGGESRVVIQNGKRKAKIVGAKAKRPYI

SEQ ID NO: 55355 - protein, 74 aa, Zea mays
  Coding DNA Sequence Number=SeqID_13576
MGTSSTTVIGGMVLGIHIANTISRPMKEIVEASRTQEYKKYDSSTTNKTPSHGPFPLPPPPKNASCKAVDSKAT

SEQ ID NO: 55356 - protein, 164 aa, Zea mays
  Coding DNA Sequence Number=SeqID_13577
MSGYRGTPALRKDAEWRHTGGREWGSFFVAGSGTTVMYPEHAVVPHLERAPVTVVDAECGTLGERKGHMWCVEVGREEGEQWGEGSRETSWMRSLRERMGRKRARRERLPWMEGGGRSAAAMKGERGATDGRFAADLWLDLWAGTEASGVRLVGDLRESLVRLP

SEQ ID NO: 55357 - protein, 75 aa, Zea mays
  Coding DNA Sequence Number=SeqID_13578
MERGRSCGLLMRGGLGHASACCAWMGKRNQRREGEEEGAHLTLATTARTARCSDEGVGNVGASSRRKPDATLAAA

SEQ ID NO: 55358 - protein, 760 aa, Zea mays
  Coding DNA Sequence Number=SeqID_13579
  Gene Ontology: Mol. function=DNA-directed DNA polymerase activity; Cellular component=DNA polymerase III complex; Biological process =DNA replication
  Homolog annotation: Hit_ID=Q75K66; Match level="QueryCoverage=88%, HitCoverage=65%, E-value=0.0, Identity=60%"; Hit description =Putative DNA polymerase III gamma chain
  Pfam annotation: Domain name=AAA; Domain location=315-504; Score= -11.4; E_value=0.0015; Accession=PF00004.19; Description=ATPase family associated with various cellular activities (AAA)
  Pfam annotation: Domain name=DNA_pol3_delta; Domain location=359-624; Score=-64.8; E_value=0.0036; Accession=PF06144.3; Description=DNA polymerase III, delta subunit
  Pfam module annotation: Pfam domain module=AAA::DNA_pol3_delta; Domain location=315-504::359-624
MRDLLALQRSRSLRDPSTRRSVESSRVAADPDDGTDDDDDDDADLPAKSRRSAGALKTLLDQLAENPHPKPGRRPPRRFKRRAGRRAAAASKPPDRAAALSVNSSSQEAVCGNKYLFHGGGGGDDDGDGVVELQQHLPQDSRNVCGIPWNWSRLHHRGKSILDMAGRSLSCGLSDSKSAAGRKSEAPAASGVRPLFPVKSERLASSTSSDSDALPLLVEEAATSGARKRIGVISSGSYSGELGIFSNQTSEMDSDLLSESQSGHKSLASRSQHGRGRHRSLTQKFAPKTFKDVVGQSLVVQALSNAILRRKIGLVYVFYGPHGTGKTSCARVFAKALNCLSSEHPRPCDSCTSCIAHNLGKSRSLMEIGPVGNIDMEGIVDVLDNVMLSPAPSHYRVFIFDDCDTLPADTWSAISKVVDRAPRRVVFILVSPNLELPHIILSRCQKFFFPKLRESDIVNTLQWICTSESLDVDKDAMKLIASRSDGSLRDAEMTLDQLSLLGQRISLSLVQELVGLVSDDKLVDLLDLALSADMVNTVKTLRDITETGVEPLALMSQLATIITDILAGSYAFTRERPRRKFFKRPTLSKEDMEKLRQALKTLSEAEKQLRVSSDKTTWLTAALLQLAPDKQYLLPSSSTSTSLNHGVLVGPFPDRGVGRAPAVENKGNLAGTSYGEKRTVEHTENGHVLSTSSVRANEGTKLRKAENEMVWQAVLESIQSDTLRKMMAKEARLNSISLGTGKVLNLSSISVFATITIFQE

SEQ ID NO: 55359 - protein, 336 aa, Zea mays
  Coding DNA Sequence Number=SeqID_13580
  Gene Ontology: Mol. function=DNA-directed DNA polymerase activity; Cellular component=DNA polymerase III complex; Biological process =DNA replication
  Homolog annotation: Hit_ID=Q75K66; Match level="QueryCoverage=59%, HitCoverage=18%, E-value=2e-52, Identity=57%"; Hit description =Putative DNA polymerase III gamma chain
MAGAHDDLVTYSAKMDLILEQLAAINACLDFHDARLAKLEQAWVGPTASIVGGMGAGNLGASEGGLSAGGGGRIEDDGVDVLQRGAPREELEAAFGFVEVQAWLDYGSDQFLTSASFLPTEPTVQLIISSHISKSKAENYRAQILQAFESVLRSAIILEIRYESKNDAKPGHTPSMFPYPENDSTLRRSFTKHSPLSSGGEILISRFKKDSVVKGANSSKTRWMQSDPHILTEGEIIEVGPSRMHWHAQTNNDVLDVNERRKENTWEEETSSSPNQESVTNPKGRNGNRQNRQNSIVRGKVSLAHVIGRAEACSQRGGWSRRKAISIAEKLEQENL

SEQ ID NO: 55360 - protein, 185 aa, Zea mays
  Coding DNA Sequence Number=SeqID_13581
  Subcellular localization annotation: CTP_CleavageSite=57; ConfidenceScore=5.25e-01
MNVCITVWIPSAHAVWTYGYHHTLSTAQALQASKIQSSVDSSKVVSTFWAPVLLGSRASGGRRQRRRVGLQLCQNRNSLVAFFAADDPFALAKDGDDKDDEAMRCPPKEADVDALLSGDVIGLKGLESALLLRLQHDLANSAGDDDLTAAIDIWLAIAFDLQRKREYSGLQWGQAGRFTLKYEVL

SEQ ID NO: 55361 - protein, 182 aa, Zea mays
  Coding DNA Sequence Number=SeqID_13582
  Homolog annotation: Hit_ID=Q10QH3; Match level="QueryCoverage=96%, HitCoverage=92%, E-value=2e-44, Identity=46%"; Hit description=Plant integral membrane protein TIGR01569 containing protein, expressed
  Pfam annotation: Domain name=DUF588; Domain location=32-159; Score =95.8; E_value=1.3e-25; Accession=PF04535.3; Description=Domain of unknown function (DUF588)
MNHGGGADNGVSPGNVPVCYYGAAGRVPAALERRVRAAELFMRCAACGLAVLAAALLGADRQTRTFFSVEKAARFTDMQSLVFLVIANGMAACYSLLQGGRCLVMAYFTISAVAVAMEAAMIGKYGSQQFQWMKTCHLYKRFCAQAGGAVACAVAASLNMVGVSLVSAFNLFRLYGSGKGRK

SEQ ID NO: 55362 - protein, 64 aa, Zea mays
  Coding DNA Sequence Number=SeqID_13583
MGCAGVKGWWAEIVSLRPRLSSTNYKLGIKNPTPLKNNLVLEISKQKGYTELMVVILEWDKYVD

SEQ ID NO: 55363 - protein, 136 aa, Zea mays
  Coding DNA Sequence Number=SeqID_13584
  Gene Ontology: Mol. function=electron carrier activity; Cellular component=mitochondrion; Biological process=electron transport
  Homolog annotation: Hit_ID=Q1SAI8; Match level="QueryCoverage=97%, HitCoverage=9%, E-value=4e-35, Identity=58%"; Hit description =Integrase, catalytic region
MKPRCLGDTVGHIAVLSLGLTAGVGDIELSFQKPESKVVAKENNETGSGPIGVGTTTPISVGVDSKVDGHRLTKENVKVGGATEVPKDPLRSSEMWLPRGVHIMAYLMDDVGDVGACEDEVLQGLDKTPTAGWISY

SEQ ID NO: 55364 - protein, 178 aa, Zea mays
  Coding DNA Sequence Number=SeqID_13585
MEHVGRHHYLSYRGEPDGTPPWVGRGGGSSEVEVESVSEVEVESEPLGWARQRPSAEARAESEPCGRARQSSSSSGAEAESEPWGRARRSSSSSRGRGRVRALGSGEAEFVVFRGRGRVRALGSGEVELPMAPEAGLGCCQPHSVEWHSSRSGAGGAVLLSGRSVERRSDCGHFGSVD

SEQ ID NO: 55365 - protein, 257 aa, Zea mays
  Coding DNA Sequence Number=SeqID_13586
  Gene Ontology: Mol. function=oxidoreductase activity; Cellular component=mitochondrial outer membrane translocase complex; Biological process=electron transport
  Homolog annotation: Hit_ID=Q9LG41; Match level="QueryCoverage=94%, HitCoverage=58%, E-value=2e-94, Identity=73%"; Hit description =Putative flavin-containing monooxygenase YUCCA3
SRFWRFVHQAILPPGRRQRRARGDIWCVRTLDGGGTSREYRSKWLVVATGENAEPVVPDIDGIHAFRGLVIHSSDYRSGESYRGKKVLVIGCGNSGMEVSLDLSNHNVHTSMVVRDSVHVLPREIMGVSTFGLSLWLLTHLSIQKVDQILLVLTQLVLGDTARLGIPRPNIGPMELKRVSGKTPVLDVGTIAKIKSGDIKVYPAIQSFQEHGVQFIDGKSESFDVVILATGYKSNVPYWLKDKDLFSEKNGFPHNSK

SEQ ID NO: 55366 - protein, 161 aa, Zea mays
  Coding DNA Sequence Number=SeqID_13587
MSWSSGHVRPNAQQLRGEFNVLVLKETKNTEDFVDCITRLVVDLCLLGDNITDTKVTSRLHTIEQQHKPAFVLHNYGRLLLCKEDSSIGSKSTSPRRGAAGVAPLALATKSTVATGIVVASPRVTIEGFGTMLFKDKIYEHLPLMGVYFILRLNTNTISLG

SEQ ID NO: 55367 - protein, 302 aa, Zea mays
  Coding DNA Sequence Number=SeqID_13588
  Gene Ontology: Mol. function=transcription factor activity; Cellular component=nucleus; Biological process=regulation of transcription, DNA-dependent
  Homolog annotation: Hit_ID=Q5NAQ6; Match level="QueryCoverage=99%, HitCoverage=97%, E-value=2e-52, Identity=41%"; Hit description=Pti6 -like
  Pfam annotation: Domain name=AP2; Domain location=66-124; Score=72.5; E_value=1.3e-18; Accession=PF00847.10; Description=AP2 domain
MEEEMFLAVKRTEHVEVTSRAMDSAPAAGPRTVRVFCDDNDATDSSGDEAEGAAARRRVKRYVQEIRLQRAVPYAAEIRDPWRRVRVWLGTFDTAEEAAKVYDSAAIQLRGADATTNFEHAAVPVPVPDEVAGRLPQPPPAPASKNASSSATSSYDSGEESHAAAASPTSVLRTFPPSSAAADATCKKPAPAAETDESTGVGGSRSSVYAYPFFANDDCFGGDFPPLYTDFDLLADFPEPTLDFLADIPEEKLPPLPEPFPAASPDECPSDAEAASPARWQQVDDFFQDITDLFQIDPLPVV

SEQ ID NO: 55368 - protein, 134 aa, Zea mays
  Coding DNA Sequence Number=SeqID_13589
MAHRIVSGAQGPYNSNNHSRENEGALRYNSPDCPMSQRSNDSLRQWSTLQSATVKNIVVQKSEQRSQRGTGLSGVASDCPVLQEDKAPTVDRAPNPYGWVTWQRTGQGTVPIRWHTRLFGAPFASSLPNGYGSG

SEQ ID NO: 55369 - protein, 39 aa, Zea mays
  Coding DNA Sequence Number=SeqID_13590
MAGKRRWRTQRWELYRGLDHREARPPITAEEKQATQQFN

SEQ ID NO: 55370 - protein, 150 aa, Zea mays
  Coding DNA Sequence Number=SeqID_13591
  Subcellular localization annotation: CTP_CleavageSite=74; ConfidenceScore=5.04e-01
MAHFPFSLLNVSTSACKTVEPQALTGGPSIGDFNAATNITLGSSPYLSLSPLWVWGCHSCNFCQSVIPVRVEPLLDAEVHLGACLIFLGLLSPVHPLRGYEERSRIQAWGPLGTVLILPDTDSYSCRSYSTRTDAPVKGISNEFRVLTGK

SEQ ID NO: 55371 - protein, 228 aa, Zea mays
  Coding DNA Sequence Number=SeqID_13592
  Subcellular localization annotation: CTP_CleavageSite=14; ConfidenceScore=5.26e-01
MARPRRRAQHGALRGAILAPRPGTTRASPTYRGLQPWHGSGAVRGAPSPTPRSSASLALGPRRGERDALARTIMHACPQRGPPSSRHGAAVALGPRPGTVALPTRRPPAAPARPPMPARGVPDAACPRRARDVLDAACPRRARDSFVARTTRSLRAQRGQLAVSLAPVAMRMVVLVLTMVMVGVHTVGIKCARPEVLRIWLRAGWPWTSPEMPSGEAEMRFLSKGVLG

SEQ ID NO: 55372 - protein, 123 aa, Zea mays
  Coding DNA Sequence Number=SeqID_13593
MESHDLRAERESRLVGGDENGGFGIDYGNEIVLKREESDCKRLGCEQPKLQLGLAHRTVRWCTGLCPMACLRHTARKSVIPFLPSHLAERPLRHLVIGQSSHLERLHHRLHEEQEHRRQELDQ

SEQ ID NO: 55373 - protein, 561 aa, Zea mays
  Coding DNA Sequence Number=SeqID_13594
  Gene Ontology: Mol. function=binding; Cellular component =intracellular; Biological process=protein kinase C activation
  Homolog annotation: Hit_ID=Q10AH5; Match level="QueryCoverage=74%, HitCoverage=94%, E-value=1e-178, Identity=76%"; Hit description =Pentatricopeptide, putative, expressed
  Pfam annotation: Domain name=PPR; Domain location=11-45; Score=8.2; E_ value=0.8; Accession=PF01535.11; Description=PPR repeat
  Pfam annotation: Domain name=PPR; Domain location=125-158; Score=2.6; E_value=3.7; Accession=PF01535.11; Description=PPR repeat
  Pfam annotation: Domain name=PPR; Domain location=259-293; Score =24.4; E_value=0.00042; Accession=PF01535.11; Description=PPR repeat
  Pfam annotation: Domain name=PPR; Domain location=295-329; Score=7.2; E_value=1; Accession=PF01535.11; Description=PPR repeat
  Pfam annotation: Domain name=PPR; Domain location=331-365; Score=7.4; E_value=1; Accession=PF01535.11; Description=PPR repeat
  Pfam annotation: Domain name=PPR; Domain location=397-431; Score=2.7; E_value=3.5; Accession=PF01535.11; Description=PPR repeat
  Pfam annotation: Domain name=TPR_4; Domain location=124-149; Score =4.8; E_value=10; Accession=PF07721.5; Description=Tetratricopeptide repeat
  Pfam annotation: Domain name=TPR_4; Domain location=227-252; Score =8.5; E_value=3.7; Accession=PF07721.5; Description=Tetratricopeptide repeat
  Pfam annotation: Domain name=TPR_4; Domain location=330-355; Score =10.8; E_value=1.9; Accession=PF07721.5; Description=Tetratricopeptide repeat
  Pfam annotation: Domain name=TPR_4; Domain location=396-421; Score =5.4; E_value=8.6; Accession=PF07721.5; Description=Tetratricopeptide repeat
  Pfam module annotation: Pfam domain module=PPR::PPR::PPR::PPR::PPR::PP R::TPR_4::TPR_4::TPR_4::TPR_4; Domain location=11-45::125-158::259 -293::295-329::331-365::397-431::124-149::227-252::330-355::396-4
MPFPSRHQRLASLTKLLTTHVNAGRHRDALGLFSRMLSAPDLPPLTDPSFAHAFPLALKSATALRVPGAAASFHALAAKCGLLSSPFLASALVASYGARVVGGACGASYELTRRLFDELPARNAVVWSAMISVHVRAGDLAAAAWALDHMDVPPTASCFNTVIAAVAESREHPARAIEVYRHMRRVGVPPSFITLLALVPACTVIGALTSIKEVHGFAVRHGMCARSHIGSSLIEAYGRCGSLAAAQRVFDQVHDRDVVVWSSLVSAYAFHGRAEVAMSLFQHMEDQDDVRPDSIMFLSLMAACAHSGHADDALQYFDVLTRRYGVEACGDHYSCLVDVLGRAGRLHQAYELLRTMPVKVTAKAWGALLAACRKHGDVRLAEVAGRALFEIEPENAGNFVSLANIYSGRGMHEDAERVRREMEQRVTFYEKSGIQFRSVIVGAQKILFRCSDHLSMERIMKFSSGNGVNQLQQSKQPALIRSEQKREIRNKKEKRNPNGRRGWDGAIQRTAVPKVHNKPIKRPRKRVQTKEQRDNRRHPGLAHRTVRCATGQCPVHQRTSS

SEQ ID NO: 55374 - protein, 116 aa, Zea mays
  Coding DNA Sequence Number=SeqID_13595
MEELTAAPVVGAEQSWKQPSRELAEGAMGADPCCRKWKKKGGAVGKGLCLLPSAGRSNGGEGLLLKAVLAAAIGGHERHAAELSFLRDIERNTYWVTVFIVFCLESDLDQCRKYLP

SEQ ID NO: 55375 - protein, 64 aa, Zea mays
  Coding DNA Sequence Number=SeqID_13596
MRQQDGVGSPGLASEDEGVTASGCILEVKSRLARNPEGAHAIGGGVGTPQTLSAQAPDPLMATI

SEQ ID NO: 55376 - protein, 71 aa, Zea mays
  Coding DNA Sequence Number=SeqID_13597
MAKGAFPRKNTTTQTRPPARNLDVEAGVIKGVRSAKTETGKMEQGRRLDGAHGFGSGSALVYLEVRQKFIW

SEQ ID NO: 55377 - protein, 84 aa, Zea mays
  Coding DNA Sequence Number=SeqID_13598
MAVMGSTSEKMYLYKVPNFGVLNDKAETGQLSLGQTNTRKANTQWEWRDGESSVYPSWQEAGRWCIYALGWREPGLVLTNPVAS

SEQ ID NO: 55378 - protein, 182 aa, Zea mays
  Coding DNA Sequence Number=SeqID_13599
  Gene Ontology: Mol. function=glutathione synthase activity; Cellular component=chloroplast; Biological process=glutathione biosynthetic process
  Homolog annotation: Hit_ID=Q7XB40; Match level="QueryCoverage=83%, HitCoverage=32%, E-value=6e-82, Identity=100%"; Hit description =Glutathione synthetase
  Pfam annotation: Domain name=GSH_synth_ATP; Domain location=1-176; Score=38.7; E_value=4.3e-13; Accession=PF03917.8; Description =Eukaryotic glutathione synthase, ATP binding domain
MTATCSSGGRNLRVTLKTVGDHKAHWFLKSEEIDKVRKCFAGLWSLDDEYIIKTAVEKPELFVLKPQREGGGNNIYGLDLRETLVRLQKEGGDALAAYILMQRIFPKASPAYLVRGGVCHEGLAISELGIYGAYLRNKDKVVINEQCGYLMRTKVSSSDEGGVAAGFAVLDSLYLTGKINSF

SEQ ID NO: 55379 - protein, 173 aa, Zea mays
  Coding DNA Sequence Number=SeqID_13600
MGFDWFGAQARRRLPDLETTHDGMCTEMDVTAFAEQVASGALTSQFVSERRRLEGRIERLRTQHTEATAPFDELGEEVGVRFLGWLQDDGLAPIYRDGSQVLRVSRYLRGAANALSHEGCRHFEVFDRANEDFNCGLFQIEDDVLKHFAGALYDRMWGPHGRNIVQERADQAL

SEQ ID NO: 55380 - protein, 129 aa, Zea mays
  Coding DNA Sequence Number=SeqID_13601
MPEMDLKWKTSPGLKDGVVDRDSMVCAAACKDDSWTYTDGIPTYPESSSSIRPSYRRGFSLSGFKCTLAGHGKLSKSASAARRRTIPLPKADRIAGCTQAAAGLPQLAACSNPIGAPAALVKQQRFLNC

SEQ ID NO: 55381 - protein, 60 aa, Zea mays
  Coding DNA Sequence Number=SeqID_13602
MKYYLSFLVTYGPTVPVQLSIILLTHGGVIQTIVAVRGSEMVFDALSRGVGSSGTFAHSA

SEQ ID NO: 55382 - protein, 76 aa, Zea mays
  Coding DNA Sequence Number=SeqID_13603
  Gene Ontology: Mol. function=nucleotide binding; Cellular component =intracellular; Biological process=signal transduction
  Homolog annotation: Hit_ID=Q5W796; Match level="QueryCoverage=92%, HitCoverage=17%, E-value=4e-33, Identity=97%"; Hit description =Putative GTP binding protein
MGILERIKEIEAEMARTQKNKATEYHLGQLKAKLAKLRTQLLEPPKGSSGGGDGFEVTKFGHGRVALIGFPRYPFT

SEQ ID NO: 55383 - protein, 450 aa, Zea mays
  Coding DNA Sequence Number=SeqID_13604
  Homolog annotation: Hit_ID=Q10SV7; Match level="QueryCoverage=71%, HitCoverage=95%, E-value=1e-139, Identity=76%"; Hit description =Expressed protein
MDDHDVVRIMLRSFIVLDSNLVNLIRESTKYTKMTLEEILGKFKISLVIKRFKTALKGHKDYSNKNKSREKCGFFKCERELFRELLDALILPSQMSCSEPTCASELHQRACTWIGAEKCQPSDQRARVPDLSGPQEPIAVQRNPASTPQPTAETQIMHRFVKEIAATDPPEHLNSLLNVLQARGEKIVSPGAKRGLIPCVVPLSESPAGDLTSLLRWPTAPTGYTKYTAIFISMVKQYIHRILVEADFSAGTGDDLWAAVGEAGKNLYAKGEFKESQVADLDVYLLKKVGLFPDVIERKTLRHLEKGDNVSALITGEFYTRDQFPGFGRPFVFNAEIFKRVGRTSEAKDSARVALKSPWWTLGCSYEEAAELAGWEDEQLEFIREKVTEEGKREDLKRGKAPEQVILDEAAFLMDLASVDGNWDEVVDRIAECYREAGLHDIANFIAYRE

SEQ ID NO: 55384 - protein, 85 aa, Zea mays
  Coding DNA Sequence Number=SeqID_13605
  Subcellular localization annotation: CTP_CleavageSite=56; ConfidenceScore=5.04e-01
MALLDIDPLALGHPSPLGPLRHKGLSGPSGVLGCVALSKALNEALSKGVRVVGPSKADRVEGLDSVSVEEVLCCQLVDVCGCIGV

SEQ ID NO: 55385 - protein, 787 aa, Zea mays
  Coding DNA Sequence Number=SeqID_13606
  Gene Ontology: Mol. function=sequence-specific DNA binding; Cellular component=nucleus; Biological process=regulation of transcription, DNA-dependent
  Homolog annotation: Hit_ID=Q6RF30; Match level="QueryCoverage=99%, HitCoverage=100%, E-value=0.0, Identity=93%"; Hit description=Rolled leaf1
  Pfam annotation: Domain name=Homeobox; Domain location=28-88; Score =64.6; E_value=3.2e-16; Accession=PF00046.19; Description=Homeobox domain
  Pfam annotation: Domain name=MEKHLA; Domain location=640-787; Score =296.7; E_value=4.4e-86; Accession=PF08670.1; Description=MEKHLA domain
  Pfam annotation: Domain name=START; Domain location=167-325; Score =62.1; E_value=1.8e-15; Accession=PF01852.10; Description=START domain
  Pfam annotation: Domain name=bZIP_1; Domain location=69-129; Score =7.0; E_value=0.027; Accession=PF00170.11; Description=bZIP transcription factor
  Pfam module annotation: Pfam domain module=Homeobox::MEKHLA::START::bZ IP_1; Domain location=28-88::640-787::167-325::69-129
MGTMVAAVALRGGSSDSGGFDKVPGMDSGKYVRYTPEQVEVLERLYIDCPKPSSSRRQQLLRECPILSNIEPKQIKVWFQNRRCRDKQRKESSRLQAVNRKLTAMNKLLMEENERLQKQVSQLVHENAHMRQQLQNTSLANDTSCESNVTTPPNPIRDASNPSGLLAIAEETFTEFLSKATGTAIDWVQMPGMKPGPDSVGIVAISHGCRGVAARACGLVNLEPTKGIEILKDRPSWFRDCRSLEVFTRFPAGNGGTIELIYMQMYAPTTLVPARDFWTLRYTTTMEDGSLVAWSVPEVLRPLYESSRVVAQKMTTVALRHLRQIAQETSGEVVYALGRQPAVLRTFSQRLSRGFNDAISGFNDDGWSVMGGDGIEDVVIACNSTKKIRNTSNAGITFGAPGGIICAKASMLLQSVPPAVLVRFLREHRSEWADYNIDAYLASSLKTSACSLPGLRPMRFSEGQMIMPLAHTVENEEILEVVRLEGQPLTHDEALLSRDIHLLQLCTGIDEKSVGSSFQLVFAPIDEHFPDDAPLISSGFRVIPLDDGVSSGRTLDLASSLDVGSAAPQASGESPDDCSLRSVLTIAFQFPYEMHLQDSVAAMARQYVRSVISAVQRVSMAISPSQSGLNAGHRMLSGFPEAATLARWVCQSYHYHLGMELLNQSDGAGEALLKMLWHHPDAVLCCSFKEKPMFTFANKAGLDMLETSLVALQDLTLDKIFDESGRKALFSDISKLMEQGYAYLPSGVCMSGMGRHVSFDQAVAWKVLGEDSNIHCLAFCFVNWSFV

SEQ ID NO: 55386 - protein, 391 aa, Zea mays
  Coding DNA Sequence Number=SeqID_13607
  Gene Ontology: Mol. function=RNA-directed DNA polymerase activity; Cellular component=mitochondrion; Biological process=RNA-dependent DNA replication
  Homolog annotation: Hit_ID=UPI00005A975E; Match level="QueryCoverage =94%, HitCoverage=21%, E-value=0.0, Identity=87%"; Hit description =PREDICTED: similar to Retrovirus-related Pol polyprotein from transposon 297
  Pfam annotation: Domain name=rve; Domain location=133-292; Score =100.6; E_value=4.5e-27; Accession=PF00665.16; Description=Integrase core domain
MGSCLIETGRPRTCNISTEESYPSTEPKLGDWRGAPSRSSCWVTERSSTTASPQASSSDAYPSSKVRNYCKKYTRGLAVITQRLEPLLETPSDRGFYWPTAVADATRIVRTCQGCQFYARQTHLPTQALQTIPITWSFAVWGLDLVGPLQKAPEGYTHLLVAIDKFSKWIEVRPLNSIRSEQAVAFFTNIIYRFGVLNSIITDNSTQFTGRKFVDFCEDHHIRVDWAAVAHPMTNGQVERANGMILQGLKPQIYNDLNKFGRRWMKELPSVVWSLRTTPSRATGFTLFFLVYGAEAILPTDLEYGSPRTRAYNDRSNRTNREDSLDQLEEARDMALLHSARYQQSLRRYHARGVRSRDLQVGDLVIRLRQDAEDATSSCLPGKGHSASPRF

SEQ ID NO: 55387 - protein, 119 aa, Zea mays
  Coding DNA Sequence Number=SeqID_13608
  Subcellular localization annotation: CTP_CleavageSite=35; ConfidenceScore=5.55e-01
MGQALSWGRSLLSPAWTLVTPYCKRTRPGRGSNTKAAGFPPLSRLVSGHLAFPPFALAHALDPSGLGHAAHSLVGLGTPRSRNADKYFYFEAYTSGGFGSYLFGMSQGIAKQAAEANDA

SEQ ID NO: 55388 - protein, 116 aa, Zea mays
  Coding DNA Sequence Number=SeqID_13609
MEIGQYATSSFSKEHQKIYRSDFLISFPLLCFLRLGQPFLVDELKMVVRLRGPLRRDAVWEAVDADVAEPVADEMLASARRWSAAAWDAMAPDGSSNVLTRLSACLGVRGQGVPAS

SEQ ID NO: 55389 - protein, 725 aa, Zea mays
  Coding DNA Sequence Number=SeqID_13610
  Gene Ontology: Mol. function=nucleotidyltransferase activity; Cellular component=integral to membrane; Biological process=aromatic amino acid family biosynthetic process
  Homolog annotation: Hit_ID=Q6H7J6; Match level="QueryCoverage=90%, HitCoverage=90%, E-value=0.0, Identity=76%"; Hit description =Oligopeptide transporter OPT-like
  Pfam annotation: Domain name=OPT; Domain location=77-698; Score =584.3; E_value=1.1e-172; Accession=PF03169.6; Description=OPT oligopeptide transporter protein
MATATHHSDAPGLNGAEGMEMMAEANELRRRGKPSDDRTASYGAGAEEDEAAAAAAPSSSSVERAFADQPVPSWREQLTLRAFVVSFFLAVMFSVIVMKLNLTTGIIPSLNISAGLLGFFFVRLWTKAIESVGLLRQPFTRQENTVIQTCVVASYGLSFSGGFGNYLLAMSDKIAAMVTEANNAQNIKNPQLGWIIGFLFLVSFIGLFGLVPLRKIMIVDYKLTYPSGTATAYLINGFHTPQGAKLARKQVKKLGTFFVLSFVWGFFQWFYTANPDECGFQKFPSLGLQAFDNKFFFDFSPTYVGVGMICSHIVNVSILLGAILSWGIMWPLIAKKKGVWFSADLDDNSLHGMQGYRVFIAIALILGDGLYNFLKIFILTVVSLRSQVRKANASTLPISDDGTVTSTAPTSYDEERRNEHFLKDQIPWYAALGGYVAIAAISIGTVPQIFPQLKWYHILVAYIFAPILAFCNAYGNGLTDWSLVTTYGKLAIFAFGAWVGASNGGVLAGLAACGVMMNIVGTAADLMGDFKTGYLTLASPRSMFISQVIGTAMGCVIAPCVFWLFYKAFGNIGVAGSEYPAPNAVVFRSMAVLGVDGFSSLPENCLTLCYVFFAAAIVINLIRDLVPKKVSRFIPIPMAMAIPFYIGAYFAVDMFVGTVILFVWQRLDRAKADTFAPAIASGMICGDGIWVLPQSVLALAKVKPPICMKFLSRAMNDKVDVFLGS

SEQ ID NO: 55390 - protein, 140 aa, Zea mays
  Coding DNA Sequence Number=SeqID_13611
  Homolog annotation: Hit_ID=Q6H7J6; Match level="QueryCoverage=99%, HitCoverage=19%, E-value=4e-12, Identity=40%"; Hit description =Oligopeptide transporter OPT-like
MWVLVAKLKRGALDISNLNVDDRTKVFYFDFSATYVSSPWRHHFVGSNVATYQHKERKLVSMYWKKHANTLAVSDNGTPPPAPTETGSFDDKRRIELFVKDQIPEAVALGGYVLFWQLYRSAVSLSLSLRSSGTTSLHLY

SEQ ID NO: 55391 - protein, 732 aa, Zea mays
  Coding DNA Sequence Number=SeqID_13612
  Gene Ontology: Mol. function=nucleotidyltransferase activity; Cellular component=integral to membrane; Biological process=aromatic amino acid family biosynthetic process
  Homolog annotation: Hit_ID=Q6H7J6; Match level="QueryCoverage=95%, HitCoverage=95%, E-value=0.0, Identity=70%"; Hit description =Oligopeptide transporter OPT-like
  Pfam annotation: Domain name=MFS_1; Domain location=155-576; Score= -53.7; E_value=0.091; Accession=PF07690.6; Description=Major Facilitator Superfamily
  Pfam annotation: Domain name=OPT; Domain location=81-705; Score =544.3; E_value=1.2e-160; Accession=PF03169.6; Description=OPT oligopeptide transporter protein
  Pfam module annotation: Pfam domain module=MFS_1::OPT; Domain location=155-576::81-705
MAPAAGTATGSASGGSAVHDDAEAVELGHNNLIRRRHPGADVEDEADDRNVGASAAAGKELAPSSVEQAFADQPVPSWREQLTVRAFVVGALLSVVFNVILMKIDLTTGINPSLNVCASLLSYFLLRTWTRAIGCMGLLRQPFTRQENTMIQTCVVSAYGITFTDSNLTGGFSSYLFGMSAKIANKTEVNDPQDIKDPHLGWMMGFMFLVSFLGLFALVPLRKVMIVDYKLTYPSGAATAYLINGFHAPEGSERAKKQVRTLGKYFSLSFLWAFFQWFYTAGNHCGFGSFPTLGLEAYKNRFFFDFSPTYIGVGMICPYIVNVSLLLGGIMSWGIMWPLISTKKGSWYPETLPDSSLHGLHGYRVFLTISVILGDGLYNILKVLYSTIEAFVSRYRNRKANTLPVSNDGTPADATTETESFDDKRRLELFTKDQIPKTVALGGYVVLAAITIGCLPLIIPQLKWYHILVAYIVSPALAFCNAYGCGLTNWSFASAYGKLAIFSFGAWAGASHSGVIVALAACGVMMSIVGTAADLMQDFKTGYLTLASPRSMFISQVIGTAMGCVIAPCVFWLFYKSFDVGATNGAYPAPYTFMYRNMAIMGVDGLSLPKHCLTLSYIFFAAAFAVNMVKDLVPKKVAKFIPIPMAVAIPFYVGAYFTIDMFLGCTILFIWEMRNKAEADSFGPAVASGCMCGDGLWALPEAILSLANVKPPICMKFLSRSVNARVDSFLGN

SEQ ID NO: 55392 - protein, 86 aa, Zea mays
  Coding DNA Sequence Number=SeqID_13613
  Subcellular localization annotation: CTP_CleavageSite=68; ConfidenceScore=5.23e-01
MAGSRAPLLHLLGAFSLPLIHGGSTGHGARVPCNLLSSATTSFLYLSSRIHGHCSSGAMAKLSPTTTVAAYLAQEHGPQRPRLSGL

SEQ ID NO: 55393 - protein, 60 aa, Zea mays
  Coding DNA Sequence Number=SeqID_13614
MEAACFASAVEEAPSPNSAGSDNQGKRSRLHQIPMFNLFFPGPPKATDKGIIFGLGICPE

SEQ ID NO: 55394 - protein, 101 aa, Zea mays
  Coding DNA Sequence Number=SeqID_13615
MANDDHAEDTKYWAPDRRLCCMGSGPALAGVAKQQRRRKDSTGRRQRDSGCAKIAPVSVDRTKQRGRGHTEGCPEQLTARRSSPWHWMGRRRDGGRRTGSG

SEQ ID NO: 55395 - protein, 67 aa, Zea mays
  Coding DNA Sequence Number=SeqID_13616
MEMGRAEHHERGGEDDLATGAMAQGKAKLGPENRIYFGSRFLAMKVTSASSNSKLINVICEVFVITL

SEQ ID NO: 55396 - protein, 55 aa, Zea mays
  Coding DNA Sequence Number=SeqID_13617
MGRLEPRAEWESRLVGKACNLCKVLETGCPHCTQCSGGEVGNMEDFEEFQNYDKF

SEQ ID NO: 55397 - protein, 133 aa, Zea mays
  Coding DNA Sequence Number=SeqID_13618
MDMGRAECHERGGENDLAIGAMAQGKVELGPAHAGSTKLEEVAARRAAKGARHGRGRSAERERENDAEKKRATGERSTTHVEEDKDGARRKIRENGGKSQIFWITVFSDVYLVDTLYDYTFHSPNYETKESED

SEQ ID NO: 55398 - protein, 98 aa, Zea mays
  Coding DNA Sequence Number=SeqID_13619
  Gene Ontology: Mol. function=protein serine/threonine kinase activity; Biological process=protein amino acid phosphorylation
  Homolog annotation: Hit_ID=Q8RZP4; Match level="QueryCoverage=74%, HitCoverage=11%, E-value=4e-09, Identity=44%"; Hit description =Putative receptor protein kinase PERK1
MCACSAAALLLGIGLVERLRVMGRFCLPSVTASEACLDGFSELVSGSPVGLPSWSLMCFRDSDQLIIIPFYCTGVSTLLIKKKKREELAVYSQEAVSV

SEQ ID NO: 55399 - protein, 34 aa, Zea mays
  Coding DNA Sequence Number=SeqID_13620
MAHGSWPYVPSIPPTRSSCTDRSARCPNVARPLT

SEQ ID NO: 55400 - protein, 563 aa, Zea mays
  Coding DNA Sequence Number=SeqID_13621
  Gene Ontology: Mol. function=nucleic acid binding; Cellular component= intracellular; Biological process=transport
  Homolog annotation: Hit_ID=Q7Y1L6; Match level="QueryCoverage=74%, HitCoverage=90%, E-value=1e-127, Identity=55%"; Hit description =Putative GAP SH3 binding protein
  Pfam annotation: Domain name=NTF2; Domain location=18-135; Score =150.3; E_value=5e-42; Accession=PF02136.11; Description=Nuclear transport factor 2 (NTF2) domain
  Pfam annotation: Domain name=RRM_1; Domain location=281-351; Score =35.1; E_value=2.4e-07; Accession=PF00076.12; Description=RNA recognition motif. (a.k.a. RRM, RBD, or
  Pfam module annotation: Pfam domain module=NTF2::RRM_1; Domain location=18-135::281-351
MAGQAGNPVNHPISPHVISGAFVQQYYHILHEQPDQVHKFYQDSSILGRPDSNGIMAYVTTMRDINEKIMSMDFRNCLTEIETADAQLSHKDGVLIVVTGSLTSDEGVFRRFTQSFFLAPQESGGYFVLTDVFRFISERKPAEINQVATQENEISQNVRPASETCSALPEPIPADGSVISDHVTADSNVTEKQISDLSANGTAIESNDNTQPPVQVPKEDPKKALLVAPPPPTQMDVTKKSYASIVKVMKEGPPTPVVKTTSIISNLVTVLTYPAEQGYSIFIKNLPFHANIEMVEEEFKKFGTIKPGGVQVRHNKVDRFGFGFVEYESQLSMQAAIEASPIRMADKEVGIEAKRANSRVIGLLTLYNGVGGRFQSGRGVYHGDNFRGRGSGYVDNTNYRSSGSFNRQNEGEMYNRRNEGEMYNRRNEGDFYNHRNEGEFYNRRNDGGENYNRRNDGGENYNRRNDGGKNFSRRNDSGTENFNRRNDGGGENFSRRNDGVGENFNVRNDGVGENFNRRNNFRNQNDFPGRGRGSPTPGNSYYQNGNGRFSRVNNGAKQAPVAA

SEQ ID NO: 55401 - protein, 343 aa, Zea mays
  Coding DNA Sequence Number=SeqID_13622
  Homolog annotation: Hit_ID=Q6QP51; Match level="QueryCoverage=61%, HitCoverage=98%, E-value=2e-12, Identity=40%"; Hit description =Putative growth-regulating factor 1
MQAACNRTKWAHPFDSNASSMEAQAHTSCNRRAGCYVQETAPPLTPLSHGRRRDGRYDQKWAGSNGGGSGQVVNQAHVPSWDNERTLSHGVKTEKQATLHLRHNDRVKKGTGKGDTPKGILLHEGNGPRAPLLIRGSKAGPSEGFNGRLRALELRAHYWSEVRRLAPRKGSTTASGHSGSVPTTDQGFVGWPSKGSIAASDAEQGMTLAAKSGLGCHRKLRLARPQGSDSGSAPEDDELRLARPQGSDSGSAPEDNELCLARPQGSDSASAPEDEELRLARPQGSDSALAPKDNELRLARPRGSDSTSTSEDRLNLDLGGASASPDPGLGPTTSQKGPSLPYP

SEQ ID NO: 55402 - protein, 277 aa, Zea mays
  Coding DNA Sequence Number=SeqID_13623
MAPPMTWSVRALGRRGGGSSEVEVEPVFRGRGRVRAPGSGEAEFVVFRGRGRVRALGSGEAEFVVFRGRVRALGSGEAEFVVFRGRALGSGEAEFVVFQGRARVRALGSGEAELPMAPEAGLGRCQPHSVEWHSSRSDAGGTVFLSGRIRCQATFALNAPATRSVGVTIRPRLLLGGDWASSELKLCADGGYQLRLGVLGVPLIMVPDTHLPWAHESHTPLSRKRGRLRASYTLSTGARLSVSNWTGGRDRAVAQFKWAGVGLSAMWQVKRKWAKVR

SEQ ID NO: 55403 - protein, 85 aa, Zea mays
  Coding DNA Sequence Number=SeqID_13624
MSGDHAKREIMTSGDKSASSGRTHSKESGHKHKEESASSIKSQQRGDKKKKMKKVVYYETDTSSPSTSGSESSSVTSKHHERKKY

SEQ ID NO: 55404 - protein, 270 aa, Zea mays
  Coding DNA Sequence Number=SeqID_13625
  Gene Ontology: Mol. function=DNA binding; Cellular component =mitochondrion
  Homolog annotation: Hit_ID=Q53PX7; Match level="QueryCoverage=84%, HitCoverage=66%, E-value=5e-79, Identity=69%"; Hit description =Expressed protein
  Pfam annotation: Domain name=DUF296; Domain location=54-172; Score =187.4; E_value=3.5e-53; Accession=PF03479.5; Description=Domain of unknown function (DUF296)
  Subcellular localization annotation: CTP_CleavageSite=70; ConfidenceScore=5.06e-01
MTGGEPPTGGSSGFPRRSPPATYLLPSILSTSLGLVPSHNGVGEWYALSAGGSFTPHVIIVGTGEDVAARVMSFSQKGPRSVCILSANGTISNVTLRQPGSSGSTFTYEGRFEILQLMGSFTMAEEGRKRTGGLSVSLAGPDGRVVGGVVAGMLRAASPIQVIVGSFLPNSLKQHQRRMSAQQQLSPVPALPEPEAPPPVLTAATPISLAGPGNGFHDAPPPSAAPPQPHASAMNLNATGFPVAGWPASSPQQMVYRASPDINVSLTPQE

SEQ ID NO: 55405 - protein, 37 aa, Zea mays
  Coding DNA Sequence Number=SeqID_13626
MAKKGGSWIGVDRRGRQSSKLSRYAPEEVADDERKQE

SEQ ID NO: 55406 - protein, 53 aa, Zea mays
  Coding DNA Sequence Number=SeqID_13627
MEGPKGKRPNQRLGTRWENSGGARVGSSSSHGGPQRRSLSQDKGINTLSGQHS

SEQ ID NO: 55407 - protein, 162 aa, Zea mays
  Coding DNA Sequence Number=SeqID_13628
MAAWTRLHGEKSDECEQGEIEGIASEEAELTGATNTTGVRQQEQRTRGHGERRWCSTGARMVRERCEGSVEERYWAKGIFEVLALSAAREASGLANVFSIVVTFSAADVLSGLSITFGATGEVILGVPPSAVLNFGCTSASDSTTGCKLAKGASTWIGTSTR

SEQ ID NO: 55408 - protein, 121 aa, Zea mays
  Coding DNA Sequence Number=SeqID_13629
MDPEFVAGDFPKQQPGEGKVLVVMSSLGSLPSSVPQLEVPPAPPQGNPAAGGDPDGDDDDGGSSSHSMEPSEEDKFLKLSRYASEDVNADAKSILLFGIQDSLGAPKVHPMGVAPELRVDF

SEQ ID NO: 55409 - protein, 106 aa, Zea mays
  Coding DNA Sequence Number=SeqID_13630
MGRGADGWGSRAENARSCGQARESADRAGPPEDFDDSEFSEEWFSSEGEESQPLVPLRHHPKGGDGADGSNYGNGDDKVGSGGSGDDNGSSKGNKSGKGSDKAPVA

SEQ ID NO: 55410 - protein, 192 aa, Zea mays
  Coding DNA Sequence Number=SeqID_13631
  Gene Ontology: Mol. function=transcriptional activator activity; Cellular component=nucleus; Biological process=regulation of transcription, DNA-dependent
  Homolog annotation: Hit_ID=Q67UX6; Match level="QueryCoverage=25%, HitCoverage=19%, E-value=2e-14, Identity=79%"; Hit description =Putative homeodomain leucine zipper protein
  Pfam annotation: Domain name=Homeobox; Domain location=63-117; Score =32.1; E_value=1.9e-06; Accession=PF00046.19; Description=Homeobox domain
  Subcellular localization annotation: CTP_CleavageSite=54; ConfidenceScore=5.06e-01
MEVPRLPQGALPSMALSRLSPQSTPRSRAHLPAIKVVTPDEDGRQSPHGGSGPSDSSGAGARKKLRLTNEQSTLLEDTFRAHNILSNAQKQELGRQVDLSARQVEVWFQNTHVQITHMFMLMLTPHRGPPIVPSDRSISRTRESSFNVSKYFLFSMSTNILCWHKPHMREACLATAATIYASKEAAWGKKKD

SEQ ID NO: 55411 - protein, 158 aa, Zea mays
  Coding DNA Sequence Number=SeqID_13632
  Subcellular localization annotation: CTP_CleavageSite=13; ConfidenceScore=5.06e-01
MPSLHALRLTSLSSMLRRRRRATGACAAIWTRRRPLPAQRSTEREEPEVEDAMLKRSAGALYDRIWGPHGRDTVRERSHRVMEQVANDEEVDDLGGLESTMALAEGARAGIREQPAPPTSASEDDPVAAAALPEDTLVGAAQAAEDPAASAGPSHVAG

SEQ ID NO: 55412 - protein, 60 aa, Zea mays
  Coding DNA Sequence Number=SeqID_13633
MGVVVQNCNLADGEYVLIPEQGVAQEGVQEPAPELAIEDLPTLAFEGLYCALKCRSYLKP

SEQ ID NO: 55413 - protein, 570 aa, Zea mays
  Coding DNA Sequence Number=SeqID_13634
  Gene Ontology: Mol. function=solute:hydrogen antiporter activity; Cellular component=integral to membrane; Biological process =regulation of pH
  Homolog annotation: Hit_ID=Q2QLJ1; Match level="QueryCoverage=99%, HitCoverage=67%, E-value=0.0, Identity=74%"; Hit description =Sodium/hydrogen exchanger family protein, expressed
MAAFLVGLAFPSEGRVSRLLVSKTNFVLSSFVLPLYVAHVCLSLRQTTDDIEVAGLTRDEGFRAYVMELPFPWWKVFFVTVMGTLGKLTGCAAAGLLRGLGWLEALALGMLLNVKGYFHLYCAQAAFDAGIITDKSFMAIIFMVALNVAVTPMVGVGIASWARRSVQWRLMGLQHHDPSTELRLVVGLHGPQDVPTLAYLMEALRWGGGAGGGGELAVYAVDMVQMTDQTAAAIVKGGGFDGVTVVDEEVSEMRKLIGEALDAYQAECGGGAKVKVRRLLALSSFPDMHSDICICAEDAMAALVLLPFHKAQRADGTMEPGHYGFRVVNQKVLQLAPCSVGVVVDRGLGKHAAAVSSGSQTQTAAAVVVVFIGGADDREALTLASLMYKHPGVRLTALRVVQNATAQARAKARTSLFESKGSRRGGGGGGGGSGIGIGAPASSALGQEEAQMQVDDKFFAEFYRKHVAGSRQQGATAIGYLEKHVADGAELVAVLRGMQADYRLFIVGRGRDRSSVLTEGLDEWAECLELGPVGDILASSDFSTTASVLIVQQYDAKKHYKVIDEEFMPL

SEQ ID NO: 55414 - protein, 235 aa, Zea mays
  Coding DNA Sequence Number=SeqID_13635
  Gene Ontology: Mol. function=solute:hydrogen antiporter activity; Cellular component=integral to membrane; Biological process =regulation of pH
  Homolog annotation: Hit_ID=Q2QLJ1; Match level="QueryCoverage=99%, HitCoverage=28%, E-value=1e-86, Identity=71%"; Hit description =Sodium/hydrogen exchanger family protein, expressed
MDCSMTSSILSANYNTILFEFGVILLSSKVLYALLRKVYQPRVFSDLLLGIILAQFRVLSLTNAINLVFGKIGGFVFAPYLFALGVEMDPTTLLDAPTGDSVVAYAGILSTCVLVTLFHMPLMQATSGVVHERSLRSFLGLAAVLANTASPVLTRLTTDLKIAKTAVGRLAVGAGLASDMLTTMLIAVGSMIWRDTGVDGRESDDSPIVQPVLTAAVLVVVIVSAFVSRAMAEWV

SEQ ID NO: 55415 - protein, 898 aa, Zea mays
  Coding DNA Sequence Number=SeqID_13636
  Gene Ontology: Mol. function=protein dimerization activity; Cellular component=chromatin; Biological process=electron transport
  Homolog annotation: Hit_ID=Q2QMZ1; Match level="QueryCoverage=86%, HitCoverage=77%, E-value=1e-136, Identity=36%"; Hit description=HAT family dimerisation domain containing protein
  Pfam annotation: Domain name=DUF659; Domain location=255-408; Score =118.2; E_value=2.4e-32; Accession=PF04937.6; Description=Protein of unknown function (DUF 659)
  Pfam annotation: Domain name=hATC; Domain location=616-701; Score =38.0; E_value=3.3e-08; Accession=PF05699.5; Description=hAT family dimerisation domain
  Pfam module annotation: Pfam domain module=DUF659::hATC; Domain location=255-408::616-701
MDCHGSGKGNEKAILDSGESSGAAGGLSKTYVVTKEGKRIELKGTIKDPWSHGTKRGNVKPCFNAPRDVKNILLEEVALSKKKKRDTTENRLYIQKALVEHDYRTTIARLNEEEQLEMAMRESLRDVGLTYDGSSRGSGIVIGAASGTRVSNSVAGNYGQTSGSRSGSSTKQSSLRSFYPGPSSSKAPFDIDLARSRAPSQPQVDIMLCRDSKLKLWKALSKWFHANDIPGRKADCPYFRAAMKLAQQLGEVPLPKGKDIDGQLLDMNYNDLEAHMESFKEDWSRYGVTIMCDSWTGPTMMCIINFMIFCNGRMFFHKSVNATEEVQNAEFIYDCIKEVVVDDVGAKFVVQIVIDNGSNYKKACKQLIAEHPHITWQPCAAHTVNLMLKDIGKFDDVANVVDSAKRICRFFYKHNRLHAMMREKIGGELIRWNATRFGTVFMCLQSFWDRQDQLKAWMISAEWRNSQWRNEEDHSFAYDCLTDRIWWDDMELVLNAVGPIFFVLRYADQQKNATLSGFLPKMIQAYNDISAKLKKSERGKGGLLKRTAEVISKRIRYLLNETLMLAGAALDPQELYRSNLAKKSSCQLAVTLAIKKLATSTKEAAAAIDQFSRFIEKKGLFGDPEAKWSALNGKPDAAKWWGSYGGQCPELQRIARRIVSQCISSSGCERSWSTFALVHTKLRNKLGFEKLHKLVKVHYNLKLQIEQFEADFQSLQEKDSDPCSMLMDVALYDDQNPIMDWLNNSMSDSAPTLDEYDDSDLDWSTPSRFVTESLQMGIEEVAEFKRDLYMGKKAVKTNRECNGMEKMLKVPQKTMKLILHKNKAAQFMLSQVTVVPMMKVMAIMMLVPMEVVALGLLMVLPKVRDMGNQLLCVQDQQEKGSQLSRALLNYKWLDYPFT

SEQ ID NO: 55416 - protein, 268 aa, Zea mays
  Coding DNA Sequence Number=SeqID_13637
MARRGEERGHGVALWMVGAGGARMAESGRGREWWGLPRRFLPLKKTKIRVHGRPALKPAAGPGLYVREQPLSIACWAELGSVERLRRAERRSIEADGDELCMLRCALLTAASPPERLLPVSRVALSFSVKWLSRAPLTRAAFSSPARRDLSTPSPTMSDPSFPGAAKVGVVEFLNGVGKGVEAHAAKLEEAVGGDLQRLLEARTLRLKKLGIPCKHARTLPNQKHQQKTNEWHHHRCTAGGGHKEMPSQKHKRCDVSTATEQPRSPQN

SEQ ID NO: 55417 - protein, 327 aa, Zea mays
  Coding DNA Sequence Number=SeqID_13638
  Subcellular localization annotation: CTP_CleavageSite=31; ConfidenceScore=5.38e-01
MARLGAVGARPRRPARPRRPAQPPPPPRRLRSAPARALFARHAALGAWPRPGSPVLPYPIPAARDLELGRRASGARPELGWRGRGDPTRRALAPGAGALLVARGLGPARPARVQGAPRAAWLARCGVPARDPGAARSAQCTVARSVAARGGFARPARSTPALPLVVAPCVVAPCPARPSAAWRVRGTQLGPGVVAHSAQRGSQPMSPARRSMARLRHTAWKSVIPFLPSYLAERPLRHPVTGQSSHLERLHHRLHEEQERRQQEQQGSSFSLQQEIESVRSCSPMLPLEAPPAPPLSAPAARVAAGGDLDDGGGDSSLSHDTDLSAD

SEQ ID NO: 55418 - protein, 210 aa, Zea mays
  Coding DNA Sequence Number=SeqID_13639
  Gene Ontology: Mol. function=nucleotidyltransferase activity; Cellular component=intracellular; Biological process=regulation of growth rate
  Homolog annotation: Hit_ID=Q1S9Y1; Match level="QueryCoverage=85%, HitCoverage=58%, E-value=6e-16, Identity=31%"; Hit description=3-5 exonuclease
  Pfam annotation: Domain name=3_5_exonuc; Domain location=31-208; Score=-15.8; E_value=0.0011; Accession=PF01612.11; Description=3'-5' exonuclease
MFGRGFFGSESRSNDLTTRLTVHFGSAMIDTTVTRDAAVADEWVRTVRAANPRGAPLIVGLDCEWKPNYRSWTTSKVAILQLCAGDRCLVLQLFYVDRIPASIRSFLADPDVFFVGIGVGEDAAKLATDYGLTCASPVELESRCNDYLGYYTGGPRLGLKGYAREVLGLVMEKPRGVTMSNWEKHDLEDAQIRYAWSYDFEGLKPRIYNL

SEQ ID NO: 55419 - protein, 316 aa, Zea mays
  Coding DNA Sequence Number=SeqID_13640
MECSRVRGLSLVERLNDIPRHVLDIVEFDVHRGETIALIVGELYSGHILLDMVDLSRNLPSEALEEMLGNEIRDISTGSSIVETAGSIREKPEAKYHLHMEKVKEVCVQDMLVDLEKGKCLLPIEDNSGMKVNSIAGHASTMRPSSWDDLVALKDDKSHHICCFSSHRQDSSVKSGEPMKAEGEIKVGILDKSTADKENKKWYKKPPRPPRSQTTSPLDPADQKLISALSELAVLKKARIERMKALKKMKNSKPASSIGNLVALIITVILCFFILWQGITTVYYWSTASLKLFSCFKSIAAAIVFRSPDRLIDATG

SEQ ID NO: 55420 - protein, 109 aa, Zea mays
  Coding DNA Sequence Number=SeqID_13641
MRGARATAEISPPAARGCAHRRADSDLRRQHLRQEEALDDFVDDGVDDLVVSLYQMDLDRTLFLLRSYLLLEKIKKYTMHISRSDDLLTHLSQQERLVGAFITIVCATL

SEQ ID NO: 55421 - protein, 186 aa, Zea mays
  Coding DNA Sequence Number=SeqID_13642
  Homolog annotation: Hit_ID=Q6JAD7; Match level="QueryCoverage=20%, HitCoverage=22%, E-value=1e-10, Identity=86%"; Hit description =Putative casein kinase I
MDHIVGGKFKLGKKIRSGSFGKLYLTVNVQNGEEVAVKLSLHLCPLPPPLSLQPWHLGRASPEPKPETHPAVDHRARRGAPTGGPDGVRRRKGRVARSASTNGIGGGAARWRSGQGTMSAVVCSKRSSSIFGDDLVPSPSSALSPSYHHHHHPAKRARCSPTRRSEVLLHHLFLDMDPQVRHVLAS

SEQ ID NO: 55422 - protein, 80 aa, Zea mays
  Coding DNA Sequence Number=SeqID_13643
MAAASRQDAHPEHEAGRAGVVEGGDHRRRHQRPGRGEAAGGARPRGVRGDGVRRRVCSTACTARSRLADVAADYEFFDYS

SEQ ID NO: 55423 - protein, 182 aa, Zea mays
  Coding DNA Sequence Number=SeqID_13644
  Gene Ontology: Mol. function=translation initiation factor activity; Cellular component=nucleus; Biological process=translational initiation
  Homolog annotation: Hit_ID=Q94HF1; Match level="QueryCoverage=93%, HitCoverage=70%, E-value=8e-64, Identity=73%"; Hit description =Eukaryotic translation initiation factor 3 subunit 12
  Pfam annotation: Domain name=SAC3_GANP; Domain location=19-175; Score= 89.7; E_value=8.8e-24; Accession=PF03399.6; Description=SAC3GANP family
MATEQAAENYTVEDLVALNPYNPDILNDLEKFVNEQVSSQTYNLDANLSLLRLYQFEPERMSIQIVAHILIKALMAMPAPDFSLCLFLIPEHVRYILGLTYVQPVEIEKESIANRKNFCLKTARFSQFWDEAAKNRHISEAVPGFEQAIQSYAIHVLSLTYQKVPRPILVEYSLVIGVQVLQ

SEQ ID NO: 55424 - protein, 69 aa, Zea mays
  Coding DNA Sequence Number=SeqID_13645
  Subcellular localization annotation: CTP_CleavageSite=40; ConfidenceScore=5.40e-01
MASRTPCAFSPLHLPPSALSFGVESAGTCSTYCSSSDTLRCAAPVGSGHSPSICAALESRRQKSLVRVD

SEQ ID NO: 55425 - protein, 180 aa, Zea mays
  Coding DNA Sequence Number=SeqID_13646
  Gene Ontology: Mol. function=dimethylaniline monooxygenase (N-oxide -forming) activity; Cellular component=intrinsic to endoplasmic reticulum membrane; Biological process=electron transport
  Homolog annotation: Hit_ID=Q9LMA1; Match level="QueryCoverage=98%, HitCoverage=33%, E-value=9e-51, Identity=55%"; Hit description =Probable flavin-containing monooxygenase 1
MIRFQEGPGPGGWCFSRNGVLLDDGTEVEADLVFLATGFEGKDKVRAVLPEPFRGLVVDRSGMMPLYRGTIHPLIPNMAFVGYVESVSNLHTSELRCRWLAGLLGGRFALPSVEDMVRHVDGEAEAMRRTTRFYKRHCISTYSIHDSDAMCADLGSRVLRKGNCLAELFAPYNNKDYKED

SEQ ID NO: 55426 - protein, 155 aa, Zea mays
  Coding DNA Sequence Number=SeqID_13647
  Gene Ontology: Mol. function=dimethylaniline monooxygenase (N-oxide -forming) activity; Cellular component=intrinsic to endoplasmic reticulum membrane; Biological process=electron transport
  Homolog annotation: Hit_ID=Q9LMA1; Match level="QueryCoverage=91%, HitCoverage=26%, E-value=2e-47, Identity=61%"; Hit description =Probable flavin-containing monooxygenase 1
MPAFPPGRGPEVFRGQVMHSLDYCKLGEEETVELMRGKKVVVVGYKKSAIDLALECAQANQGEGGEACTMLVRTLHWVVPSYSIWGLPFFLFYSTRLAQFLYERPNQGLLRSMLCTLMAPLRAGVSKFIESYLAWKLPLDKYGLRPGPPLRGGLR

SEQ ID NO: 55427 - protein, 99 aa, Zea mays
  Coding DNA Sequence Number=SeqID_13648
  Subcellular localization annotation: CTP_CleavageSite=55; ConfidenceScore=5.38e-01
MAPCSQHLFGMAPAGTAGLNSNHNGFPALGVTGALFSPAHVTGLPREETGRVPVVLEERNGPLVKGSFQNAGQQDRSSSIYFCRPLVASKCSGLIPWPN

SEQ ID NO: 55428 - protein, 81 aa, Zea mays
  Coding DNA Sequence Number=SeqID_13649
  Subcellular localization annotation: CTP_CleavageSite=30; ConfidenceScore=5.22e-01
RHPDPVPGPKGTFTIQAALTTKPSVTSSPQANSKPEEDLAIPTNEAQAVTSMRPTEETKRINLGFADERKTAIISSSLDDK

SEQ ID NO: 55429 - protein, 122 aa, Zea mays
  Coding DNA Sequence Number=SeqID_13650
MAHRTVNSACPVHHRTVRWPHKSELQRSNPNSWVTWLAHRTVQWRIGLSDLHIHPPLGDFQQSFKEIYATLCDCRMDPDIAVERLISQENEVLVRVHYYGHKFNLLEFVELIYILLQFQIFC

SEQ ID NO: 55430 - protein, 170 aa, Zea mays
  Coding DNA Sequence Number=SeqID_13651
  Gene Ontology: Mol. function=protein kinase activity; Cellular component=integral to membrane; Biological process=protein amino acid phosphorylation
  Homolog annotation: Hit_ID=O81106; Match level="QueryCoverage=96%, HitCoverage=24%, E-value=8e-69, Identity=73%"; Hit description =Leucine-rich repeat transmembrane protein kinase 2
  Pfam annotation: Domain name=LRR_1; Domain location=20-42; Score =17.0; E_value=0.071; Accession=PF00560.23; Description=Leucine Rich Repeat
  Pfam annotation: Domain name=LRR_1; Domain location=44-66; Score =17.6; E_value=0.044; Accession=PF00560.23; Description=Leucine Rich Repeat
  Pfam annotation: Domain name=LRR_1; Domain location=68-89; Score =10.6; E_value=2.9; Accession=PF00560.23; Description=Leucine Rich Repeat
  Pfam annotation: Domain name=LRR_1; Domain location=90-114; Score =4.4; E_value=43; Accession=PF00560.23; Description=Leucine Rich Repeat
  Pfam module annotation: Pfam domain module=LRR_1::LRR_1::LRR_1::LRR _1; Domain location=20-42::44-66::68-89::90-114
MSQNNLGGGGQIQYNLPNVKLEKLNLNHNQLQGNITDVFSNLYSLSELDLSFNSLIGDLPQSFTGLSSLKRMYLQNNQFTGYINVLANLPLETLTISHNLLVSMNVGNNHFTGWIPSQLKKINNLQTDGNSWSTGPAPPPPPYTAPPPPNHWNGAGQNDDGSSSSPAFLG

SEQ ID NO: 55431 - protein, 304 aa, Zea mays
  Coding DNA Sequence Number=SeqID_13652
  Gene Ontology: Mol. function=structural constituent of ribosome; Cellular component=small ribosomal subunit; Biological process =translation
  Homolog annotation: Hit_ID=Q10QU8; Match level="QueryCoverage=84%, HitCoverage=97%, E-value=1e-117, Identity=80%"; Hit description=40S ribosomal protein SA, putative, expressed
  Pfam annotation: Domain name=Ribosomal_S2; Domain location=23-191; Score=328.6; E_value=1.1e-95; Accession=PF00318.10; Description =Ribosomal protein S2
MAASAGGGAVRALSQKEQDIQMMLAADVHLGTKNCDFQMERYVFKRRTDGIYIINLGKTWDKLQLAARVIVAIENPQDIIVQSARPYGQRAVLKFAQYTGAHAIAGRHTPGTFTNQLQTSFSEPRLLILTDPRTDHQPIKESALGNIPTIAFCDTDSPMRYVDIGIPANNKGRNSIGCLFWLLARMVLQMRGTILPGHKLICSSTETQRKRKEQEEEAAAAPEFAAVTDYQGADQWGGDQWTSDVAAPPVAPTGADWGAAPASVPTGDGWDQTVAPVPVDGTVPPVVAPTGWESAAQPTAQGWE

SEQ ID NO: 55432 - protein, 48 aa, Zea mays
  Coding DNA Sequence Number=SeqID_13653
MAIKIDRRSRQPASLVILHNERKKAEDDALRPNVTSVTTGEVHNVVDS

SEQ ID NO: 55433 - protein, 510 aa, Zea mays
  Coding DNA Sequence Number=SeqID_13654
  Gene Ontology: Mol. function=actin binding; Cellular component =phragmoplast; Biological process=actin cytoskeleton organization and biogenesis
  Homolog annotation: Hit_ID=Q8H8K7; Match level="QueryCoverage=96%, HitCoverage=52%, E-value=1e-178, Identity=69%"; Hit description =Putative formin-like protein
  Pfam annotation: Domain name=FH2; Domain location=20-459; Score =475.1; E_value=8.6e-140; Accession=PF02181.13; Description=Formin Homology 2 Domain
MAVNKDNDGMPIRTNDDPAAAGDEARPKLKPLHWDTVRASSDRDMVWDRLESNSFQLRYILIPDIHTHTHTHTAKSYVKKVMLTRVFPGRLDEDMIEVLFTNNAANAPPRDTLRKPGVPLCGAQEKVLDPKKAQNIAILLRALNVTLEEVTDALLDGNAECLGADLLETLAKMAPTKEEELKLRNFTGDISKLGSAERFLRALLDIPFCFKRVDAMLYRANFDGEINYLRKSFQTLEGACDDLKGSRLFLKLLEAVLQAGNRMNVGTNRGQARAFKLDTLLKLADVKGADGKTTLLHFVVQEMVRSEEDARTTSERAAEDEARKIARDETFRSKQGLKVVSGLSGELGNVRKAAAMDFDVLHGYVSKLQAGLGGVRSVLALEKQCAQLQAQGHHHRFFARMRGFLEEAGAEIGRVRRDEERALGRVKEITVYFHGDAAREEAHPLRIFVVVRDFLSTLDRVCREVSQQDRTVVGSARSFRMSAATAMANLRMYGQHARGDDDDEEESWSP

SEQ ID NO: 55434 - protein, 225 aa, Zea mays
  Coding DNA Sequence Number=SeqID_13655
  Gene Ontology: Mol. function=actin binding; Biological process=actin cytoskeleton organization and biogenesis
  Homolog annotation: Hit_ID=Q8H8K7; Match level="QueryCoverage=85%, HitCoverage=21%, E-value=1e-24, Identity=40%"; Hit description =Putative formin-like protein
MSPAPLLRLASLLFLFLVHSAAAGDTRRALHEPLFPIEWTPPPSTTAPPAPGFASDPSTPVPPVYNGGPALLPAPPPPNTVAADASSSRTGPAPRRHGGGGGGTPKAAIVVASAAAAAVLALLAFAAAFLLTGRLARHPAWTHKPTGLAAAAHPGPASAVVLHADAVGTSAAAAAASSSGATATSTPHRKARSERARWGMCRDVDTVPSLELRPLPAAPARGVSD

SEQ ID NO: 55435 - protein, 91 aa, Zea mays
  Coding DNA Sequence Number=SeqID_13656
MAKKLAKGVAMLQPRSHKASYVWLAYYLILAHEMQKTYLSQALRERNQRASRRMQESRKGVLSGSQPSQASSMPKLTAATTTASKVANDGG

SEQ ID NO: 55436 - protein, 158 aa, Zea mays
  Coding DNA Sequence Number=SeqID_13657
  Subcellular localization annotation: CTP_CleavageSite=76; ConfidenceScore=5.17e-01
MTIKILLIKPRGCAPASRLLLGWSNSGVRRATPMLQLPDSPARPGPASIRPTNQHPLQLQCATPSLQAPATTQALVCTQDWMRRACHITNEEDTEELAKLEEALFAEMDSSNIANNTDTASKDKEIALRHGVSGVGGQGHKVVDWAADTGSVCVSVCD

SEQ ID NO: 55437 - protein, 812 aa, Zea mays
  Coding DNA Sequence Number=SeqID_13658
  Gene Ontology: Mol. function=potassium ion transporter activity; Cellular component=membrane; Biological process=potassium ion transport
  Homolog annotation: Hit_ID=Q9AYN6; Match level="QueryCoverage=93%, HitCoverage=100%, E-value=0.0, Identity=53%"; Hit description=High -affinity potassium transporter
  Pfam annotation: Domain name=K_trans; Domain location=39-761; Score =1182.0; E_value=0; Accession=PF02705.7; Description=K+ potassium transporter
MALETDKRNSREAKKVGGNFQRHDSLYGDAERVSDTGYVVSECIGVIYGDIGTSPLYVYASTFTSGISNVDDLYGVLSLILYSLILLPMIKYVFIVLYANDNGDGGTFALYSLISRYAKVSLIPNQQAEDAMVSNYALETVSAPMKRAQWTKEMLESSKAAKLAIFLLTVLGTSMVISDGVLTPAISDQMVWISVAILVVLFAVQRFGTDKVGYSFAPIILLWFMFIAGIGIYNLVEYDIGVLRAFYPKYIVDYFRRNGRDAWVSLGGILLCFTGTEAMFADLGHFNIRSIQLSFSFILFPAVSLAYIGQAAFLRKHPEHVHDTFYKSIPGPMFWPTFIVAVSAAIIASQAMISGSFAIISQSQTLGCFPRVKVLHTSKLYEGQVYIPEVNFVLGLLCVVVTLAFKTTTNIGNAYGICVTAVMVITTILLAVVMLLIWRVSIWLIIPFCLVFGSIETVYLSSVLYKFKQGGYLPIVSATVLVTIMGVWHYVHVKKYWYELEHIVTNQEMQELAQAHDIKRTSGVGFLYTELVQGVPPIFPHLIEKMPFVHSVLVFVSVKHLPIPRVEVAERFRFRRVESRISKMFRCVARYGYIDTVEGAKEFSASLVEGLQSYIEEGHFMTTVEIEDTEPETTTTSITESHTRTRSSTVHIEEALRPSETTELTQPRMGSSYSAHSSGRISDEQSRAIAEEKQFVQRELQKGVVYILGETEIWAGPNSSFLKKIVVDYMYSFLRKNFRQGEKAFAIPRQQVLKVGMVIHLASQKLSSWAILQQKELRPLVVEGWLCALGRGRKFVYQDFFLRKGRRSAKIY

SEQ ID NO: 55438 - protein, 846 aa, Zea mays
  Coding DNA Sequence Number=SeqID_13659
  Gene Ontology: Mol. function=potassium ion transporter activity; Cellular component=membrane; Biological process=potassium ion transport
  Homolog annotation: Hit_ID=Q9AYN6; Match level="QueryCoverage=91%, HitCoverage=99%, E-value=0.0, Identity=85%"; Hit description=High -affinity potassium transporter
  Pfam annotation: Domain name=K_trans; Domain location=54-781; Score =1454.6; E_value=0; Accession=PF02705.7; Description=K+ potassium transporter
MSLEVDNPAGGAGGGGESANRLSLKRHDSLFGDAEKVSGGKYHGSEGSWARTLHLAFQSVGIIYGDIGTSPLYVYSSTFPDGIKYNDDLLGVLSLIIYTLIIIPMLKYVFVVLYANDNGDGGTFALYSLISRYAKIRLIPNQQAEDAMVSNYSIEAPTSQLKRAQWFKQKLESSRAAKILLFTLTILGTSMVMGDGTLTPSISVLSAVSGIKEKAPNLTQTQVVWISVAILFLLFSVQRFGTDKVGYTFAPVISVWFVLIAGIGLYNLVVHDVGVLRAFNPWYIVQYFKRNGKEGWVSLGGVILCVTGTEGMFADLGHFNIRAVQISFNGILFPSVVLCYIGQAAYLRKFPENVGDTFYKSIPAPLFWPTFIIAILAAIIASQAMLSGAFAILSKALSLGCLPRVQVIHTSKKYEGQVYIPEVNFMMGLASIIVTIAFRTTTSIGNAYGICVVTTFSITTHLMTVVMLVIWKKHIVYVLLFYVVFGLTEMIYLSSILSKFIQGGYLPFCFALVLMTLMATWHYVHVKRYWYELDHIVPTNQMTALLEKNDVRRIPGVGLLYTELVQGIPPVFPRLIKKIPSVHSIFLFMSIKHLPIPHVLPAERFLFRQVGPREQRIFRCVARYGYSDALEEPKDFASFLADRLKMFIQEEVAFAQNDAENDDEAATDHQAPPRPPRRSTGSVVHSEEAIQSRGSTHSGRITFHASQTAEEEKQLIDREVERGVVYLMGEANVSAGPNSSVLKKIVVNYIYTFLRKNLTEGHKALAIPKDQLLKVGITVVLSGVQAKLEKAQSAAAGCSAARLLLISGGGTALCSAARQTAFPLWRPALHCGAACLGLPSAEAVSQ

SEQ ID NO: 55439 - protein, 410 aa, Zea mays
  Coding DNA Sequence Number=SeqID_13660
  Homolog annotation: Hit_ID=Q5JKH1; Match level="QueryCoverage=86%, HitCoverage=72%, E-value=5e-86, Identity=52%"; Hit description =Putative BRI1-KD interacting protein 112
  Pfam annotation: Domain name=DEK_C; Domain location=323-376; Score =72.6; E_value=1.3e-18; Accession=PF08766.1; Description=DEK C terminal domain
MEACWCCAGMEGKRAGVVLARKGVSFKLSKRKVDENLQSLHTVLYGRKSNNHFLKRNISQFSGFVWTDNQEKQRNRIKEKLEKFNKEKLLDFCEILDVIVKVTMKKEEVSAKLLEFLESPCVTRDVVLTDKKKGKKRGRKSKVGRETTAEGASTEKKRKRAHKQAAEDGKENDGEDDDPTGSEDASTGEEADGDSEANDHALSDDEHDEPASKKKSSDVKQKKETGSDAKEKDAPGKKGSTKRASKPSQNSKNEPEVEIKKVGKREKSSKETDVSPDSNKSNKKISKSKKGDGKETQNNKAARSSNKSKGKVKGGSVAGTAPTTEQLHAVVSGILKEVDFNTATLADILRQLGTHFEMDLMDRKAEVKRIIEDVINSMSDDEGEEGSEDEAEDDGKADNLKSEPDGGEEK

SEQ ID NO: 55440 - protein, 321 aa, Zea mays
  Coding DNA Sequence Number=SeqID_13661
  Homolog annotation: Hit_ID=Q2QXQ5; Match level="QueryCoverage=29%, HitCoverage=17%, E-value=3e-19, Identity=53%"; Hit description=ATP -dependent RNA helicase, putative, expressed
MDKEKKRNIKEKAQNSFPFISPFLGRSASLAHAPSPPPPHPARAPGPLRAPTAQLDRAPGSLPQRALPAHPAWPSAQAPTPRSPGQRPLPGPATATHPARSRGRARPSCLAPAWANVAPALAPPGPPATLINYSSSLGTLHDLRSHSAKNRPATRAPVDLPPLHSPTVGGRLAKVAQPVQPRWRRAMGAEEDRGGFDRPCGDIIHGVDNWGMELWRCCSAQASSDVLNAIDTCATVLQTVWLVSKTCDNVSRKEKHEMIVSCPFLLYLVSSQDKAVQTTSSLCFLRKLQRKSLISSLVKASKEEGVEVDLQEFQDFDEFED

SEQ ID NO: 55441 - protein, 50 aa, Zea mays
  Coding DNA Sequence Number=SeqID_13662
MASAVALYGAALMLGTKLGVNQYHYVNWNMERPPGKTVLPQGFNGTPLAD

SEQ ID NO: 55442 - protein, 50 aa, Zea mays; identical to SEQ ID NO: 55441
  Coding DNA Sequence Number=SeqID_13663

SEQ ID NO: 55443 - protein, 111 aa, Zea mays
  Coding DNA Sequence Number=SeqID_13664
  Subcellular localization annotation: CTP_CleavageSite=38; ConfidenceScore=5.40e-01
MATLDTDWWSPLLATQRQPISMLGASTGRPARRLGGVSCNQGRCTDDLSGVKNRRSNAISRWTSRIHHGPLRTVGVYVDIVPISDEPVTEDPGVQQVEVVEQELIQGTLFP

SEQ ID NO: 55444 - protein, 178 aa, Zea mays
  Coding DNA Sequence Number=SeqID_13665
  Gene Ontology: Mol. function=kinase activity; Cellular component =ornithine carbamoyltransferase complex; Biological process=amino acid metabolic process
  Homolog annotation: Hit_ID=Q6QP54; Match level="QueryCoverage=51%, HitCoverage=35%, E-value=3e-14, Identity=51%"; Hit description =Putative kinase
  Subcellular localization annotation: CTP_CleavageSite=89; ConfidenceScore=5.48e-01
MAPPVTWSVRALGWARCRLLRGRGRVCLPRPRSSPSPWVGRGRDCRLRPGLSPSPGVRRSGVHRLPGLSPSSSSSGAEPESEPWGRAKRSSSSSGAEPESEPWGRAMRTSLYRVAQQSERHRRRCPLVRPATFALNAPAILLVGVATWPRLLLGEDWASGEPKLCADGGYQLRLGVLR

SEQ ID NO: 55445 - protein, 116 aa, Zea mays
  Coding DNA Sequence Number=SeqID_13666
MVYAAVADASGTEVLAAREDPEGVPRGGRRRRHRGRGTGWRLRIEAGSRPLRRWVRGRGDVPRTVVGHLGGIAAPRGGVGTQAAIASGHLATGAAKMGAEAWNRCGRILYILNRVV

SEQ ID NO: 55446 - protein, 190 aa, Zea mays
  Coding DNA Sequence Number=SeqID_13667
  Homolog annotation: Hit_ID=Q10NZ2; Match level="QueryCoverage=30%, HitCoverage=21%, E-value=1e-10, Identity=60%"; Hit description =Expressed protein
MGADGSIPDFESGAAPFQILRAEWNRSILCLGPPQREGEADHTFSMLRFVNADIVLFGKTSSFIFEKFKLLFVALRYVTASVLYLKAHHYSIIITLHMPLLCACYSAIFYNAFLSYEGKDLSNVEHPFDDITYNIPEKPVTFTEGASYSLVILAGLGIAGLAGYAVFKELIFEPKEMINDTTVTNCILTL

SEQ ID NO: 55447 - protein, 699 aa, Zea mays
  Coding DNA Sequence Number=SeqID_13668
  Gene Ontology: Mol. function=sequence-specific DNA binding; Cellular component=nucleus; Biological process=regulation of transcription, DNA-dependent
  Homolog annotation: Hit_ID=Q9LEE6; Match level="QueryCoverage=99%, HitCoverage=97%, E-value=0.0, Identity=70%"; Hit description=OCL5 protein
  Pfam annotation: Domain name=Homeobox; Domain location=85-133; Score =26.4; E_value=8.7e-06; Accession=PF00046.19; Description=Homeobox domain
  Pfam annotation: Domain name=START; Domain location=271-456; Score =76.1; E_value=1.1e-19; Accession=PF01852.10; Description=START domain
  Pfam module annotation: Pfam domain module=Homeobox::START; Domain location=85-133::271-456
MEATLFDMRNADFLDSHHLQQAFEQQLFEQIPAAAVDSSDNIIHGRSDALVDEFESKSCSENPDGTASGDDGQGDEDPNQRPNKKKRYHRHTQHQIEEMEAFFKECPHPDDKQRKELSRELGLEPLQNQHERQENAQLRAENDKLRAENMRYKDALGTASCPSCGGPAALGEMSFDEHHLRLENARLRDEIDRISGIAAKHVGKPMVSFPVLSSPLAARSPFDLAGAYGVQPPGGGGGLGAADHLFGGAAGDLLRSVSAGQLSADKSMIVELAVAAMDELLRMARVDAPLWNGGVAGVPQQLDEEEYGRTFPGGLGPRQYGLRPEASRDDAVVIMTRDSLVEILMDANRFAAVFSSIVSRASTHEVLSTGVAGSYNGALQVLTRLLANHQLADVNGVPGAVTAGTDTGELLCEVTWVEHVEVDDRSVHNLYRPLVNSGLGFGATRWVGTLDRQCERLASAMASNIPNGDLGVIMSIEGRKSMLKLAERMVASFCGGVTASAAHQWTTLSGSGAEDVRVMTRKSVDDPGRPPGIVLNAATSFWLPVPPKRVFDFLRDETSRSESANSNQSNMLILQESCTDASGSYVVYAPVDVVAMNVVLNGGDPDYVALLPSGFAILPDGPPAPGMAPHHGGEGAAGGGLEELEAAGGSLLTVAFQILVDSVPTAKLSLGSVATVNSLIACTVERIKAAVCGAEGNPQ

SEQ ID NO: 55448 - protein, 172 aa, Zea mays
  Coding DNA Sequence Number=SeqID_13669
MGTRLGRARARGKEDPGAGRAWKLQVELRGTRDSERAEGEKRVLGKKCSAVRAPRRGRRSSGGHGMRAKRREKNWQPALGESWALCELCAEKRARHRRQRSAPVGSSRLATEIRARGRGRGGARRWEEDGSHGRELGEAATQEEARTGTDRELRADGRGCARANRGKDARRN

SEQ ID NO: 55449 - protein, 85 aa, Zea mays
  Coding DNA Sequence Number=SeqID_13670
MQDAARRALPLYCSLFSGVTNGLDLKYYPRCSTGSAGGAIVSPVGEGNLMLNSMDGGSLAPVDIRYPYRLPSRGRFAYGIPDCRT

SEQ ID NO: 55450 - protein, 128 aa, Zea mays
  Coding DNA Sequence Number=SeqID_13671
  Subcellular localization annotation: CTP_CleavageSite=79; ConfidenceScore=5.30e-01
MKLQGELHHRDLGFRAAMVTPLDIRGKGTTPSFSNEVSRRTSRRGMTSSLGLSCNNGSNSRNSWSSAAVDPRPPCVLAVAQALQSLHSRPSSWPCPRLLRNLAEETGGAAMSRPATQPEPTIRSQASI

SEQ ID NO: 55451 - protein, 657 aa, Zea mays
  Coding DNA Sequence Number=SeqID_13672
  Gene Ontology: Mol. function=structural constituent of ribosome; Cellular component=intracellular; Biological process=translation
  Homolog annotation: Hit_ID=Q2QT41; Match level="QueryCoverage=93%, HitCoverage=91%, E-value=1e-174, Identity=51%"; Hit description =Expressed protein
  Pfam annotation: Domain name=DUF594; Domain location=591-645; Score =37.4; E_value=4.8e-08; Accession=PF04578.4; Description=Protein of unknown function, DUF594
MVVEQFDEGGEFGCVGIPHGWCVRCGSRVGVLLFFSGTRRRQGRSPKRLLLWLAYQLADSTAMYALGNLSLSSTLRQHRLVAFWAPFLLLHLAGPDNITAYSLEDNKLWKRHLLTLVVQVLGAGYVIYNHIAGGGILFSLGAALTTAIAVAKFCEKTWALRCANFGVIRESMEAEDAEQLGKCDLYLEDRPPRGGFREKVVEKEEFLMLRAHAVFRVCKSAMVDSSKNPGSYIVGILKNLKEKEMGYMWTLVEMELSLMYDILYTKAPVIHTLRGYCIRVVSPLAVAASLLLFQFYGREGARTADVAVTYALLGGAFLMETTALLSALCSTWTFSFLCATRWSSLRHSALCLERWHRLRRMVLSLRRLAHSTGIAGFFRLSRKWTGTMGQYNMLEMSTARPGWWAGCDMFGMCTVMHDWLAGHGMPAVAVPDGLKDLVVTYIQHMIRSGYINTPGMVRGSWSTEALERWKEHSGISIDSKFLGSELQEGIIIWHIATDVFLARRQAEIEGRDKVKEVQVLSNYMMFLLVKRPDMLPGLAQNKLYQWTKTSLATNVANSDDVNPASALYKMEITGHHVQKFRLLLAIELAKTLVHTKNALELVYEVWADFIIYTANRCSRESHAKKLNSGGEFTTLVWLMTDHLHQVRFNKDLYPPSE

SEQ ID NO: 55452 - protein, 53 aa, Zea mays
  Coding DNA Sequence Number=SeqID_13673
MTKVMLAEGVQNSKMETLYPFGYNEFQTKVMKEETFVSSIDDKEEFRIWEYKE

SEQ ID NO: 55453 - protein, 58 aa, Zea mays
  Coding DNA Sequence Number=SeqID_13674
  Homolog annotation: Hit_ID=Q2QXQ5; Match level="QueryCoverage=57%, HitCoverage=6%, E-value=4e-10, Identity=91%"; Hit description=ATP -dependent RNA helicase, putative, expressed
MAKGDGRRGGSRGLRSAVQFPGVSLHPGASIEHQISGLKTCEPEFLIATPERLLILFR

SEQ ID NO: 55454 - protein, 67 aa, Zea mays
  Coding DNA Sequence Number=SeqID_13675
MARHVLASALGGPQLLGQGGGAGLAEWAWAPARWAARVFEFKIYLCLMNLDECITKHNHHKKMGAPA

SEQ ID NO: 55455 - protein, 105 aa, Zea mays
  Coding DNA Sequence Number=SeqID_13676
MAMMGSTSEKMYLCQSLGVVSPSESIKDHLDVGLLTEDPLAGHMPHHGSSGKEGKLLLQIYRPNHEVKYTFDKESRKNVPITQDMPLAEMFLYRDGTFINSITIQ

SEQ ID NO: 55456 - protein, 580 aa, Zea mays
  Coding DNA Sequence Number=SeqID_13677
  Gene Ontology: Mol. function=zinc ion binding; Cellular component =nucleus; Biological process=regulation of transcription, DNA -dependent
  Homolog annotation: Hit_ID=Q69P28; Match level="QueryCoverage=65%, HitCoverage=68%, E-value=1e-147, Identity=67%"; Hit description =Putative far-red impaired response protein
  Pfam annotation: Domain name=FAR1; Domain location=59-274; Score =117.3; E_value=4.2e-32; Accession=PF03101.5; Description=FAR1 family
MMRPGAREADGFEDHPGVESHLEGEQEIEEIGASIVNNCPEDMVPKIGMKFNSEQEAYDFYNAYAREIGFSIRRNDCHYVGTSLNIKTRVFCCSREGARRFDKRSNSVDKNKSAIRSETRCMCQASMKINLVDGFYYVYHFVSQHNHNLATKEQNHQLRSQRKIDDAQISRIEVAKSVGITTKAAVDLLAKEVGGMENLGFTRVDVKNRLYSKRSLKVHQGDTGGVLEYMEKRTSEDAKFFYSIQVDENDLITNIFWTDAKMVADYECYGDVVGFDTTYRKLDSGRPLGLLVGVNNHKKTTIFGAALLYDETAESFIWLFRTFLKVMSGKKPQTILTDEDAAMAKAIRIVIPDTHHRLCVWHMNQNACKHLATTVKDYKKFNSDFQKCIYDLEEEDDFIHAWNILLERFELQDEKLAEDIENNLKIKPSSNLNSSSTPRGSKETVQTRKPRGVKVKAKEIRGSARPIGGLEKSSRNRKRIIKDTNTMAQAPPPHPQASEMKIYKYMWGSGSLDVFFVRLLAASSGCELTGKTKQRTGVRGDERVSEGEQQSQKDATSLIRAAAADSKQKHRRKAIRRCGS

SEQ ID NO: 55457 - protein, 90 aa, Zea mays
  Coding DNA Sequence Number=SeqID_13678
  Subcellular localization annotation: CTP_CleavageSite=40; ConfidenceScore=5.66e-01
MSVASVSSALSPAIRDALRLAPSASGSLGPCSPELSSCSRSSVTVDPRPRRALDFVRETPSLPSRYLRTRVGITVGEAQNNTKVDTAPKM

SEQ ID NO: 55458 - protein, 173 aa, Zea mays
  Coding DNA Sequence Number=SeqID_13679
  Gene Ontology: Mol. function=zinc ion binding; Cellular component =integral to membrane
  Homolog annotation: Hit_ID=Q5N6U7; Match level="QueryCoverage=82%, HitCoverage=66%, E-value=9e-44, Identity=60%"; Hit description =Putative MTD2
  Pfam annotation: Domain name=zf-C3HC4; Domain location=74-111; Score =14.7; E_value=0.0048; Accession=PF00097.15; Description=Zinc finger, C3HC4 type (RING finger)
MAGLRLLLCPSQLFRTISHPHMQAIIYPILQQLESSLIERDLKGKGRCKDIVSRRRMEDWKKVSGRDVEREDECGICMEACTKMVLPNCSHAMCIKCHRDWYKRSESCPFCRGSLKRICSTDLWVLTNSNDVIDPAHLEKENERIQLETTRLYRQAGVSPFSMFLEFLPPKPY

SEQ ID NO: 55459 - protein, 323 aa, Zea mays
  Coding DNA Sequence Number=SeqID_13680
  Pfam annotation: Domain name=zf-CCHC; Domain location=35-52; Score =27.6; E_value=2.8e-05; Accession=PF00098.13; Description=Zinc knuckle
MEHGVGMPPLIFDGMNYLYWKIRMSAYLQSIGSKDGCYNCGDPDHFIASCPKKGKQEACPRNHHSGQRKGKQEYTSSMHKSKGGFVNEELKKKCLYKAKIKECAFFATLSDLDHDSDDEASSSSNEETNRRVEDKLNGYVSSLTSYEVFALWLLDIDGGSASKVSHSADDLATKIEELNVVLANQDKLLRLAAHEKKDFKFKYESTLRELESTRASVVVSDETECDGCAFHMLNIATLETKHATLLDERDELISRSSLLGACTACPSLQTELAERNARIASLEKATLVSASAPTQCAICEGLQYALGSYRHDKTQIEEENTYL

SEQ ID NO: 55460 - protein, 154 aa, Zea mays
  Coding DNA Sequence Number=SeqID_13681
MGVSLVNDGPVTMQIDSPSPQDVARSWYIEIWSALYCRCVRLSTKAVGVQDYYGLLKSILLWYDGLCLIVTSLADPNLSDHPLPFIRHTHPSSIPSIYLKTPNRSIRHTPVKPRVAKDTVLKYVPVHFISLYNSKIQMILLFAEGQCYLLKGSS

SEQ ID NO: 55461 - protein, 344 aa, Zea mays
  Coding DNA Sequence Number=SeqID_13682
  Gene Ontology: Mol. function=calcium ion binding; Cellular component =oxygen evolving complex; Biological process=photosynthesis
  Homolog annotation: Hit_ID=P82715; Match level="QueryCoverage=58%, HitCoverage=63%, E-value=4e-66, Identity=61%"; Hit description =Thylakoid lumenal 35.8 kDa protein, chloroplast precursor
  Subcellular localization annotation: CTP_CleavageSite=44; ConfidenceScore=5.60e-01
MAGALLSSPHTLPSPTSQSPFRPRHALPLPLTRFPARRLFVLLCTEHPPSLTALLILVPGDCAGAGDHSTLGQRVFCHRGGGPLCSLRALASLPLGTAGWRWRGGAFSCPGSCLLSQSCSPFQCFARNDSVEAYAVMETDEDVKMNTQIDEINAYSFLYPVELPGKKFTFKWVESRKPERYSSAAPLSRLYAADARQRIVSERVDMIHNVVISVSIGPPNSRFLPSKDKSSWDPKDVADCILSDRSTMKVTTGQRMTESSVLDAHVAEVDGEPYWYYEYLVRKSPTKSAPEPNLFRHNVACTAERDGYLYSLNASTLSKQWESVCLLCPVVAYYHFSKEIFFSV

SEQ ID NO: 55462 - protein, 77 aa, Zea mays
  Coding DNA Sequence Number=SeqID_13683
  Subcellular localization annotation: CTP_CleavageSite=70; ConfidenceScore=5.12e-01
TTELASMAVSFYWGWHAAYVLGAVAAALEFTQSGSSAVGNWCLAPPRLVVTQLSGSRRPRPSTWPTGGPMAREAEST

SEQ ID NO: 55463 - protein, 396 aa, Zea mays
  Coding DNA Sequence Number=SeqID_13684
  Homolog annotation: Hit_ID=Q66LH1; Match level="QueryCoverage=99%, HitCoverage=52%, E-value=1e-158, Identity=76%"; Hit description=CENP- C2
MALDRLEEAEDEIKRLNGEAEKRILIFDPLDEPIRQPGLRGRKSFRSFKVTEDATTQDPIEVLASQTATMTGSQFSQDVMHAVADKNEQSVPSRSGEAISDVSGKEDSLAEKDGRDDLAYLLTSIQDLDESEEEAFIRKTLGLKEIRKGRVSLCNSIPGVRSLRSDTEQKGSMKVRPPESHLPQTRQDRISELEKHLFPGGAANAKCTDDESEGSPDIVMGEPSLVHDSSEVLMTNENSTGSEIDRRTPNLCARAADHALDPEPNLPDHAYERQTRGSSLGLCKNTEVANEHEACSKSNISVEMLVTKEDDVHIEYPTTGGSTYQTEVSSHDLEGSLTEELVSEPGRHAAPDDIYRTSHAAEDSIQHLITECILRSGSCFVAQEVVKQGGVLQDIS

SEQ ID NO: 55464 - protein, 212 aa, Zea mays
  Coding DNA Sequence Number=SeqID_13685
  Homolog annotation: Hit_ID=Q9XHE0; Match level="QueryCoverage=96%, HitCoverage=44%, E-value=4e-95, Identity=86%"; Hit description =CENPCB protein
MAEYNIDKSSQSLEMPLEDIDPLYRPQMHGGSTKKSTPVLCNALSPIEQKQQAAQEGKRKQQAKRARPLGATPPLLGDESSHALEISQANFEPENEPHNVDVNMEQPTVMSSAKGQKGAQRRNKTKKLNQRKILGDVDLARQSGVRRSSRIRSRPLEYWLGERLLYGPIQDTLPAVIGIKAYSPGQDGKKTLKVKSFVSEQYSDLVAQFAKY

SEQ ID NO: 55465 - protein, 378 aa, Zea mays
  Coding DNA Sequence Number=SeqID_13686
MSTASFVTYLQRPRELPAPEFRAPPPSPVTGVLTGSSSSGSSGYGECQDDDDIGRFLRCSARVPVLRLPEGPRPGPRRNKNKTVAAWAPPVVDMRLLDPVPSGDGGSAVEAMRAAAVAFGCFQMVGHGVHASLLSAASRAAKSRRSPALETEGMRAGDEDELWWLRGEGDQEMAGTQPLRNGPNQFRNEADDLFTQLEQASTKLLHALQHASSAAAESLPKAEANGSLLCIRKHRLGGSSASGPISQDDVLRMLVRSSRCSRALALHLCPGASAFHVFSRRGWSRFSPLDGALVVTVGDQLQCGLYKSVSGKPAYNSDLQGDSSDAIAAEFFLSCSSAAAAKEAPPNMDMDAMKTVPLNLQIMVAACLVLVYYVFLSC

SEQ ID NO: 55466 - protein, 152 aa, Zea mays
  Coding DNA Sequence Number=SeqID_13687
  Gene Ontology: Mol. function=DNA binding; Cellular component=nucleus; Biological process=regulation of transcription
  Homolog annotation: Hit_ID=Q653V8; Match level="QueryCoverage=94%, HitCoverage=52%, E-value=1e-66, Identity=76%"; Hit description =Putative NAC domain protein NAC1
  Pfam annotation: Domain name=NAM; Domain location=13-136; Score =200.0; E_value=5.4e-57; Accession=PF02365.6; Description=No apical meristem (NAM) protein
MAIKSLSMVEASLPPGFRFHPRDDELVLDYLAKKLGGGGGPVVVSIYGCPTMVDVDLNKCEPWDLPDIACIGGKEWYFYSLRDRKYATGQRTNRATDSGYWKATGKDRPISRKGLLVGRAPKGKKTEWVMHEFRMEGRDDPMKLPFKFSNNI

SEQ ID NO: 55467 - protein, 62 aa, Zea mays
  Coding DNA Sequence Number=SeqID_13688
MSKVDALPKVVETKAMKDIPSSFQHINVNVNKKVKEHKGIKPLSVIIILELRQHVQPKSLGF

SEQ ID NO: 55468 - protein, 148 aa, Zea mays
  Coding DNA Sequence Number=SeqID_13689
  Subcellular localization annotation: CTP_CleavageSite=19; ConfidenceScore=5.04e-01
MHPALSLGIGCDIRGGTIPAQNASRSRSSAQCGSTTDGKSGEQLLECRWSSTRIEGTAAPPGEEDSLRPTPRTGNPRGRDSPVADRVLVTAAAMELALAVSGSVLDRAMIASSAMHGDSVGRKRIKLTSRSHHTNSNLNLNFGYGIHP

SEQ ID NO: 55469 - protein, 96 aa, Zea mays
  Coding DNA Sequence Number=SeqID_13690
MNEHMASIFGRKRPKQTPTEKLAAAKVSRGHGATLECPTDIPEPVVYVFYGGDLRWGAARVDGRNGSRDQREVMEPGEDLQCDPVALIGRCERGPT

SEQ ID NO: 55470 - protein, 188 aa, Zea mays
  Coding DNA Sequence Number=SeqID_13691
MGHDARGSAAELGLPTRNSVCIETPTEKLAAAKVSRGHGATLECPTDILEPVVYVFYSGDLVLSRRAHGWVGRKRGIGRGVLAFIVKRWGVAWVDGCNGSRDQREVMEHGEDLQCDPVALIESLRAWSHLKRNARRTRRLADPWVPLVSDYGSEGAQLVSAEWAQGIGVCVAARRSEPICRPCLSALW

SEQ ID NO: 55471 - protein, 109 aa, Zea mays
  Coding DNA Sequence Number=SeqID_13692
MARVEGGSVGGDRLGSSPLWRDKAPRRIPVMAEKGGENGRGRERRERGLAVITLGGARPSSSTEGWRCSEHGKCTCDDGGGPETRQLRGQRHSSANFGEARWVKGRGIG

SEQ ID NO: 55472 - protein, 114 aa, Zea mays
  Coding DNA Sequence Number=SeqID_13693
MALHVVRMQEEDEGPNTWDPWASLSRAAALALPFEPLASRPHPPGCARASPFTADRWSPVAPRLYLDDEQFVVLKRVAEDLPEQQPGEGKCPLTYYVLHIYNSLSHITILKPKY

SEQ ID NO: 55473 - protein, 908 aa, Zea mays
  Coding DNA Sequence Number=SeqID_13694
  Gene Ontology: Mol. function=protein binding; Biological process =protein folding
  Homolog annotation: Hit_ID=Q2R089; Match level="QueryCoverage=90%, HitCoverage=91%, E-value=3e-97, Identity=33%"; Hit description =Expressed protein
  Pfam annotation: Domain name=LRR_1; Domain location=501-524; Score =5.9; E_value=22; Accession=PF00560.23; Description=Leucine Rich Repeat
  Pfam annotation: Domain name=LRR_1; Domain location=526-549; Score =0.6; E_value=2.2e+02; Accession=PF00560.23; Description=Leucine Rich Repeat
  Pfam annotation: Domain name=LRR_1; Domain location=551-578; Score =8.3; E_value=7.8; Accession=PF00560.23; Description=Leucine Rich Repeat
  Pfam annotation: Domain name=LRR_1; Domain location=758-784; Score =3.3; E_value=68; Accession=PF00560.23; Description=Leucine Rich Repeat
  Pfam module annotation: Pfam domain module=LRR_1::LRR_1::LRR_1::LRR _1; Domain location=501-524::526-549::551-578::758-784
MAALTQSAIDVVLGQLSKVVKDEVQLIGGVHRDMKFIKDEMDSMNGFLTHLNKMESEHDDQVRAWMKQVRETAYVAEDCVERYVRDMERLGVSQGGCAAYAAMALLALSKPKTFWELHQLGKQITELRTRVHEVGERRVRYDVKVPDKRNRRLVRNEAASGQDEERRECFVRSLEEELQQEDKKRARDQGPDPLGRPSLVLRAHAKMGGLLALPLRLGGGGGDTIAQLPGLVSSESARVRRILKRCCPPRPDHPRPTLTDAEAEKFRCTKKMFVCALYVYPYLTNAELKQLKVGVEAPGVEAQEARNQVMVFCYSMLSTQQKSCLQYLTAFKHETEISRTSMVRRWVAEGLVGKEPGEGSTATLQEAGERCFRELRLRGFIRPARWGDNGTVKSCVMDGPVQDFVDGITRSENFLSDLPAHLQRQLEIRSIVRYGRPSMSAPAAAPAPLRSVLLSSCCGGGVTRTSRYDDEQDYAASTATLLKHRMDALVDFVKELPKLYRLNVLDLGGCKGLRRRHLVAFTELECLRYLSLRDTDVPGLVPDRHMNRFEQLETLDIRGTRIPPRDTKRIYLPKLKHLLAGRFTMASAEKEMLVTVDVPDRIGSMRGMETLSRVRVSVDGAELERVAKLRQLRKLGVVVHANTATAAVLGRVLYMLAGSLRSLSVWVVDANADAVARTRTRTRIAATSTQQGSGGEGILHISSLHEIARSLALENLHIKGKVSLPSWIGTAPKLTNVTLSDTEMDGGDALRRLATVVNLCCLKLSRNAFTEQALHFKDVQFQALRFLVVEGDAFTRLAFSAGDAAPKLERIVWSIGGTRAAQKNEELIVGIQHLPSLKRIELRASFREHNLLEWMRQQRQTTTSSAAKYRIYYVSSSTDRRNQTIAEVPKAATDTTLTLPAAVIHQLT

SEQ ID NO: 55474 - protein, 105 aa, Zea mays
  Coding DNA Sequence Number=SeqID_13695
MQRTDLGEELNWGATVANRRRGLVLLLRNNLAELMVHSIYSLQERWLRILKKKAGGRREGESPVNAIVAFTEAMLQVMDRLPMTVYCDVIRLRSTWHPGGTRQTP

SEQ ID NO: 55475 - protein, 58 aa, Zea mays
  Coding DNA Sequence Number=SeqID_13696
MEIPRTWEKTLKEKTVDHLFTPLEVLSICELTLVVLTSPEVKNRTPLYINDVTFVYVP

SEQ ID NO: 55476 - protein, 219 aa, Zea mays
  Coding DNA Sequence Number=SeqID_13697
  Gene Ontology: Mol. function=RNA binding
  Homolog annotation: Hit_ID=Q4QXS6; Match level="QueryCoverage=52%, HitCoverage=70%, E-value=1e-45, Identity=75%"; Hit description=MLL
  Pfam annotation: Domain name=PUA; Domain location=120-198; Score =76.0; E_value=1.2e-19; Accession=PF01472.10; Description=PUA domain
MFYNITGDKTAEPLIMYDYTKVFADITWANVDEVVGAAEGLRGCNLPRAAAVSSHILGLESDKGTQPNSLKYPSLEPLLDDLLPKKSPMIVVKCQNHLNLVVVNNVPLFFNIRDDPDIMKKFQVDRGAIKFVLSGANIMCPGLTSPGGALDDEVEEETPVAIMAEGKQHALAIGYTKMSAKDIRTINKGIGVDNMHYLNDGLWKNNLPSIGSEEIHNDL

SEQ ID NO: 55477 - protein, 138 aa, Zea mays
  Coding DNA Sequence Number=SeqID_13698
MARVACTLRGKRLDDGVSVLSVGMNLVCFAFNPTSQHILESLFLYRVLRTRTSVGGPNTLGDFVTARGARNRQVGPRGRACSREAVPNDLDRWIEIKQSRSNVGGSADAGSAASAHDGKVTGVRAGAGSRGFEVTGVG

SEQ ID NO: 55478 - protein, 55 aa, Zea mays
  Coding DNA Sequence Number=SeqID_13699
MDRLSMTVYCDVIRLRSTWHPGSRRQTLARSLLKVEFVLLHIWAVLDEMPGLSTI

SEQ ID NO: 55479 - protein, 155 aa, Zea mays
  Coding DNA Sequence Number=SeqID_13700
MGQPKAPLSDSAIIHRTVRCTPDSVRCSKGEPPQELASLGFSLQPLRYNSPDCPVYTGLSGATAEQRLFRRQRLPALHLMPAQRAQKSGAPILAHRTMNTPPKRKFTGARSAHGVPAAARAPTTVDRPLQPSSTPSNPSELLDLTQPSTGPLPPP

SEQ ID NO: 55480 - protein, 508 aa, Zea mays
  Coding DNA Sequence Number=SeqID_13701
  Gene Ontology: Mol. function=sugar porter activity; Cellular component=integral to membrane; Biological process=carbohydrate transport
  Homolog annotation: Hit_ID=Q9SNS2; Match level="QueryCoverage=97%, HitCoverage=94%, E-value=0.0, Identity=65%"; Hit description =Putative hexose transport protein HEX6
  Pfam annotation: Domain name=MFS_1; Domain location=28-446; Score =75.0; E_value=2.3e-19; Accession=PF07690.6; Description=Major Facilitator Superfamily
  Pfam annotation: Domain name=Sugar_tr; Domain location=22-489; Score =423.8; E_value=2.3e-124; Accession=PF00083.14; Description=Sugar (and other) transporter
  Pfam module annotation: Pfam domain module=MFS_1::Sugar_tr; Domain location=28-446::22-489
MAAGGGDGRQYGGRITVFVVLSCVTAALGGAIFGYDLGTSGGVSSMGSFLEEFFPDVYRRMKGDVRVSNYCKFDSQLLTLFTSSLYIAGLLTAMLLSSWFTARRGRRPSMVIGGAAFLAGAAVSGGAVNVYMAILGRALLGVGLGFANQAVLLYLSEMAPARYRGAFSNGFQLSLCLGSLAANIINYGAEKITGGWGWRLSLGLAGVPAALFTLGAYFLPETPNSLVQQGEDRGRVRALLQKIRGADDTAAVDEELDDIVAANDAARGGGDSGLRLILSRPRYRPQLAIAVLMPAFTQLNGINAIGFYAPVLLRTVGMGESLALLSTVVTVVVYTASTVVFMFVIDRFGRRTLMIAGSLQMLVSELLIGAVMAAKLGDEGGMARGYAAALFVLIGVYVAGYSWSWGPMTWLVPTEVFPLEIRSAGQSITVASGFVFTIFIAQGFLAMLCRMRAWLFFFFAGCIVVMTAFVYLLLPETKGMPIEQIGKVWREHWFWGRVVGLDGTNDKV

SEQ ID NO: 55481 - protein, 299 aa, Zea mays
  Coding DNA Sequence Number=SeqID_13702
  Gene Ontology: Mol. function=protein binding; Cellular component =nucleus; Biological process=DNA integration
  Homolog annotation: Hit_ID=Q7XEA7; Match level="QueryCoverage=98%, HitCoverage=78%, E-value=1e-67, Identity=47%"; Hit description =BTB/POZ domain containing protein
  Pfam annotation: Domain name=BTB; Domain location=188-299; Score =71.3; E_value=3e-18; Accession=PF00651.21; Description=BTBPOZ domain
  Pfam annotation: Domain name=MATH; Domain location=34-161; Score =21.9; E_value=0.0013; Accession=PF00917.16; Description=MATH domain
  Pfam module annotation: Pfam domain module=BTB::MATH; Domain location= 188-299::34-161
  Subcellular localization annotation: CTP_CleavageSite=41; ConfidenceScore=5.24e-01
MSFSGVSFVGNSYLPPSSAPPTHVYSGGYHLLVVNGYSRTKQDTPNGSCLRSNPFKIGGHRWTIECYPNGYEQENSDYISFYLVLDDFNVVEPVVAQYAFSFFGQVQPSESSLLLAAGARGPYRFSSTDAFSFPYLMNRQQFEKSKHLRDDSFTIRCDVAIVKNVNIGEAAAARRFVTVPPPSILHHLGNLLLSQVGADVTFQVGGEKFMAHRCVFAARSAVFRAELFGSMKEGAADTVVHIHDMDAKVFRLLLGFMYTDHVPDIEEEEEEEEEYMWQDLLVAADRYDIPRLRLICFSL

SEQ ID NO: 55482 - protein, 160 aa, Zea mays
  Coding DNA Sequence Number=SeqID_13703
MAMNDVCCRWEGEPPNRPHSLNSGPLGVARSLVSAERWTARCLGIFQSFLVNELREGVFWTFGIPKPLRFFADRARYEKRSSTVKGLLLGAFFFTKGPPSRNTFGSVICELTQHEGTSRSYNPGSFGMTTVGAFIFRRSSKTQLICFPSIIHSHGPSDSE

SEQ ID NO: 55483 - protein, 82 aa, Zea mays
  Coding DNA Sequence Number=SeqID_13704
MGKPRPSLLMLLLCRVTALVPTITEMGDHVSCRVRGKVCCQVHSGLCVKNHRKRPIGYLVVIFPKFKVKKRGLAKFSSELCE

SEQ ID NO: 55484 - protein, 842 aa, Zea mays
  Coding DNA Sequence Number=SeqID_13705
  Gene Ontology: Mol. function=protein kinase activity; Cellular component=extracellular region; Biological process=protein amino acid phosphorylation
  Homolog annotation: Hit_ID=Q69TY6; Match level="QueryCoverage=75%, HitCoverage=95%, E-value=1e-106, Identity=60%"; Hit description =Putative receptor protein kinase PERK1
  Pfam annotation: Domain name=LysM; Domain location=132-179; Score =13.8; E_value=0.02; Accession=PF01476.10; Description=LysM domain
  Pfam annotation: Domain name=LysM; Domain location=200-243; Score =23.4; E_value=0.00079; Accession=PF01476.10; Description=LysM domain
  Pfam annotation: Domain name=Pkinase; Domain location=384-658; Score =81.8; E_value=2.1e-21; Accession=PF00069.15; Description=Protein kinase domain
  Pfam annotation: Domain name=Pkinase_Tyr; Domain location=393-658; Score=45.9; E_value=2.8e-15; Accession=PF07714.7; Description =Protein tyrosine kinase
  Pfam module annotation: Pfam domain module=LysM::LysM::Pkinase::Pkinas e_Tyr; Domain location=132-179::200-243::384-658::393-658
MASPPQTELQAVALALLVLLLAGAAPARAQQEYEANKQNACYATNASSVLGYTCNATTASTPACDSYLIFRSSPTYYNTPVSISYLLNSSVSATAAANAVPSVSPLAPSSLVLVPVPCACTPGGYYQHNSSYTIQFRGETYFIIANITYQGLTTCQALIAHNPLHDSRGLVAGNNLTVPLRCACPSPAQAAKGFKYLLSYLIMWGDDVTSIAARFRADPQAVLDANSLTADDIIFPFTTLLIPLKTAPTLDMLASTAPPPAPTPPQPAPAPSGRSGSGKLVGFGVGLGCGALALAGILGLLFLRARRRQRLPVGESVRQGSKVVIDVSSSADYGALASGKKITNTTTSSMSSAAWSLVASDVRGAVESLTVYKYSELEKATAGFAEEHQVPGTSVYRAVINGDAAAVKRLAGDVSGEVGILMRVNHSCLVRLSGLCVHRGDTYLVFEFAENGALSDWIHGGSGSCSGSNTLRWRQRVQVAFDIADGLNYLHHYTNPPCVHKNLKSSNVLLDADLRAKVSGFGLARAVTAAHGGAQLTGHVVGTQGYLAPEYLEDGLITPKLDVFAFGVVLLELLSGKEAGFADAGTGEEILLCESAEEALVADGGEDMDRAKVRAFMDPRLHGDFPMDLALSMAALALRCVAMEPRARPAMDEVFISLSAVYNSTMDCDPSDYGTSGSSMIGRYHPIVNSLCGRIDDVGCSSVDAFGQGHARARQRLLPRPRSGRARGWAFDRDALEEANFCFLSEGAPRVPGARASPEALHMARRQSGNALTFDDTPLHCLSARTSSSDLRGQGPEEFGAKEARPAPVWDALQWGPRKRGLPWEGRLCEGMMLPRSSWRPP

SEQ ID NO: 55485 - protein, 44 aa, Zea mays
  Coding DNA Sequence Number=SeqID_13706
MDQSSPSATRRAKTAVEFAFVDRTYPQPRLAIFTTGLLYVRSTV

SEQ ID NO: 55486 - protein, 184 aa, Zea mays
  Coding DNA Sequence Number=SeqID_13707
MTTTAGEEKEKQAGGSSMETEEETTPKAKKRPQSLLGSLREAITKVRFLLSSSATRWMLLRSLARGGGSGGAPARRLSFDARPGLLDTIAASPTSSCSSRTSRSASLGTATTRTLSRASSAASPEALTRASSSSGGRSPASSAGDDDVDQRAELFIANFYRQLRMERQVSLQLRLSPNLDEEVR

SEQ ID NO: 55487 - protein, 166 aa, Zea mays
  Coding DNA Sequence Number=SeqID_13708
  Gene Ontology: Mol. function=nucleic acid binding; Cellular component= intracellular; Biological process=DNA integration
  Homolog annotation: Hit_ID=Q8S479; Match level="QueryCoverage=99%, HitCoverage=14%, E-value=2e-44, Identity=49%"; Hit description =Putative pol protein
MDPKGKGMVINDKEKESFINEPKDDKPTDSGSSHKKKDGKKKRCIKKIVYYDDSDESSSSQKDDDNDYEKKKTVNSNFSFDYSRIPDEYHKVSGLDNAKQIWDTLRVSHEGNDVTMLTKMELVEGELGRYTKMSPEEILGKFVSGWMMIKEARYVDEALNGPIHEP

SEQ ID NO: 55488 - protein, 196 aa, Zea mays
  Coding DNA Sequence Number=SeqID_13709
  Gene Ontology: Mol. function=DNA binding; Cellular component =intracellular; Biological process=regulation of transcription
  Homolog annotation: Hit_ID=Q5IWM2; Match level="QueryCoverage=53%, HitCoverage=49%, E-value=7e-35, Identity=59%"; Hit description=MYB transcription factor
  Pfam annotation: Domain name=MMR_HSR1; Domain location=66-137; Score=- 1.1; E_value=0.0012; Accession=PF01926.13; Description=GTPase of unknown function
  Pfam annotation: Domain name=Miro; Domain location=67-162; Score= -9.0; E_value=0.041; Accession=PF08477.3; Description=Miro-like protein
  Pfam module annotation: Pfam domain module=MMR_HSR1::Miro; Domain location=66-137::67-162
MGNHACPTRPCLPLPRMPPALLSSAAATVPLAPAKLAKLRRELLTPTSKGGGGAGEGFDVTKSGDAHVGLVGFPSVGKSTLLNKLTGTFPEALKMQMEVQKRLHEQLEMIIEEQQKLGGSIKASEDQKLSDSPPSLDDYPEIMQPSPKKPRIDALSPDSKRDTTQPEFESHLIGPWDHNIAFPLEEFKADPAMSKS

SEQ ID NO: 55489 - protein, 462 aa, Zea mays
  Coding DNA Sequence Number=SeqID_13710
  Gene Ontology: Mol. function=nucleic acid binding; Cellular component= ribonucleoprotein complex; Biological process=mRNA processing
  Homolog annotation: Hit_ID=Q9LXJ8; Match level="QueryCoverage=76%, HitCoverage=74%, E-value=2e-93, Identity=51%"; Hit description =Putative RNA binding protein
  Pfam annotation: Domain name=RRM_1; Domain location=106-174; Score =65.4; E_value=1.8e-16; Accession=PF00076.12; Description=RNA recognition motif. (a.k.a. RRM, RBD, or
  Pfam annotation: Domain name=RRM_1; Domain location=193-267; Score =37.6; E_value=4.3e-08; Accession=PF00076.12; Description=RNA recognition motif. (a.k.a. RRM, RBD, or
  Pfam annotation: Domain name=RRM_1; Domain location=287-357; Score =64.3; E_value=4e-16; Accession=PF00076.12; Description=RNA recognition motif. (a.k.a. RRM, RBD, or
  Pfam annotation: Domain name=RRM_3; Domain location=103-192; Score= -14.1; E_value=0.099; Accession=PF08777.1; Description=RNA binding motif
  Pfam module annotation: Pfam domain module=RRM_1::RRM_1::RRM_1::RRM _3; Domain location=106-174::193-267::287-357::103-192
MPRRTGNAAPTKSVELVKQDQLEFDDPDEVDDEEEVEYEEIEEEVEYEEVEEEEEEDEDEEDEEMEGVHEIDANDESKMVDADGKVENEKEKHAELLALPPHGAEVYVGGISSDVSSEDLKQLFESVGEVVEVRMRGKGDNRTYAFINFRTKAMALKAIQNLSNKDLKGLGISLRISKGKKIKVSPSQAKNRLFIGNVPHDWTHDDFKTAVEEVGPGVLKVELMKAPGLDRNKGYGFIEYYNQACAEYAKQKMSTPEFKLDTNAPTVSWADPKNANEATSTAQVKSLYVKNLPKTVTQEQLKKLFEHVGEITKVVVPPAKSGHENRYGFVHFKERYMAMKALKNTERYELDGQLLDCSLAKPPADKKDSTVSTPTAKGGPLLPSYAPLGYGLVGAYNPRGKGLADAYNNPLGNGLAGAYGVLSARAAQGLYPTKGLSGPKKAHGGAAVAAAMGPPRGLDKDS

SEQ ID NO: 55490 - protein, 610 aa, Zea mays
  Coding DNA Sequence Number=SeqID_13711
  Gene Ontology: Mol. function=helicase activity; Cellular component =mitochondrion; Biological process=metabolic process
  Homolog annotation: Hit_ID=Q84KB6; Match level="QueryCoverage=68%, HitCoverage=83%, E-value=3e-35, Identity=23%"; Hit description =Fertility restorer homologue
  Pfam annotation: Domain name=PPR; Domain location=187-221; Score =27.8; E_value=3.8e-05; Accession=PF01535.11; Description=PPR repeat
  Pfam annotation: Domain name=PPR; Domain location=326-360; Score=5.0; E_value=1.9; Accession=PF01535.11; Description=PPR repeat
  Pfam annotation: Domain name=PPR; Domain location=361-395; Score =24.4; E_value=0.0004; Accession=PF01535.11; Description=PPR repeat
  Pfam annotation: Domain name=PPR; Domain location=396-430; Score =37.4; E_value=4.8e-08; Accession=PF01535.11; Description=PPR repeat
  Pfam annotation: Domain name=PPR; Domain location=431-465; Score =27.7; E_value=4e-05; Accession=PF01535.11; Description=PPR repeat
  Pfam annotation: Domain name=PPR; Domain location=466-500; Score =13.2; E_value=0.2; Accession=PF01535.11; Description=PPR repeat
  Pfam annotation: Domain name=PPR; Domain location=501-535; Score=6.8; E_value=1.2; Accession=PF01535.11; Description=PPR repeat
  Pfam module annotation: Pfam domain module=PPR::PPR::PPR::PPR::PPR::PP R::PPR; Domain location=187-221::326-360::361-395::396-430::431 -465::466-500::501-535
  Subcellular localization annotation: CTP_CleavageSite=79; ConfidenceScore=5.69e-01
MAPRSSTFLSRVADAARPLSVSARPRLSPSCPSHTAAAPAFSPPAFHTHLASVASHLPSLLAALSRARAARLPLLPVTRALAASALLRHGRLPDALAHFSLLPDSDPTAPLPVPLCNSLLSALASSTGSLGHARKVFDRMLAGAVELNTVGFGVFVNAAGRKDDGLAEVLRLVDVVGCQGRRVNRSVVVAMLVDGMCREGRIEDAWRAMDEMRLRGWKPDFLAYRIVAEGFRVQGRVEEEGRILKQKRKLGVAPRKDEYRECVLVLVSNRLFREAKEIAEAVVLGDFPIDDDVLNILVGSVSEIDVDGAAMFCKFMMGKGRFPSTEMLAHLCESLCKSGKGDEMWEILRVLLDKGYCRNARGYHLVVSFLGKAGKVREAYDVLKEVKKKRLEPDISSYNSLMEALCRNDLLRPAKKLWDEMFTSGCSPNLQTYNILITKFTEMGESQEVQQLFDHMFQKGVAPDGATYTSFINMLCQENKYERALEVFNKSWMQDAGVASFVLSSFILALCKQGNFKAALSVMCNVPSNVENLNSHIILLKHLTDVGEVEMAIEHLEWIRSNCSSSFENIMNEFMASLSTSASLQHVTKLIQYLHSRRLIDDAHCRLGEE

SEQ ID NO: 55491 - protein, 80 aa, Zea mays
  Coding DNA Sequence Number=SeqID_13712
MEESRGMGAPSWESARELRGPSTMGRAEFGEELDCGACAGSWDRQGRKKPRRAVNLGRAQKDAPCEHRAQTKEKQGTRHS

SEQ ID NO: 55492 - protein, 102 aa, Zea mays
  Coding DNA Sequence Number=SeqID_13713
  Subcellular localization annotation: CTP_CleavageSite=52; ConfidenceScore=5.78e-01
MAIPLVSGETSPWSRAVSPSFVRPSQRRSPPSDPNRVVQITGYRFADARPVPRTARQRLRPLALSPTDNEQPVVPECVAKDLPEQQPGEGKCPQTYHVLFTL

SEQ ID NO: 55493 - protein, 170 aa, Zea mays
  Coding DNA Sequence Number=SeqID_13714
MAPRNGEALARHERGSTLGAYGPVGVLRGRVDGGRRNSGDEAPRMADEWTNGVVTVTGDGAGHGSSTASGALGFWVRSRSTPGREARCSARSGGARRPGRAWREMVGQLGSVLQGGEDREAGQGAAGGWRLGVPSDARCREKRGKGSRRRPAGSGWERRRLSNGAGARAA

SEQ ID NO: 55494 - protein, 101 aa, Zea mays
  Coding DNA Sequence Number=SeqID_13715
MGVGLLERVLTRLDCCVGVAVVVEWGPRAMLARRKYFRRGNRDEELFSHGKFSVVISSMVPYLHPKYYLAKALSKEKSSDGVTECTRPDSELREEFKYLPI

SEQ ID NO: 55495 - protein, 367 aa, Zea mays
  Coding DNA Sequence Number=SeqID_13716
  Homolog annotation: Hit_ID=Q6F3A7; Match level="QueryCoverage=99%, HitCoverage=87%, E-value=4e-40, Identity=34%"; Hit description =Putative PspA like protein
GCAPNAKVLPEEPDCPNVNVLGGDELEPKGLLKAEAEEAVEVLANTLVLAAVDAPAEELGEENVNPVLELELNGFAKVAPVPNGELPNPVPDVEVAAPKEAVLGPDEEVPAPKEKTPGAEDEAPTPKDAVPEPVEEAPSPKDSVPGPDEDAPTPGVMTGNASDDVLRPVDWAGELNPKRLFPELGNVNEGVEADCKPGAVEVLDGAATDIPAASLEDFTSAFVPPIPNDKVLAALFSAVVPSDLADVTNDNPTGALEEKLNPVNAGDDEIAGLLLDTANMEVETAELIAGLSVGGGVVSFGGEYDKPLLRLEVDATDVKWRGAFSVVDAAEGNTFSDGLATSSAFSVLSPLSELVLANVVGLVTLEK

SEQ ID NO: 55496 - protein, 335 aa, Zea mays
  Coding DNA Sequence Number=SeqID_13717
  Homolog annotation: Hit_ID=Q6F3A8; Match level="QueryCoverage=53%, HitCoverage=13%, E-value=3e-36, Identity=52%"; Hit description =Putative cell wall protein
MYPSPYDGSGAGGKIRRRPHLRAASTPYERPPAAAAAHRLAAAAAAASASSEPGGERGGGGGGWVSRLVDPASRLIAGGAARLFGSVFRKRLAPPPAPSPPLSSPPGRNNEPKQGLPDSTHVDSLPIPEGGMEKGKSIVDTSDVKAMSEVEHLLMRKTFTKVEFDRLTDLLRARTIESDPPKPIVSREEKNEESIKVDGIRGSALRHMDLDDSPAVKCCCSLSAGYTPYLWPSSATTLPEGVHNHGASSPAELAKQYMSSRYLREPQSSSLRSRLFLENKGEASNTVNDRRSVPPIVQTPLELRNENPGLPVNGYVTSGLRGRSAIYRMSRSPYF

SEQ ID NO: 55497 - protein, 249 aa, Zea mays
  Coding DNA Sequence Number=SeqID_13718
  Gene Ontology: Mol. function=nucleic acid binding; Biological process= DNA integration
  Homolog annotation: Hit_ID=UPI00004C1778; Match level="QueryCoverage =100%, HitCoverage=43%, E-value=1e-78, Identity=60%"; Hit description= UPI00004C1778 related cluster
  Pfam annotation: Domain name=zf-CCHC; Domain location=208-225; Score =27.0; E_value=3.4e-05; Accession=PF00098.13; Description=Zinc knuckle
MTGFAEPLKPEKFSGMHFKRWKVKVILWLNAMNVFHVNQGKPKGVLTPEEEKKYDDANPIFTGAILSVLVDRLVDANMQYIDEKELQDALTTKYVASDNDNDLYVMESFHDYKMANNHSIVEQAYAIQCIAKELDQLKIVLLEISVENMIASLDVEKKTQAKDTCSKGGEGHSSANMVQKNHNKGKGKTKSNKPNKTTNFKTKNKAGLTCFVCGEMGHFDKDCTDRAYRRGKKGNANTVVASNEGDKGY

SEQ ID NO: 55498 - protein, 105 aa, Zea mays
  Coding DNA Sequence Number=SeqID_13719
MAPRHGEARARHERGSTLGADGPVGWSWARAFDGVGRVGLLGAVEVDAWARGALLGAVGWGSAAWARMARDGRAARLGAARQGRPGGWAERGRGLAARCSWRRTL

SEQ ID NO: 55499 - protein, 128 aa, Zea mays
  Coding DNA Sequence Number=SeqID_13720
MGTVVGRADEAPAPACGREGPDAGGCHGCHRGLALATAPDSNREAAHGMVIPPGCRKPNSSASHINSLDSRDYASYWAFLRICSQNVLVRWLYPAVSKNMFCYILSGNMQLLQLKAVAVICTVAVFQK

SEQ ID NO: 55500 - protein, 115 aa, Zea mays
  Coding DNA Sequence Number=SeqID_13721
MKMIFVSLSPVRRSAVGGDVPGTPTREDEITVYISSLPPDRGHHRLLHVIPFSDFERISEDNKESFKESESEDKKGGHNGDKGNNGKDDIEGSSEGNNDRDGKGSGDAGGKVPPA

SEQ ID NO: 55501 - protein, 165 aa, Zea mays
  Coding DNA Sequence Number=SeqID_13722
  Gene Ontology: Mol. function=sequence-specific DNA binding; Cellular component=nucleus; Biological process=regulation of transcription, DNA-dependent
  Homolog annotation: Hit_ID=Q94KS5; Match level="QueryCoverage=62%, HitCoverage=13%, E-value=7e-14, Identity=46%"; Hit description =Homeodomain protein JUBEL1
MHDPDADGGQLLELGDGVYHNDPIQSAGTEGHAVAFLVPQGCQCVAAEKHVQAAGREGCQQPGTISDLTKGDIPRLHVTNQSLQQQRTIHHMHEHDGAGGLASPALPVGRMHGICLVIVICAQVGILDVKLVIALTGPAGYGGGAWWALTGPPGGACGSAMAAGS

SEQ ID NO: 55502 - protein, 232 aa, Zea mays
  Coding DNA Sequence Number=SeqID_13723
  Homolog annotation: Hit_ID=Q84VC6; Match level="QueryCoverage=56%, HitCoverage=53%, E-value=4e-45, Identity=74%"; Hit description=S -ribonuclease-binding protein SBP1-like protein
  Subcellular localization annotation: CTP_CleavageSite=53; ConfidenceScore=5.45e-01
MAFFSHHHLQQPHPQQAPPPNQQQPVLPSFRNALPVPVDGQIPAPLTFFNPPPAFPEQPAQTTLVDAVGLTAAAGLGWRQPREQELLGENSQMSSIDFLQTGSAVSTGLALSLEDRRHGGGGAGNSSGDSPLLLLPMLDDDISREVQRLDADMDRFIKAQVTHSSFLLRLLPVQKYHTSISKNAKYNEKYGESEGSAPHEDQDLELKKLELELCQTGLGFSSIRRNNAVSFC

SEQ ID NO: 55503 - protein, 155 aa, Zea mays
  Coding DNA Sequence Number=SeqID_13724
MTASFYLLRDRDGGGRGSQRYRETRLSGESGLSRPCPWFLYCLVGFPNVNGRSGSPCHANAVSGHPKFREFHRGTSPLMLKTHSSGYKRAREGGEAPKSLFWEEVELWKVQGGVLAKSWLGNGALASWSSSALLLLLFILVGASAEGVQGHLVVL

SEQ ID NO: 55504 - protein, 301 aa, Zea mays
  Coding DNA Sequence Number=SeqID_13725
  Homolog annotation: Hit_ID=Q10R85; Match level="QueryCoverage=72%, HitCoverage=78%, E-value=4e-96, Identity=78%"; Hit description =Expressed protein
MAGTTLLARATWKKNLFLARMPNPPPPCQPATYWPRQAGVALGKERHRLREIAVAFAAGGSSSTHPLRSSSRSRPSSLTAACALKTPSNGGSRGKVNPRDLFTFSHKFSTDIPMSETQGASIDEYLRNSPRIVGAVFPDQRKRRKINDEEWSVQLLPIRFLFLSASPVIVMRFVSKSGGKEYPPNVPVHATSLLLMEVTDYKLNGLDSNAMPSHLALTVRGLMYPQRQREGRKSLKGHVEMTVGFDLPPVLALVPASIIRGVGETVLRQMAEQMKQDMDTGLAADFNKYRREKLTERRSSP

SEQ ID NO: 55505 - protein, 191 aa, Zea mays
  Coding DNA Sequence Number=SeqID_13726
  Subcellular localization annotation: CTP_CleavageSite=50; ConfidenceScore=5.77e-01
MAAPSSSLTPPPPAAAVASTTLSGNLTASSLLSITPPRPRLAASHRRAVVAAAASPRPPPTPEGDGDEQEVERAMGMDGGIPGTSGEFLRRVSSRAYGMRRHLMESLDSLAYDDFAQIEVFEDEDDAVKYCNLLQGGGQGCEGIAEIEASSVFSMCRKMKALAVLFRRGKTPPLPQSLERDLRARKRSLED

SEQ ID NO: 55506 - protein, 231 aa, Zea mays
  Coding DNA Sequence Number=SeqID_13727
MRQVAYKTRRTMSHGRADGPSQTGDVNNEAEHGVVADTETWSPSVLRGGPVPFHDLFLAQRSARPGPTQRLSQDKVHEEQQKKKGQGPGPTTEKREAERGTSSGGRRHGPAAACSSGGRRPSPSRIGYRSLVDAAADAAAPPSTVTVVVGKERRAFAVDRLVLDSYPLRLLLETAARREERRAGGGAGAIFVDVDAILFEHILWLACDARSVSQILHLDLKEIIDFYAQDA

SEQ ID NO: 55507 - protein, 104 aa, Zea mays
  Coding DNA Sequence Number=SeqID_13728
  Subcellular localization annotation: CTP_CleavageSite=28; ConfidenceScore=5.02e-01
MPGQVRCLKSISTSALNKCPIFFVKKNRAHAQVTHIYYTSSRCPICLARPQIFKGAFSHAIATRDARKGSTGPCSAEADLLVPLPSSCRVEPPCRRRDLDRERR

SEQ ID NO: 55508 - protein, 151 aa, Zea mays
  Coding DNA Sequence Number=SeqID_13729
MGKSNKRKRELTPPSEDFGDSEYSEEEFSSESEGSPTPVSPPASSDDSDDSQGIVAEVWTYIRAVERSGLEGSDESEYSSDEEDSPEEDGEGDDDDDDDDEGDDDDDGDDGGRGSNGGSRGDNSDGKGGDGGSSRGSNGGGSSKGSNKASG

SEQ ID NO: 55509 - protein, 66 aa, Zea mays
  Coding DNA Sequence Number=SeqID_13730
MASYERTPPGSDPCARNQQRPASGPKVIVRGEWNAKRLRKQLSFIRFYNMGITNPTSLNRNLVLEI

SEQ ID NO: 55510 - protein, 105 aa, Zea mays
  Coding DNA Sequence Number=SeqID_13731
MENHPRKQCYHKGKLVDDYLTRKGQGEGNPRLNSIVNLVDVLNTELDHTLNELSRARAEIIELQDERAERRHQEYGSAAPLGLNSRTAHHHEGTMIMALPTAEPK

SEQ ID NO: 55511 - protein, 808 aa, Zea mays
  Coding DNA Sequence Number=SeqID_13732
  Homolog annotation: Hit_ID=Q9FFY0; Match level="QueryCoverage=19%, HitCoverage=15%, E-value=2e-11, Identity=27%"; Hit description =Arabidopsis thaliana genomic DNA, chromosome 5, P1 clone:MAC12
MAVVRSARAFVMVSIFCSSAVLAELVAAADATSLVLLSLPGISDTRLLELRLLRRSSSLCYGDIHPDALLNKEKHIKKDEKAYHVNLLNYHSKDNPSNQMQGVMQLKATNSGMPMKGCTKNRCFKVYVIHQMTGLFMAAFFMPDYYFGVITCLNSVALLTFQVSRTQLNHIKRLKQSGDGIQTKHVSRVIGGLDKSHVKPYGALLEDEQRRLREHWLEMSCNDLPAAFEVLRERKVLMEKSIKLLGLELQQKNVSVLRKADQLTDIMKGLGQPGASENDGTPVFQNDQVECSPQSILQGGHVQSTSLHHQDDEQSVYHIHRMNVEDHDLMVVRGIDITSQSEKNSDVPDQSRNGISCVDKGIYCCANNPDKQSDVLMDIKLCKGGLVVYNPDCKNTQLEDLDGVSYKGPSVHACDQDQDLESIGHAVVNHNCHNSPNISSEMSHPTTNAVIDQETENVMEPSCSSSQLPKSSGEQMHVEDFLYLNDQAAKFEKVSGQLAGPLGPPENMMYNDSGDLQIKQTYLSSGQHFSSVYLNNGILSHQQPQLATPAFALDNPASFIEPFSNLQSNRQPETEKDIGAVFYPFRHATNIKQSASLHCLVNKGLAQSASFPRLLQERHQLIDQSDSDLYAQPHEDYCTDVSCPTKVNLHISEQHSYTAFASMDHRYNWFPEGCQSHNNNDNLLGLQSGNFLPQALPSGSSTDGALFSTASQYNQPSVHMGHGGSNRSQLIEPRNQFGPPQNFLSKSQDTNPMFPDMYGFTQNIASGTSSQVAPIGSLDCSHWTNFIQQNSGMPSDFTNRPSRGPWTR

SEQ ID NO: 55512 - protein, 63 aa, Zea mays
  Coding DNA Sequence Number=SeqID_13733
MSPDHPVLVIVWCYSLLNRLISIATSELVSDIIVRIGTTKFYLHKLKLASIGTAAQFRCYVLY

SEQ ID NO: 55513 - protein, 180 aa, Zea mays
  Coding DNA Sequence Number=SeqID_13734
MKHGLVLSQIEELAGTSLSMMTLLVHLSSQHLALLRMHFNAMWDHANEENDMQGSPHESVGATEQGVPSSTHEGAPHIMEASSDDAPSGGSPSIKAAMVPIGHKANKNFPIGHTSQSCSKLSTLNFEGNNPTQKVNPYVNHSMRDSELQSKYDIIGQRTLAFTKLLLLTGFSYDFLGLCG

SEQ ID NO: 55514 - protein, 83 aa, Zea mays
  Coding DNA Sequence Number=SeqID_13735
MAYQMLPLWFIFKSPRALQLGGPHLSLTVAILAKGRDLRTQNEAAYNMKSMAETKVKPGPKLCARKLRLSSRKRNRLKEEKAI

SEQ ID NO: 55515 - protein, 90 aa, Zea mays
  Coding DNA Sequence Number=SeqID_13736
MTKQPSSISISAKPYGINLLGLGLIFDLPTRWFALGGGSEDADPHSQHHGLLCYESVELSNAATALQAVAGSRWHKRWTAVGCGASGGGE

SEQ ID NO: 55516 - protein, 102 aa, Zea mays
  Coding DNA Sequence Number=SeqID_13737
MMTRLQVSTLLSLTPTEVAIILMICVSYVAFRSVRQIRLFMFATKIRFNQALEDIAYMLEQDSLVFQEYLDKVNNENNHVDNDYVPSDLSSPTPTEAHLGED

SEQ ID NO: 55517 - protein, 60 aa, Zea mays
  Coding DNA Sequence Number=SeqID_13738
MGETCSLFVPICRLVTNMVICFIAYWVLVSGDQRVVRLQNYATHPETQRHSVVIRDGNQT

SEQ ID NO: 55518 - protein, 56 aa, Zea mays
  Coding DNA Sequence Number=SeqID_13739
MAEAKLPRVRRGLALGGALRARPVAPTTSDADPHTDVTVVTSPTSLTTPPELYCRR

SEQ ID NO: 55519 - protein, 195 aa, Zea mays
  Coding DNA Sequence Number=SeqID_13740
MAQAFNWKQARRLHSMRAGREPRVTRGDPWRLVEVILHHTRWSKEFQIAESRLGEKCCWERSRTHDGGGGGGNETTPPAYYGPGSYPVPPPHSSLILRGGPLDEGPVIVAQPTPPSSLSRSRRVEFLPSGCLPLLEGGTLSYCVKANTYVVSYNRILRNCAAGPMVRTCMMRPLASGQVRCHNVSSGESAQGDVL

SEQ ID NO: 55520 - protein, 106 aa, Zea mays
  Coding DNA Sequence Number=SeqID_13741
  Gene Ontology: Mol. function=drug transporter activity; Cellular component=membrane; Biological process=multidrug transport
  Homolog annotation: Hit_ID=Q10HY8; Match level="QueryCoverage=83%, HitCoverage=17%, E-value=9e-25, Identity=60%"; Hit description=MATE efflux family protein, expressed
MYFERDVSTPRNVLAFAGVAVGCGWQSFVAYVNVACYYGVGIPLGCVLGFYFDLGAMGIWGGMIGGLFAQTLILTCVTLRADWNKEVEQARMRLNKWEDKKKPLLT

SEQ ID NO: 55521 - protein, 480 aa, Zea mays
  Coding DNA Sequence Number=SeqID_13742
  Gene Ontology: Mol. function=RNA-directed DNA polymerase activity; Cellular component=membrane; Biological process=RNA-dependent DNA replication
  Homolog annotation: Hit_ID=Q10HY8; Match level="QueryCoverage=73%, HitCoverage=70%, E-value=1e-127, Identity=64%"; Hit description=MATE efflux family protein, expressed
  Pfam annotation: Domain name=MatE; Domain location=284-443; Score =96.8; E_value=6.5e-26; Accession=PF01554.9; Description=MatE
  Pfam annotation: Domain name=MatE; Domain location=62-222; Score =140.1; E_value=5.9e-39; Accession=PF01554.9; Description=MatE
  Pfam module annotation: Pfam domain module=MatE::MatE; Domain location=284-443::62-222
MAATASDQKTPLLLPLPDGGGGGHGASAQLERILGDESAPRARRLARAAREELRLLLALAAPAVAVYMINYAMSLSTRIFCGQLGTLELAAASLGNVGIQVFAYGIMLGMGSAVETLCGQAYGAHRYEMLGIYMQRSFVLLAGAGVPLAAIYAFSKQILLLLGEPERIAEAARAFVVGLIPQIFAYALNFPMQKFLQAQSIVAPSAYISAATLALHVALSWVAVYRLRLGLLGASLVLSLSWWVIVAAQFAYIVTSRRCRRRTWTGFSCQAFSGLPEFFRLSSASAVMLCLETWYLQVTVLMAGLLKDPEIALDSLAVCMSISGWVFMASVGFNAAASVRVSNELGAGHPKAASFSVKVVTIVSFTVASTIAAVLMCLRDYLSYVFTKGDDVARAVSAMTPLLAVTIVFNGIQPVLSGTHSYSSNLSRSSNVLATSSIVFLFYFSLYISHFYIVAFSKFRSLFTAGPIPAHTRLVGKRAI

SEQ ID NO: 55522 - protein, 499 aa, Zea mays
  Coding DNA Sequence Number=SeqID_13743
  Gene Ontology: Mol. function=RNA-directed DNA polymerase activity; Cellular component=membrane; Biological process=RNA-dependent DNA replication
  Homolog annotation: Hit_ID=Q10HY8; Match level="QueryCoverage=98%, HitCoverage=98%, E-value=1e-151, Identity=57%"; Hit description=MATE efflux family protein, expressed
  Pfam annotation: Domain name=MatE; Domain location=226-437; Score =73.5; E_value=6.9e-19; Accession=PF01554.9; Description=MatE
  Pfam annotation: Domain name=MatE; Domain location=65-225; Score =145.9; E_value=1.1e-40; Accession=PF01554.9; Description=MatE
  Pfam module annotation: Pfam domain module=MatE::MatE; Domain location=226-437::65-225
MGSAGGGGESKLESPLLGASSTGHGEAVVSGQLESILGDASVPWGTRMASASAVEMRLLVRLAAPAVLVYMINYLMSMSTQIFSGHLGTLELAAASLGNTGIQVFAYGLMLGMGSAVETLCGQAYGAHKYDMLGIYLQRSTVLLMATGVPLAALYAFSRPVLVLLGESPEIASAAAVFVYGLVPQIFAYAANFPIQKFMQAQSIMGPSAYISAAALAAHLALSYLVVYRLGLGLLGASLTLSASWWAIVAAQFAYIVTSSRCRLTWRGFSWQAFSGPAQLLQALPRIRRHALPRDLASSRTPSLPWPHSLSGWVFMISVGFNAAASVRVSNELGAGNPRAAAFSVVVVTLLSFVLSVLVSAVILLCRDYISYIFTEGEDVSQAVSRLTPLLAFTLILNGIQLQPVLSGVAVGCGWQAFVAYVNVGCYYIVGIPLGCLLGFYFDLGAAGIWSGMIGGTLMQTLILIWVTFRTNWNKEVEEAQKRLNKWDDGKAPLLSAQE

SEQ ID NO: 55523 - protein, 156 aa, Zea mays
  Coding DNA Sequence Number=SeqID_13744
  Subcellular localization annotation: CTP_CleavageSite=94; ConfidenceScore=5.30e-01
MRALYMSTYLCFLDKPSPCTTLLRSSGDRRSGSASACRNSGLQPLQATRRGSNDYINNFLQPWDNGGRLRRCGLRQCSGSSAALDLWLGGAAAPASSRSRRAGKRAAARGRRGVAALGPWAPWAVPRTCVGLGCQAFRDERVDSGLVLTMAVDFLV

SEQ ID NO: 55524 - protein, 189 aa, Zea mays
  Coding DNA Sequence Number=SeqID_13745
  Homolog annotation: Hit_ID=Q8S1P4; Match level="QueryCoverage=87%, HitCoverage=64%, E-value=9e-63, Identity=71%"; Hit description =Membrane protein COV-like
  Pfam annotation: Domain name=DUF502; Domain location=89-176; Score= -5.2; E_value=9.4e-06; Accession=PF04367.3; Description=Protein of unknown function (DUF502)
  Subcellular localization annotation: CTP_CleavageSite=45; ConfidenceScore=5.25e-01
MPEDKEYAPLPLGQAAAPDPEDPVKSPPRPSSPATSTRKACFAVLQSWVSRKFMTGCVVLFPIAVTFFLTWWFIQFVDGFFSPLYAKLGFDMFGLGFFTSLVFILLVGIFVSSWVGSTVFWVGEWFIKKMPFVRHIYSASKQVSTAVSPVDGASWAGPIGLSRSIRIELVGDKIRTEFRDKIDLVKIFA

SEQ ID NO: 55525 - protein, 210 aa, Zea mays
  Coding DNA Sequence Number=SeqID_13746
  Subcellular localization annotation: CTP_CleavageSite=60; ConfidenceScore=5.28e-01
MAQLFVSSVQAVDPATGTGLHFFAGRHRNFDGLATASRQAVCLCTAHRWPSLHGQQQAFRAMSFTCECCGRETFGCCPELSMRRCTTVAAAGRCGPEAPRRRVRPRRSGLPLLALAYYIPTRVLAQPLRPSTVSTRRDFGVGMSPGEASTQTLLAWVWLEAGTTQGQRRQVLGAWITIHAHRQIKNNISNLSIPHDCVEGIEACRIGQFG

SEQ ID NO: 55526 - protein, 787 aa, Zea mays
  Coding DNA Sequence Number=SeqID_13747
  Gene Ontology: Mol. function=nucleoside-triphosphatase activity; Cellular component=nucleus; Biological process=regulation of transcription, DNA-dependent
  Homolog annotation: Hit_ID=Q43704; Match level="QueryCoverage=76%, HitCoverage=100%, E-value=0.0, Identity=94%"; Hit description=DNA replication licensing factor MCM3 homolog
  Pfam annotation: Domain name=AAA_3; Domain location=352-493; Score =0.8; E_value=0.00026; Accession=PF07726.2; Description=ATPase family associated with various
  Pfam annotation: Domain name=AAA_5; Domain location=352-499; Score= -8.7; E_value=0.0083; Accession=PF07728.4; Description=ATPase family associated with various cel
  Pfam annotation: Domain name=MCM; Domain location=294-662; Score =605.8; E_value=4e-179; Accession=PF00493.13; Description=MCM235 family
  Pfam annotation: Domain name=Mg_chelatase; Domain location=352-503; Score=-132.9; E_value=0.001; Accession=PF01078.11; Description =Magnesium chelatase, subunit ChlI
  Pfam module annotation: Pfam domain module=AAA_3::AAA_5::MCM::Mg _chelatase; Domain location=352-493::352-499::294-662::352-503
MDVNEEAMAAHKRAFLDFLDQDVGKGVYMQAVRDMVQNKRHRLIIGMDDLRNHNLDLARRVIRSPGEYMQPASDAVSEVAKNLDPKFLKEGERVMVGFSGPFGFHRVTPRDLMSSFIGTMKVCGNSIDTSVVKETAKQNASLSLLTGSLVRPKVVKSVHFCPVTGAFLSREYRDITSFVGLPTGSVYPTRDDNGNLLVTEYGMCEYKDHQTLSMQEVPENSAPGQLPRTVDVIVEDDLVDCCKPGDRVSIVGVYKALPGKSKGSVSGVFRTVLIANNVSLLNKEANAPVYTREDLKRMKEISRRNDTFDLLGNSLAPSIYGHLWIKKAVVLLMLGGVEKNLKNGTHLRGDINMMMVGDPSVAKSQLLRAVMNIAPLAISTTGRGSSGVGLTAAVTSDQETGERRLEAGAMVLADRGVVCIDEFDKMNDQDRVAIHEVMEQQTVTIAKAGIHASLNARCSVIAAANPIYGTYDRSLTPTKNIGLPDSLLSRFDLLFIVLDQMDPEIDRQISEHVARMHRYCTDDGGARSLDKQGYAEEDDGDANAAIFVKYDRMLHGQDRRRGKKAKQDRLTVKFLKKYIHYAKNLIQPKLTDEASDHIATSYAELRDGSANAKSGGGTLPITARTLETIIRLSTAHTKMKLRHEVLKSDVEAALQVLNFAIYHKELTEMEEREQREAEMKQQADHDADATGGTVDGHGSSGNDPMDVDVGNTSNDQNVPLARMEAFEAFLGQHVLANHIDQMSIDEIEQVVNRESTAPYTRSQVEFILERMQDANRVMIRDGVVRII

SEQ ID NO: 55527 - protein, 154 aa, Zea mays
  Coding DNA Sequence Number=SeqID_13748
  Homolog annotation: Hit_ID=Q1PEY6; Match level="QueryCoverage=35%, HitCoverage=31%, E-value=3e-13, Identity=60%"; Hit description =Allergen-like
  Subcellular localization annotation: CTP_CleavageSite=33; ConfidenceScore=5.23e-01
MGRPRWWAKRWKRSSGSARTLGVAAVVALVVPLCFVASSSRLPGTLGGGALASVPYTGTMAAAAGAHHPGDQAAATHGLQELFYIARRRRRRLAGGGLGSHPPRCASKCGRCDPCYPVSVPLPVPRGVLDLVTPESEYYPEAWRCRCRDQLYMP

SEQ ID NO: 55528 - protein, 130 aa, Zea mays
  Coding DNA Sequence Number=SeqID_13749
MNHSLPTVRIAADDRAAGRKETALAAEGVHHRTTSEPEPGDLISRPALRALRRTWAHCPYPYPYYYTCNTNSNTALAHISPVIPATVWDYMPNTSHSSHRVCMHGEPAIMDAADCSRSSVTFLQAMLMLV

SEQ ID NO: 55529 - protein, 157 aa, Zea mays
  Coding DNA Sequence Number=SeqID_13750
MANRRPADPTRAKLNRKENGGEADWLGQPYQCSGVWADLTTWGRDPTVQLNFDEKLSSWRATHPRLQRLSSRGDAVGPQVSVMNQWSTDLSARDHQSWDQTCKWRLAPVAHKAAAERSTRRGAGAADKLTPHGSGTTQKAGCRTLGLSGPNTGNWPS

SEQ ID NO: 55530 - protein, 53 aa, Zea mays
  Coding DNA Sequence Number=SeqID_13751
MAPSSWLSAPTRLCIVLDLAVGSCPCVLITGRFSVVGSRSKVPHDIPVHSGSI

SEQ ID NO: 55531 - protein, 97 aa, Zea mays
  Coding DNA Sequence Number=SeqID_13752
  Homolog annotation: Hit_ID=Q1RZ01; Match level="QueryCoverage=98%, HitCoverage=84%, E-value=2e-08, Identity=34%"; Hit description=HMG-I and HMG-Y, DNA-binding
MSRGRGKKQTTVRSHEDKGSSGEEVVPAKKRRGRPQKASPVNADQEEADDAKLMNSAATGGTKRGRPLKERSNIVIEDTNSTVRLSSDESMRTNGFK

SEQ ID NO: 55532 - protein, 176 aa, Zea mays
  Coding DNA Sequence Number=SeqID_13753
MEVGSIEILGSLVTEDDGGRHDRREVEWAGKHEGRDDGWGNTELGARGLARRARPTEILTCRRGERAGGWHGSRRGDRAGGWCGAWPTEIVATRRVEVAERIGEGLVGNAGERRGDRGRCASGEGARTSDGQRSSMVYRAVEISGRQNDRTTEQREADYPYRLKEVWSALYKNDKG

SEQ ID NO: 55533 - protein, 599 aa, Zea mays
  Coding DNA Sequence Number=SeqID_13754
  Gene Ontology: Cellular component=endoplasmic reticulum
  Homolog annotation: Hit_ID=Q2HRE8; Match level="QueryCoverage=61%, HitCoverage=92%, E-value=1e-102, Identity=47%"; Hit description =Lipopolysaccharide-modifying protein
  Pfam annotation: Domain name=DUF821; Domain location=196-599; Score =635.8; E_value=3.5e-188; Accession=PF05686.3; Description =Arabidopsis thaliana protein of unknown function (DUF821)
MKSLQEERAALVPSPWPQQQRKDGGEHDPEQLMDEDDGDDEEDLQDEQHTRTIRTSTKTAEASSSAERRVPAWWRLRRAQKLLVPTRGVGLVIAGLLVLVLLLVVGGGGGANTSRRRWIHLDYASSFLRGGGLRQHQWPPHHVPSPAADLVPIPFSCGGNGSACPRRQTATSPPSPSPSSSSPPAGTKSSSSKNKQPPPQCPDYFRFIHSDLSPWRETGITREAVERGRHRAAFRLVVVDGRAYVETYHRVFQTRDTFTQWGIAQLLARYPGRVPDLDLMFNCEDMPEVKVKPSEESSAPPLFRYCKDDSTVDIVFPDWSFWGWPEVNIRPWAPLLEEMAAEMGRLPWADREPYAYWKGNPTVSAERADLRRCNDSSSSGGTRVFWQDWGAAIRDGFRDSNLAKQCRYRYKIYVRGRSWSVSLKYILACDSPVLLIATPFKDFFSRGLVAGRHYWPIDPGARKCADINFAVHDWGNAHPEQARRMADEGSGFARHQLSMDYVYDYMLHLLTQYAGLLRYKPTVPENAVELCAETVACPAAHHSNRREFDFMMQSRERYIADYQPCTLPPPFTDRHIREMTRRDQEVRANVHKMMTTVTP

SEQ ID NO: 55534 - protein, 90 aa, Zea mays
  Coding DNA Sequence Number=SeqID_13755
MTKSKGGSVDARTLVAHVLAAGTVVLVLLWCIHFRGGALCGGADGPRRPISCLPRGIPLRRRDPMMCLDVDRPLKTSLVDVEPKRYEDSR

SEQ ID NO: 55535 - protein, 224 aa, Zea mays
  Coding DNA Sequence Number=SeqID_13756
  Gene Ontology: Mol. function=ferric-chelate reductase activity; Cellular component=integral to membrane; Biological process=electron transport
  Homolog annotation: Hit_ID=Q6Z1Y9; Match level="QueryCoverage=75%, HitCoverage=72%, E-value=7e-45, Identity=54%"; Hit description =Putative cytochrome b561
  Pfam annotation: Domain name=Cytochrom_B561; Domain location=13-224; Score=163.9; E_value=4.2e-46; Accession=PF03188.6; Description =Cytochrome b561
MTKSKGGSVDARTLVAHVLAASAVVLVLLWCIHFRGGLALRSQDKPLIFNVHPVLMVLGPIVLGGEAILSYRSLPLARDARKKVHLALHAAGLAAGVLGVYAVFKFHVESGIPNLYSLHSWVGIAAITLYGLQWTAGFLAYFFPGASPATRRRTLPWHAVFGLLVFVLAVGTAQLGFLEKLTFMQGPATAPAQISEEAYVYFALNNFKFKGGMTYGFSRPWEPQ

SEQ ID NO: 55536 - protein, 240 aa, Zea mays
  Coding DNA Sequence Number=SeqID_13757
MAIKNFQAHLQRLQLQLINILSSESKLGYLEEKRLKDSALMAAQVQLRIQHYETNMESLEQMKNSKDRNIDPCSIMIDVAMYDEGNPIMEWLCSSRSESLLTLDENDEPESPNGPSGFVLEELGGLNEEDIVLLNFRIGYRRKKVRKRKVAEEDIGDDFLLDSSEGASSPTYDESGDIESNDGGGDDEDGDPSGPSSAARPPTHNGPGQDEQPAALRPRSKRQKKLSIKGLYMLEKVKYI

SEQ ID NO: 55537 - protein, 167 aa, Zea mays
  Coding DNA Sequence Number=SeqID_13758
  Gene Ontology: Mol. function=protein serine/threonine kinase activity; Cellular component=cell surface; Biological process =protein amino acid phosphorylation
  Homolog annotation: Hit_ID=Q8LQH1; Match level="QueryCoverage=63%, HitCoverage=13%, E-value=4e-21, Identity=53%"; Hit description =Putative S-receptor kinase
MRARNGPYTGRSHIHSVRCTSYADRMVATTLTQMLRAQMLGALRIVSDLQHAIDNFSVKLGEGVFGSMFRGQLPAGPCSTPIAVKRLDGFQHGDKQFRAEVSTVGMINHVMNLLRLLGFCAKKTSKLLDYESDIGSLFPCWAAIQQVYSWILLEGTEQQSSRFNFIP

SEQ ID NO: 55538 - protein, 320 aa, Zea mays
  Coding DNA Sequence Number=SeqID_13759
  Gene Ontology: Mol. function=electron carrier activity; Cellular component=intracellular; Biological process=electron transport
  Homolog annotation: Hit_ID=Q2QMZ1; Match level="QueryCoverage=70%, HitCoverage=22%, E-value=2e-19, Identity=29%"; Hit description=HAT family dimerisation domain containing protein
MGGGASTVPAMLWDSDSEDKVHVNAIGNVFAKIVFGNVGKPVKLNGPIDVTWNHGHILGSVEACRKVPNHVKDLMSQKVTDGRIRRARGKKLRLFVEKEVSAIRHGYQSARIPFDEEAQIDMAMRNSLRDSFSTLEHDSCSPFDKSTGSASGAASCSTGKQSRLSRYYKNTQDTSRGPFDIDLARSRTQVQPHIDVMLERGHKEKLGIALAKKFHANDIPGRKADCPYFRSALKLAQQLGDGVPIPRGREIDGPLLDMNYANMVAHMAKFKEDWKDYGVTVMCDSCTGGDEDDGFGYDYGNGEDEVVEEDFQEFQEYDEF

SEQ ID NO: 55539 - protein, 48 aa, Zea mays
  Coding DNA Sequence Number=SeqID_13760
MEVTSNTRLSLGILVADSVVPVSEKVTSKLFQISRSADKWKAFENDIS

SEQ ID NO: 55540 - protein, 100 aa, Zea mays
  Coding DNA Sequence Number=SeqID_13761
MDDPRCGGPRGSVPKLADPELGVDAGGRAARVGHRDGEDYELDGEDGGRGPSGERIVGSAARMSWAAISGGVVRVLMEVVGGDWERQNMVHGVDVYTPCL

SEQ ID NO: 55541 - protein, 127 aa, Zea mays
  Coding DNA Sequence Number=SeqID_13762
MGAGATRVALLVLAWGVWALGPSGSRGVGLSGTWQGHRGGSTSVAHLMVLEARKLKHQAVLQLNSGFSVSYASCGESSHGHGCGNCDDSHSRDGMPPHPSDYHGDHRKNSSWPMCQIYGKNGDSSIR

SEQ ID NO: 55542 - protein, 187 aa, Zea mays
  Coding DNA Sequence Number=SeqID_13763
  Gene Ontology: Mol. function=two-component response regulator activity; Cellular component=nucleus; Biological process=two -component signal transduction system (phosphorelay)
  Homolog annotation: Hit_ID=Q1S7Z3; Match level="QueryCoverage=68%, HitCoverage=92%, E-value=7e-17, Identity=39%"; Hit description =Response regulator receiver
  Pfam annotation: Domain name=Response_reg; Domain location=65-177; Score=63.0; E_value=9.8e-16; Accession=PF00072.14; Description =Response regulator receiver domain
MADSHACNGQERSFVLIWNEERINWQHSKDTCAASSLSSPSSSSEVKRLFMASIIQSNEGSSAPTRALVVEDIKVDCVILMHMLHKLQCEATAVENGKEAVDLFVEGKTFDIVLSDKDMPVMSGPEAVAKIRAMGATEVRIVGVSADFGGREAFMRAGADVFVPKPVKLETLRSMLELVTSKKNMSG

SEQ ID NO: 55543 - protein, 118 aa, Zea mays
  Coding DNA Sequence Number=SeqID_13764
MRAGGLARPASGSGAGMAPWAQAHMLARGGVTVLGGDGGLSREENRSLELDDGSLSVIRFPVGDPIPGGWGGSEARVWIGGQGGGVNLAGGGLEWSVCSEVAGARGGEVADEAYGCNR

SEQ ID NO: 55544 - protein, 85 aa, Zea mays
  Coding DNA Sequence Number=SeqID_13765
MNRVCTDDFALGAVVVAAEDRSSNTTCDARGRRRVAADVRITGDFRKYRRRKDMSVYGLSLESIMGVLMKASFQEAMKYNAPLEF

SEQ ID NO: 55545 - protein, 66 aa, Zea mays
  Coding DNA Sequence Number=SeqID_13766
MEIGSSGGRPKRREWGEPDKEAGYASTDENDDTWVPQVGHRAEDSAGEIGWKWTDIAAHRASGGGG

SEQ ID NO: 55546 - protein, 62 aa, Zea mays
  Coding DNA Sequence Number=SeqID_13767
MASIVECLSADESSVLIGPWTCRIASGDFKSGAIGPTNGGTDQSKCNPVRDVIVDAHFDSTV

SEQ ID NO: 55547 - protein, 106 aa, Zea mays
  Coding DNA Sequence Number=SeqID_13768
MDQMCRSKARRNKGLLQQSGCPRVVHGASLAEVQGKVASQTPPPAEARGKSPAAPAPALGIGAPAPRVGDDVVSPDDWTDQTPCDVVDAPSGKKAKRGSQTYMRCT

SEQ ID NO: 55548 - protein, 131 aa, Zea mays
  Coding DNA Sequence Number=SeqID_13769
  Gene Ontology: Mol. function=sugar porter activity; Cellular component=integral to membrane; Biological process=transport
  Homolog annotation: Hit_ID=Q6ZD70; Match level="QueryCoverage=62%, HitCoverage=23%, E-value=1e-31, Identity=80%"; Hit description =Putative GDP-Mannose transporter
MISSTRSFFVDDNDLEDGKASKERESSAQSLRLPKIQNQAPKRKGEFCMFSLKYINVAMLTILKNVANVLTASGETYFFKKQHGTQVWVALMLMIISAVAGGITDLSFHVVGYIWQTLKCVLTAAYSVFLS

SEQ ID NO: 55549 - protein, 134 aa, Zea mays
  Coding DNA Sequence Number=SeqID_13770
MGQRQERSRDRLIVPEVSSKFDGSLALASPPTSSDDSDDSQGLVAEVWMYIRSIERVGLEGSDESEVSSDEEDSFGSSEERSSDDSDDEGGGGGDNSDDGDGGEGDDDGGKGGEGSNGGSGSGGGKASGKAQLV

SEQ ID NO: 55550 - protein, 368 aa, Zea mays
  Coding DNA Sequence Number=SeqID_13771
MGSGAHAATRPEIRAGALHHPAGDLLFDTYLHGAPKVSSIAGHRNRCGKVVLGEPVPPNKGRTSETINAEFLGEGDIEVSDGDEGREDKRRRRKGWRGGKKLCLDPKKFNVIFGPFDRHHSLYAIGYGAEVSSALAQARHRGADVAPSSAPQTLALSSVVSRSKRAQVHSLALTALSFTAVQVKCMIHPGPSLCGCPSRFFHPHARGFGKLRRQSSRRTKCDGRPAGEGTRRAALSLDSIFLLRAARTDTLEPPQQEAVKPSPTNGRIRYRTPSATDLLPADDVAADATAATAVAARIRRYSSAGARQQQQTEAVVRPRAPGGVLLTVGGRRWGPRAVKDGLNNYLGAIAYDAELCYLGTVGYGAEQR

SEQ ID NO: 55551 - protein, 186 aa, Zea mays
  Coding DNA Sequence Number=SeqID_13772
  Gene Ontology: Mol. function=transcription factor activity; Cellular component=nucleus; Biological process=regulation of transcription, DNA-dependent
  Homolog annotation: Hit_ID=Q6Z4V0; Match level="QueryCoverage=83%, HitCoverage=76%, E-value=4e-30, Identity=52%"; Hit description =Putative AP2/EREBP transcription factor LEAFY PETIOLE
  Pfam annotation: Domain name=AP2; Domain location=27-92; Score=93.9; E_value=5e-25; Accession=PF00847.10; Description=AP2 domain
MADQAVAATTAHDQHQQQQRRRRSRASSEYLGVRRRPWGRYAAEIRNPVTKERHWLGTFDTAEDAAVAYDLSAISISGPAAARTNFCYPRGAARGLPSAHALPRQGLQLLPHSPAVPSPAAPPSALLPAGGGGGGGTVDGCDYDCEWRHLKAVEEADADDESMTIAAILQSFQHLNAPSAPPASLY

SEQ ID NO: 55552 - protein, 156 aa, Zea mays
  Coding DNA Sequence Number=SeqID_13773
MESKVEAEAVQLAGKKKSTFPSSAADDGRVEAASMGIMASSPSAASPAAIVSAFLAPPLSLLRHVASLCAGYLGLDGGLKPPAAAAPPASSSSSAAAAATSQRGEVVDVEAAASVEDYCAAEVVLAIEVRSRGFTPPQRRSAPRESKIAAVGGVIH

SEQ ID NO: 55553 - protein, 120 aa, Zea mays
  Coding DNA Sequence Number=SeqID_13774
MAAQTSHSRHKHGDLEPRWGRWGSGARPSLSPTTPRHGLQIHAPMAGKSGEVIDTVDQPPAWQERREGTRKLRGTATLCWGCGMACCAALREDGRGLRPFPEYLPCSGGDAGNMEDFEEF

SEQ ID NO: 55554 - protein, 172 aa, Zea mays
  Coding DNA Sequence Number=SeqID_13775
  Homolog annotation: Hit_ID=Q6QP51; Match level="QueryCoverage=53%, HitCoverage=52%, E-value=4e-13, Identity=53%"; Hit description =Putative growth-regulating factor 1
MGRRETEHEGGKKGDRQKGKPAAFVLSCAQVGRDGGSSEVEVESVFRGRGRVRAPGRARRRPSSEAKAKSEPWGRARRSSSSSGAEAESEPWGRAKRSSSSEAKTGAEPWGRARQSFLWRPRPDLAAVSLTLSSGTAVGATQVTLSSCQAGQWSGEVTAVTSALSTEGRASG

SEQ ID NO: 55555 - protein, 72 aa, Zea mays
  Coding DNA Sequence Number=SeqID_13776
MLRRGQAGGAAVLGCLGRIFIVYFIHMFGAMLIFAIYVCIVLMRLDEQATVDSEVQQVEVAEQELIEGKLCP

SEQ ID NO: 55556 - protein, 159 aa, Zea mays
  Coding DNA Sequence Number=SeqID_13777
  Gene Ontology: Mol. function=phospholipid binding; Cellular component= coated pit; Biological process=endocytosis
  Homolog annotation: Hit_ID=Q5N9P9; Match level="QueryCoverage=74%, HitCoverage=21%, E-value=8e-41, Identity=69%"; Hit description =Clathrin assembly protein AP180 short form-like
PIPRRHGLLHRLIELCYFGATAYSTEQRVQKQEYFLQGLNGGGLDKLILESLYDDGAYRQRQQQQLYGSAAPNPFMANDPFAMSNQVAPPPSVQMAAMSQQHQQIPTMMQPNPFGPPMHPQVSMAPATNNPFLDAGFGAFPAANNGHQQHNPFGSAQLL

SEQ ID NO: 55557 - protein, 107 aa, Zea mays
  Coding DNA Sequence Number=SeqID_13778
MTEAPCIHPLAASDPRFFLAVHWFPAIMYPCTFCAVLCCVVPATVLQFFTPKSYNGKDVPRGFLHKLLLHVGFDKWLAEPERQVTSVNGAISANAPKLRGATVSLFE

SEQ ID NO: 55558 - protein, 287 aa, Zea mays
  Coding DNA Sequence Number=SeqID_13779
  Gene Ontology: Mol. function=phospholipid binding; Cellular component= coated pit; Biological process=endocytosis
  Homolog annotation: Hit_ID=Q5N9P9; Match level="QueryCoverage=98%, HitCoverage=47%, E-value=1e-128, Identity=80%"; Hit description =Clathrin assembly protein AP180 short form-like
  Pfam annotation: Domain name=ANTH; Domain location=29-287; Score =263.5; E_value=4.3e-76; Accession=PF07651.6; Description=ANTH domain
  Pfam annotation: Domain name=ENTH; Domain location=29-174; Score= -1.5; E_value=3.5e-05; Accession=PF01417.11; Description=ENTH domain
  Pfam module annotation: Pfam domain module=ANTH::ENTH; Domain location=29-287::29-174
MASMQSWRKAYGAIKDTTTVSIANLNSDFKDLDVAIVKATNHVECPPKERHLRRVVAATSITRPRADVAYCIHALARRLAKTRNWIVFVVLLVLYKASPAYSPVALKALVVIHRLLREGDPTFREELLNFTQRGRILQLSNFKDDSSPIAWDCSAWVRTYGLYLEERLECFRVLKYDVEAERLSKQGQGPEKGHSRTRELDSQDLLEQLPALQQLLYRLVGCRPEGAANNNYLVQYALALVLKESFKIYCAINDGIINLVDKFFEMPRHDALKALEIYRRAGQQTNL

SEQ ID NO: 55559 - protein, 126 aa, Zea mays
  Coding DNA Sequence Number=SeqID_13780
  Subcellular localization annotation: CTP_CleavageSite=56; ConfidenceScore=5.26e-01
ALCRGAEVTRLGATSHGAKVQYALCRICVGTSFATPSGLAKRAVPSHPSSGGRAVQCSLRSRMELLHVVVLAFGAYFVRSWLATEGELAAEGGRGELATEGVGGSLPPRGVRGELPAKVERGRAFT

SEQ ID NO: 55560 - protein, 82 aa, Zea mays
  Coding DNA Sequence Number=SeqID_13781
MMSDNRRRGGRHAQQEQQAPQDEAPQQQLPPPPPMTIKQMFLMQTQAVQVIGQTLAAMQQVQLQQPPPQPQMQVQMPQMTNL

SEQ ID NO: 55561 - protein, 181 aa, Zea mays
  Coding DNA Sequence Number=SeqID_13782
MATHQWPAEDPVNRGESSTAASPLLSPTILCYTCSGHYGEASREEVVVTRTPLILWSPSRAEEKRLWPAIVARVVARARAELGEAVSTRPGASVPRVSDTMRRVDEEWARLVNHTRSARHRTTVTGRGAPRSSDQGRASGEGWARRGARGTDRWGRGVGAKDSLGCAVRLPWVGRIGVCRP

SEQ ID NO: 55562 - protein, 96 aa, Zea mays
  Coding DNA Sequence Number=SeqID_13783
MAILISGVTRIFGPYTRCWATSGVAVFLGLTELELARVEAEMGFMFPPDVAGLPSGPGFPDWRSRVGLVHLRPTHRDVAADRAGRAVVALLGRAPR

SEQ ID NO: 55563 - protein, 40 aa, Zea mays
  Coding DNA Sequence Number=SeqID_13784
MSSVQRLLDGLLAAPMSAGPSLDDIVPHGSRGELASGGLL

SEQ ID NO: 55564 - protein, 75 aa, Zea mays
  Coding DNA Sequence Number=SeqID_13785
  Subcellular localization annotation: CTP_CleavageSite=66; ConfidenceScore=5.10e-01
MGTTLTVQMATTQRPILGHPLVAHEPPLDLTTRNPLTRCVSSKPLYMLRPSSTGVSPPSPPPLGIVVSAIQDLAS

SEQ ID NO: 55565 - protein, 262 aa, Zea mays
  Coding DNA Sequence Number=SeqID_13786
  Gene Ontology: Mol. function=transferase activity, transferring hexosyl groups; Cellular component=cytoplasm; Biological process =metabolic process
  Homolog annotation: Hit_ID=Q7F0B2; Match level="QueryCoverage=99%, HitCoverage=52%, E-value=4e-81, Identity=58%"; Hit description =Putative UDP-glucosyltransferase
MTECLKCLVDATRSCSGVIFNTFRDLEDSDLQRIANGVVGVPIYPVGPLHKISPCTEDSLLAPDRACLEWLDKQEADSVLYVSFGSLARVDGKELLEIAWGLADSKMPFLWVLRHGLLVNSSSSDDDDDQDKVRRLLLPGGFEEATRGRGVVVPWVPQQEVLRHRAVGGFWTHSGWNSTLESVCEGVPMMCRPQFADQMINTRYVQEVWRVGFELDGDQLERRKIAGAVTKLLCTEEGRRMRQRARDLRDKAIECVQEEGAS

SEQ ID NO: 55566 - protein, 67 aa, Zea mays
  Coding DNA Sequence Number=SeqID_13787
  Gene Ontology: Mol. function=structural constituent of ribosome; Cellular component=intracellular; Biological process=translation
MESTLDAPDMVRCWMNFKWFSLTDIKINIKRVPKNTTLIMVLEEASNDEAYSVDPFSTIALYSSSRL

SEQ ID NO: 55567 - protein, 87 aa, Zea mays; identical to SEQ ID NO: 50849
  Coding DNA Sequence Number=SeqID_13788

SEQ ID NO: 55568 - protein, 149 aa, Zea mays
  Coding DNA Sequence Number=SeqID_13789
MAKSAEGTTARPRTGVARHGRAQKAAPGARERVAGTSRVEPVSGHALNCHAATPGLLAALGSRAGSQVAPRQAAGDHTGRHAEPRWATRSTPGTVCRVGRLRGRAGHGQPHRGPSQAARASFAPGRKEKGEGEKGGWMRAHHGNEWRLR

SEQ ID NO: 55569 - protein, 74 aa, Zea mays
  Coding DNA Sequence Number=SeqID_13790
MAQRLTRSTFTSERKKSDEGELGSPPKLGWLSGRWHIVLKAKSGELWLGQDCEHAGSTAEALGLLYKHDVGKGA

SEQ ID NO: 55570 - protein, 174 aa, Zea mays
  Coding DNA Sequence Number=SeqID_13791
MRSFLENSPLSGPFGPFQRTVRDTKVCLRQKLCKTHIYTTDYPKEKRSPSWTKLGPSGLRRGPSARRKPRRTRRFRMGCDEARSDANHLRASEKFSEARDAMKAAEEVSKAAEDEVHKLSLACNGTIAEQALLGQVQRVVLEGAYHGSSMALGYMVSHFDEIDAAVIIEGYAAG

SEQ ID NO: 55571 - protein, 145 aa, Zea mays
  Coding DNA Sequence Number=SeqID_13792
MARSAAGHPAPLLDSPTVAKTSKTERHPTIAEPRRRYPMYCLNDHTPETPLSSVMTEPRFRRACSEHDNTVEFKLKAWRASVTHQDTVTKGKRTRGVRQSSGSTRRRSAAVLCNAIHSYPGAYLNSGVNHDEEITGVEITDVKVP

SEQ ID NO: 55572 - protein, 82 aa, Zea mays
  Coding DNA Sequence Number=SeqID_13793
MKLWKETSRSSKITTSSRCGLAATPSRLPVKAAVIYVSFPHFDLLRGTQYTASKLEINIKPFSNPRQIGDKSLISDKTEDWH

SEQ ID NO: 55573 - protein, 238 aa, Zea mays
  Coding DNA Sequence Number=SeqID_13794
  Gene Ontology: Mol. function=oxidoreductase activity; Biological process=electron transport
  Homolog annotation: Hit_ID=Q8LI32; Match level="QueryCoverage=53%, HitCoverage=29%, E-value=4e-29, Identity=56%"; Hit description =Putative oxidoreductase, FAD-binding
MYLECWHLLDFPTLRLRPFYSRRARLCQRSGAILPALRPILSPASFLVELTRLCAAATPEDVILSTPETTTGEHQVQLGFLSSIAEQFLLRPFLVGIFFDPALDKSSRLFELVFKRLTLGDNVLVETGAKKATTMVFSPVGTLSNKVLVGLTRLRATTTLDDVILSPLETATRMWMTGRRGCEEDGRGWGSRQGGGCARGGMGRHHGDDAGFAHATRICCGGGGEERWGIRVGEDRGH

SEQ ID NO: 55574 - protein, 586 aa, Zea mays
  Coding DNA Sequence Number=SeqID_13795
  Gene Ontology: Mol. function=3'-5' exonuclease activity; Cellular component=intracellular
  Homolog annotation: Hit_ID=Q9FIN8; Match level="QueryCoverage=94%, HitCoverage=94%, E-value=1e-129, Identity=45%"; Hit description =Arabidopsis thaliana genomic DNA, chromosome 5, TAC clone:K16H17
  Pfam annotation: Domain name=3_5_exonuc; Domain location=14-239; Score=49.9; E_value=8.7e-12; Accession=PF01612.11; Description=3'-5' exonuclease
  Pfam annotation: Domain name=DUF82; Domain location=366-580; Score= -27.7; E_value=0.0002; Accession=PF01927.7; Description=Protein of unknown function DUF82
  Pfam module annotation: Pfam domain module=3_5_exonuc::DUF82; Domain location=14-239::366-580
MDHAPAPPFAVHLVTGGGSSSGIALLLRSLAAARVVALDAEWKPRRRGSPAAADPAALGDDTTPASETSPAPPKFPTVTLLQVACRFSDGGGGEGERSEVFVVDLLSVPLADLWAPLRELFERPETLKLGFRFKQDLVYLSSTFSAALGCDSGFDRVEPFLDVTNIYYYLKGHDRQKKLPKETKSLATICEELLGILLSKELQCSDWSCRPLSEGQIQYAASDAYYLLDIFDLFQKRITMEDLKVIIVPRMTSISDFLSYFFTVDSIKGKCSSTTELTSDRHCSSVVIECSSSGYGICSGSCLMSIVTKYSEKIILTESDAKPRTSRRKEKLKIPANAKRKDNVDCSSEWQGPPPWDPSIGGDGYPKFLCDVMIEGLAKHLRCVGIDAAIPSSKKPEPRDLLNQTYKEGRILLTRDAKLLKYQYLAGNQIKKDDMVFPQLFQGFFKKFWNLLMMKNWDYMRIRPIQILQHIKSVFVSPSTFDVDAQHSHKKCGVRPFSMVINIFQLKISEDQLMSRCTKCNGSFIQKPLTLEEAVEASKGFQIIPTCLFNRNLEFWKCTDCNQLYWEGTQYHNAVQRFLSVCNISD

SEQ ID NO: 55575 - protein, 131 aa, Zea mays
  Coding DNA Sequence Number=SeqID_13796
MPWLDQEVAWLIKIIATYGYGYGYESEVSLSYLPIRIPSTAKPEPRTVGEHDRKYAQLFVGHGAGRYKLQTPRTEPNQQANLPLRNKTTQYICDNKAVLIYLLLFPWQQYNKRHAQFVSSIHKLQAAAHRT

SEQ ID NO: 55576 - protein, 402 aa, Zea mays
  Coding DNA Sequence Number=SeqID_13797
  Homolog annotation: Hit_ID=Q10C31; Match level="QueryCoverage=99%, HitCoverage=99%, E-value=1e-105, Identity=55%"; Hit description =Uncharacterized plant-specific domain TIGR01615 family protein, expressed
  Pfam annotation: Domain name=DUF506; Domain location=86-312; Score =294.2; E_value=2.4e-85; Accession=PF04720.3; Description=Protein of unknown function (DUF506)
  Subcellular localization annotation: CTP_CleavageSite=46; ConfidenceScore=5.41e-01
MPFQLKTGHHHHGAAMEGKPPPPPTTQQPAPTPRVSRLRRLLGRVSSSEKFAADGKDRDKDEKLPPPPPPLPPATDDADAAGSLGLDRMVLSFMEEASAVERPPRGRCNCFNGSNHEESDEEFDFLPSAHASATAAAGAGDALEALKGLVQSASVAERNLLADASRLADKCGKGCKGKAECRRAVADGLRSLGYDASVCTSRWEKAPSHPAGEHEYIDAVVGKGKEQEEEEVRLIVEVDFRSQFELARSTKAYRAALQALPPLFVGTPDRLGQIVAVVAEAARQSLKKKGLHFPPWRKPEYMRAKWLSPHVRCGGVGGDMVAVPAAAAAAATPVQAASFSGEFELVFDRKRSSAGAGAAAEGGAVGGEKITVVVSPWRPTEEASKKQLPPKAKVVTGLAAVL

SEQ ID NO: 55577 - protein, 192 aa, Zea mays
  Coding DNA Sequence Number=SeqID_13798
MGRRDAGTRPAPWGHGVAVRAGERAKTESPTAHRLWVTKMDAYLGAITIGGGGGICSKTNTSSARHNLCRLSSFDPPKMLGAEALLADPLPLPEGLGAMARACWRLHHHVGNPQPVHQGSGSRGDGPGHQFGELPCCYHLGSAASSGSRPHALVVIEHGDVLREDHVLRDEDLPSNPPYQKFQFLLDRLKVA

SEQ ID NO: 55578 - protein, 451 aa, Zea mays
  Coding DNA Sequence Number=SeqID_13799
  Gene Ontology: Mol. function=zinc ion binding; Cellular component =intracellular; Biological process=ubiquitin cycle
  Homolog annotation: Hit_ID=Q2RBQ1; Match level="QueryCoverage=84%, HitCoverage=62%, E-value=4e-63, Identity=39%"; Hit description=IBR domain containing protein
  Pfam annotation: Domain name=IBR; Domain location=284-356; Score =54.6; E_value=3.4e-13; Accession=PF01485.11; Description=IBR domain
  Pfam annotation: Domain name=zf-C3HC4; Domain location=212-260; Score= 11.5; E_value=0.01; Accession=PF00097.15; Description=Zinc finger, C3HC4 type (RING finger)
  Pfam module annotation: Pfam domain module=IBR::zf-C3HC4; Domain location=284-356::212-260
  Subcellular localization annotation: CTP_CleavageSite=56; ConfidenceScore=5.66e-01
MAATGDQLAAVRVRGRASVRVNPSFFSPNTASSTSSPSSAHPMFGVFCKGQQMLIADEMVGLADGDPGTPVLAVAVCGPQGDVVVGGHKPASGFVSGHDGGGGDVGQVLLEAMALVEGLRTAIRMGITSVKAFTDHRLLYNCMVGLSRPAGDEQLADMISQALSAQKQFERCEISLAEQGQVGNAVKLAKEVELEAEIGRYLSTTKERTETCRICLEDVDSRKMHAVEGCAHRFCLVCMKTHMKMRLLGGLAPRCPQPGCATKLGAEGAAALLSPRLVGMMAQRRLKEEEEEEQMSIHPSLRVYCPYPRCSALMPLSEVLRGSLSPEYPATFRECAECGGPMCVECKVPWHGPLSCPEYRRRYPHGGGPEDVALQKLARQRLWQRCESCHHMIELAVGCAHIICVCGSHLCYRCGKALADDGRCGCSGLADGRRPWYFRLPACWGGRGTRR

SEQ ID NO: 55579 - protein, 528 aa, Zea mays
  Coding DNA Sequence Number=SeqID_13800
  Gene Ontology: Mol. function=pyruvate kinase activity; Cellular component=chloroplast; Biological process=glycolysis
  Homolog annotation: Hit_ID=Q43117; Match level="QueryCoverage=84%, HitCoverage=84%, E-value=0.0, Identity=78%"; Hit description =Pyruvate kinase isozyme A, chloroplast precursor
  Pfam annotation: Domain name=HpcH_HpaI; Domain location=219-381; Score=-75.0; E_value=0.0091; Accession=PF03328.5; Description =HpcHHpaI aldolase family
  Pfam annotation: Domain name=PK; Domain location=94-422; Score=213.9; E_value=3.6e-61; Accession=PF00224.11; Description=Pyruvate kinase, barrel domain
  Pfam annotation: Domain name=PK_C; Domain location=429-526; Score =18.3; E_value=3.4e-07; Accession=PF02887.6; Description=Pyruvate kinase, alphabeta domain
  Pfam module annotation: Pfam domain module=HpcH_HpaI::PK::PK_C; Domain location=219-381::94-422::429-526
  Subcellular localization annotation: CTP_CleavageSite=62; ConfidenceScore=5.72e-01
MATAARSLHLPGPTPPKSSTPSSHRLPVPCHLRPQRRRLAASSSDLTSFPEPPPAPNGVYVPWAAASSVAAAAASIVVDAATEAELRENGFRSTRRTKLVCTVGPATCGAAELEALAVGGMNVARVNMCHGDREWHREVIRAVRRLNDEKGFAVAVMMDTEGSEIHMGDLGGAPSAKAEDGEVWTFSVRSSDTSLPDRIIHVNYDGFAEDVKCRCTDPGLLLPRANLTIWRDGSVVRERNAMLPTISSKDWIDIDFGIAEGVDFIAVSFVKSAEVINHLKSYIAARSRGSDIGVIAKIESIDALKNLEEIIRASDGVMVARGDLGAQIPLEQVPSIQQRIVRMCRQLNKPVIVASQLLESMIEYPTPTRAEVADVSEAVRQRADALMLSGESAMGRYPEKALSVLRSVSLRIERWWREEKRQEALELQANNLGVDAVFVYTKDGYMGSLLSRCRPDCPIFAFTSSTSVRRRLNLQWGLIPFRLSESDDMESNLNRTFSLLKARGMVQSGDLVIALSDMLQSIQVVNVP

SEQ ID NO: 55580 - protein, 70 aa, Zea mays
  Coding DNA Sequence Number=SeqID_13801
  Subcellular localization annotation: CTP_CleavageSite=52; ConfidenceScore=5.47e-01
MASSPLGVTFPPSHFLFFIQGFTKSLAMTVLSKIGDKTFFATAVFGGMPPWRASLLGCWVRPWEIFSYTK

SEQ ID NO: 55581 - protein, 296 aa, Zea mays
  Coding DNA Sequence Number=SeqID_13802
  Gene Ontology: Mol. function=RNA-directed DNA polymerase activity; Cellular component=intracellular; Biological process=RNA-dependent DNA replication
  Homolog annotation: Hit_ID=UPI00004C1733; Match level="QueryCoverage =99%, HitCoverage=24%, E-value=1e-146, Identity=79%"; Hit description= UPI00004C1733 related cluster
MPDIPRDVAEHPLDIQAGARPVKQHLRHFDEEKHRAIGEEVHKLMAAGFIKEVFHPEWLSNPVLVKKKGGKWRMCVDYTSLNKACPKVPYPPPRIDQIVDSTAGCETLSFLDAYSGATYQRCMNHVFGEHIGRTVEAYVDDIVVKTKKASDHLSDLEMTFKCLKLNPEKCVFGVPRGMLLGFIVSERGIKANPEKIAAITNMGPIKDLKGVQRVMGCLAALSRFISCLGEKGLPLYCLLRKAERFTWTPEAEEALGNLKALLTNAPILVPPAAGEALLIYVATTTQVVNTAIVVER

SEQ ID NO: 55582 - protein, 113 aa, Zea mays
  Coding DNA Sequence Number=SeqID_13803
  Homolog annotation: Hit_ID=Q6QP51; Match level="QueryCoverage=42%, HitCoverage=22%, E-value=2e-15, Identity=79%"; Hit description =Putative growth-regulating factor 1
MAGMYCCACLNWRMQPSARTAMRTLLSPVIEAKSSAEKRDRERGYSERDPSPRRERAPSPPTDQRFEGWPLGRVQQPPQSTRAPRPLLIRGSKPGPSEGFDSRLRPLGLRAHY

SEQ ID NO: 55583 - protein, 132 aa, Zea mays
  Coding DNA Sequence Number=SeqID_13804
MSRFSLCLAAACCCCCLALLLPAAQGRPDTGGDHRPLFSEPHPHSDAVEKKATPSWSPRPPTAGGVVVTPELRTVPEGANPLHHRGSTTRHRQERALPAVAAGSVSVVVRPELRTAPCGANPLHNHGSTPSP

SEQ ID NO: 55584 - protein, 815 aa, Zea mays
  Coding DNA Sequence Number=SeqID_13805
  Gene Ontology: Mol. function=RNA binding; Cellular component =ribonucleoprotein complex; Biological process=regulation of translation
  Homolog annotation: Hit_ID=Q2R1U8; Match level="QueryCoverage=90%, HitCoverage=87%, E-value=0.0, Identity=65%"; Hit description =CRS1/YhbY domain containing protein, expressed
  Pfam annotation: Domain name=CRS1_YhbY; Domain location=169-252; Score=94.4; E_value=3.4e-25; Accession=PF01985.11; Description=CRS1 YhbY domain
  Pfam annotation: Domain name=CRS1_YhbY; Domain location=365-430; Score=0.0; E_value=0.019; Accession=PF01985.11; Description=CRS1 YhbY domain
  Pfam annotation: Domain name=CRS1_YhbY; Domain location=557-644; Score=128.6; E_value=1.7e-35; Accession=PF01985.11; Description=CRS1 YhbY domain
  Pfam module annotation: Pfam domain module=CRS1_YhbY::CRS1_YhbY::CRS1_ YhbY; Domain location=169-252::365-430::557-644
MAMASSPACHFRHPPRLRLLLPLSTSAPHPWLYSWSHPRQRGRLRAPPAALDLRPEPSPSSDSDDEDAVGASRSSGRSTMSLILSRLRRAGYSGEDPRAAAPPHPPRGSVEDVFRADDGVLPNARGGFDADDEERALGDARFPWERPMPPPEAAPRSARSPTWMAELTLPAAELRRLRHAAIRIKSRTKVGGAGVTREIVEKIKEKWKTEEVVRVKVSGTPALNMRLFHEILERKTGGLVIWRSGTSVSLYRGVDYDEPEPTKKSKKNSQSLAMDFPIKGSSNPSLLPTETANSVRDSNVALVSNAAKEELVVQAPEIKYEDEIDKLLDELGPRYTDWPGSDPLPVDADLLPANMPGYKPPFRVLPYGRSRQLQGLANAMVKLWEKSSIAKIALKRGVQLTTSERMAEDIKKLTGGVMLSRNNEFIVFYRGKDFLSSELAEVLLERERLAKSLQDEEEARRKAASYFSSAETYAQPTVAGTLGETLEANSKYGTKHDENHADKMARTIEAARHADLVRKLEWKLSLAQKKMEKAERVLGKVETALRPTEDSRPPETITDEERFMFRKLGLRMKAFLLLGRRGVFDGTIENMHLHWKYRELVKILVKAKSFADVKRIALSLEAESGGILVSVDKVSKGYAIVVFRGKNYRRPSSLRPRNLLSKRKALARSIELQRHQALSRHFAKLNRKVERLKAELVQMEDVKEQGDEELYAKLDAAYSSDDEDMEDEDDEAYLKRFDNEVAGATADDDGSDDYTSAADEADYPDSDDEAGDCSEDEGEDDEDEAAAGVSDAGFHGEVVGFSSDTDRRNHDVNEY

SEQ ID NO: 55585 - protein, 624 aa, Zea mays
  Coding DNA Sequence Number=SeqID_13806
  Gene Ontology: Mol. function=4 iron, 4 sulfur cluster binding; Cellular component=cellular_component; Biological process=regulation of cyclin-dependent protein kinase activity
  Homolog annotation: Hit_ID=Q2R1U4; Match level="QueryCoverage=88%, HitCoverage=87%, E-value=0.0, Identity=82%"; Hit description =CDK5RAP1-like protein
  Pfam annotation: Domain name=Radical_SAM; Domain location=248-444; Score=76.2; E_value=1e-19; Accession=PF04055.11; Description=Radical SAM superfamily
  Pfam annotation: Domain name=TRAM; Domain location=528-604; Score =54.2; E_value=4.5e-13; Accession=PF01938.10; Description=TRAM domain
  Pfam annotation: Domain name=UPF0004; Domain location=88-200; Score =171.4; E_value=2.2e-48; Accession=PF00919.10; Description =Uncharacterized protein family UPF0004
  Pfam module annotation: Pfam domain module=Radical_SAM::TRAM::UPF0004; Domain location=248-444::528-604::88-200
  Subcellular localization annotation: CTP_CleavageSite=45; ConfidenceScore=5.52e-01
MAAPLAPLTAAAVLRLGSRGLRHRILLASLRPCSSATPPHRSALPAAARRAPPPPRRFAHTLAASAATAISEGQADLVPGSTTSTKGRIYHETYGCQMNINDMEIVLSIMKNEGYDEIVPDPESAEIIFINTCAIRDNAEQKVWQRLNYFWFLKREWKANVAEGRAKSMRPPKIAVLGCMAERLKEKILDSDKMVDVVCGPDAYRDLPRLLQEVDYGHKGMNTLLSLEETYADITPVRISDNSITAFVSIMRGCNNMCSFCIVPFTRGRERSRPVSSIVREVGELWKVGVKEVMLLGQNVNSYNDTSEVEELEPGKNWQLSEGFSSMCKVKNMGLRFADLLDRLSLEYPEMRFRFTSPHPKDFPDELLYLMRDRYNICNLIHLPAQTGSTAALERMRRGYTREAYLELVHKIRDVIPDVGLSSDFITATAGWRLQQCSRRAGLQEKGQGAVAAGVAAGFCGETEDEHAETLSLVRAVGYDMAYMFAYSMREKTHAHRNYEDDVPEGVKQRRLMELINTFRETTKKNYDSQVGTVQLVLVEGPNKRAPKTEVIGKTDRGHKVSFARVPVPHTFEGEEAREPAVGDFVEVRILRSSTATLFGEPIARTSLSAFHRNVSPGAQAAAA

SEQ ID NO: 55586 - protein, 122 aa, Zea mays
  Coding DNA Sequence Number=SeqID_13807
  Gene Ontology: Mol. function=DNA binding; Cellular component =chromosome; Biological process=chromosome organization and biogenesis (sensu Eukaryota)
  Homolog annotation: Hit_ID=O23628; Match level="QueryCoverage=97%, HitCoverage=97%, E-value=8e-32, Identity=60%"; Hit description =Histone H2A variant 1
  Pfam annotation: Domain name=Histone; Domain location=20-93; Score =77.6; E_value=4e-20; Accession=PF00125.14; Description=Core histone H2AH2BH3H4
MAGKGGGKSLVAAKIAAGMDKDKKSPFPVGRIHRHLKDSAQAGERVGATAAVYAAAVLEYLTAEIMELAGNACRDLKVKRITPRHLQLAVRGDEELDTLIKATIAGGGVIPHIHRELIDKAA

SEQ ID NO: 55587 - protein, 83 aa, Zea mays
  Coding DNA Sequence Number=SeqID_13808
  Homolog annotation: Hit_ID=Q6K2P5; Match level="QueryCoverage=97%, HitCoverage=19%, E-value=2e-09, Identity=38%"; Hit description =Putative pentatricopeptide (PPR) repeat-containing protein
  Pfam annotation: Domain name=PPR; Domain location=17-51; Score=19.0; E_value=0.017; Accession=PF01535.11; Description=PPR repeat
MGAACRVLDGMPHRDGVAWDAVIGGYARAGRLAEAVELFGMMSLFVSNALPEMYAELGCLSEALLVFQQMEMKDSVTWSSMIG

SEQ ID NO: 55588 - protein, 92 aa, Zea mays
  Coding DNA Sequence Number=SeqID_13809
MEAGDWRFLPLSPPPKLGWLARTSDEQQRPRIVRNSVEEVAKQEVIDPTSGPGASVATDPALVFQLNATVEYGPGNTIEHIRAGFFACLMSS

SEQ ID NO: 55589 - protein, 180 aa, Zea mays
  Coding DNA Sequence Number=SeqID_13810
  Subcellular localization annotation: CTP_CleavageSite=64; ConfidenceScore=5.66e-01
MRGPHVSLSTAFAPHSLSLVREPALSDSSPFPKSAATKSPSPSAQQPPMNTGSAFLVPIKTKCRASPFQPLRAAIAIPLTSTREPRTEANPHPVDHAAGDSPFCSRSGFARGVGELRLDSAGVSAASASGWGGGLHRQIGHRSRCAAVTPRRTVGRAPDATILGGKLAFCLAIVSTSFLR

SEQ ID NO: 55590 - protein, 87 aa, Zea mays
  Coding DNA Sequence Number=SeqID_13811
MGIKAERAERAHWREGNRASTGQGKRRARRHAKLSLATTLRTELGRRAEEQEGGARGGSTGHHGKQGRGEEEDVRRGANFARAKELG

SEQ ID NO: 55591 - protein, 60 aa, Zea mays
  Coding DNA Sequence Number=SeqID_13812
MGDSVSGPVRSKVCGQVNQWEVLRRRVRELVPELLLAVRLDLGSRFTLRPRDCNLMNANV

SEQ ID NO: 55592 - protein, 161 aa, Zea mays
  Coding DNA Sequence Number=SeqID_13813
  Subcellular localization annotation: CTP_CleavageSite=25; ConfidenceScore=5.02e-01
MGRRTPPRVRRTLNAPGHAQRPNPRAPRHAKPCLCPLPAPVPIKPAEASAVRPLALSTSPEHEITGVFPANGVLAAARHPPLEYILVPEQGVAEEVAQDPAPEPAIEDLPAPALEDKPRIPLEMNTSSLEDMVAGVTWPSILPPGWTVEWDPTSAEEEHEE

SEQ ID NO: 55593 - protein, 95 aa, Zea mays
  Coding DNA Sequence Number=SeqID_13814
MEPIERKIAEGGATVDRAWERESRGLAEEVYRAAATVLCTTRRAMRGGLGAALGPWGRLEEWRVVAAADEQATVDSEVQQVEVAEQKLIEGKLCP

SEQ ID NO: 55594 - protein, 61 aa, Zea mays
  Coding DNA Sequence Number=SeqID_13815
MGDSVSGLVRSEVCGQVQSDKASTLDPCPWTIIDLIIKMNTQFLTLHECNKNHSTSTEIPN

SEQ ID NO: 55595 - protein, 121 aa, Zea mays
  Coding DNA Sequence Number=SeqID_13816
  Homolog annotation: Hit_ID=UPI00004C1733; Match level="QueryCoverage =32%, HitCoverage=2%, E-value=4e-12, Identity=90%"; Hit description =UPI00004C1733 related cluster
MSGIPRDVAEHSLDIRAGARPVKQHLRRFYEEKRRAIGEEKCRNLDDLNEGVVRVFIAPTTKLDRWWRLLSTGAPDSLVRHRDTVGCVSHVTWPIGVPTVGSSDLWGPPWAVRVVHRDRPL

SEQ ID NO: 55596 - protein, 114 aa, Zea mays
  Coding DNA Sequence Number=SeqID_13817
MGIRGFGREANFRREIAAPPITNVQLAGLFRCGAHPRQPRARNRCLAMAYKHAHGGGRTAHDDEQVLNAPIRAGEKGGKSTVRFIHRRRSPSGSRRDEGYEGRTFINTAYNDEE

SEQ ID NO: 55597 - protein, 165 aa, Zea mays
  Coding DNA Sequence Number=SeqID_13818
MAKGLSSSHGGGERQRAPNDYEAVAGARRVSAPVHPAPIQTAIRNREGNSSVAEILIDDRELRSDLAMGIHGFGCEANFRREIAAPPITNVQLAGLFRCGAHPRQPRARNRCLAMAYEHAHGGGRISHDDEQVLDAPIRAGEKGGKSTVRFIHQRRSPSGSRRDF

SEQ ID NO: 55598 - protein, 682 aa, Zea mays
  Coding DNA Sequence Number=SeqID_13819
  Gene Ontology: Mol. function=RNA-directed DNA polymerase activity; Cellular component=nucleus; Biological process=RNA-dependent DNA replication
  Homolog annotation: Hit_ID=Q8S461; Match level="QueryCoverage=98%, HitCoverage=36%, E-value=0.0, Identity=80%"; Hit description =Putative prpol
  Pfam annotation: Domain name=Retrotrans_gag; Domain location=170-261; Score=73.5; E_value=6.9e-19; Accession=PF03732.7; Description =Retrotransposon gag protein
MSEPSTTEGRHIQGELKNLLEDAAVRRAKSSASRRQGYPSEHRAATSGFMREASVDTGCTRNTTPAAPGHLGNEHHNRNRQAHLDERVRRGYHPRRGGRYDSGEDQSPSPEPHGLQAFSRAIRRAPFPTRFRTPTTITKYSGETRPELWLADYRLACQLGGTDDDNLIIRNLPLFLSDTARAWLEHMPPGQISNWDDLIQAFAGNFQGTYVRPGNSWDLRSCRQQPGESLRDYIRRFSKQRTELPNVTDSDVIGAFLAGTTCRDLVSKLGRKTPTRACELMDIATKFASGQEAVEAIFRKDKQPQGRQPEDVPEASAQRGTKKKNKKKSQAKRGATNADLVAAAEYKNPRKPPGGANLFDKMLKEPCPYHQGPVKHTLEECVMLRRHFHKAGPPAEGGRAHNNDKKEDHKAEEFPEVHDCFMIYGGQMANASARHRKQERWEVCSVKVAAPVYLDWSDKPITFDQGDHPDRVPSPGKYPLVVDPVIGNVKLTKVLMDGGSSLNIIYAETLGLLQIDLSSIRAGAAPFHGIIPGKRVQPLGQLDLPVCFGTPFNFQRETLTFEVVGFRGTYHAVLGRPCYAKFMAVPNYTYLKLKMLGPNGVITVGPTYRHAYECDVECVEYAEALAESEALIADLESLSKEAPDVKRHAGNFEPAETVKFVPLDPSNDASKQIRIGSELDPK

SEQ ID NO: 55599 - protein, 310 aa, Zea mays
  Coding DNA Sequence Number=SeqID_13820
  Gene Ontology: Mol. function=DNA-directed RNA polymerase activity; Cellular component=nucleus; Biological process=transcription
  Homolog annotation: Hit_ID=Q07DU9; Match level="QueryCoverage=69%, HitCoverage=18%, E-value=1e-117, Identity=95%"; Hit description=RNA polymerase IV second largest subunit
  Pfam annotation: Domain name=RNA_pol_Rpb2_1; Domain location=103-300; Score=8.3; E_value=1.1e-07; Accession=PF04563.6; Description=RNA polymerase beta subunit
MEEPQKDSGQPSKSSDSELEAMVLDDNGAGKSHSMEENRDSPIDVDGGQSSMDVDIKGKSSLSDDVNGKSSSEPYSNAPIDMSVESLEKFCKEASRSFFDEVGLISHQINSYNEFVSHGLQELFDSLGEVIVEPGYDPSKKGSGGWKHAIIKFGRVKLEKPVFWTGKDEGSVDFKPWHARLQNMTYASRLIVEVTIQVYSLEKSDKSKTGNDGFVQKRNFMNETHWIFIGLLPVMVKSNLCLLHSLNESECLFDAGGYFLVKGMEKYKGYVKQDLRQNSKEQSIEGWGKLTKYGEGIHCSRAKMSKEALD

SEQ ID NO: 55600 - protein, 150 aa, Zea mays
  Coding DNA Sequence Number=SeqID_13821
MAPECLGEAVCERDEVAKVAVHGMAALVGVDVADAGDETATRAYSKGATRADLDDTEEGEEAEHGEETAPTEEGWVNEGGKGLGQGERGATHGVVAVAVAEEKRGSGGGGRGIGGDDLGAGGRACQAPLAKRQAKTATPSPMPQGAAAAA

SEQ ID NO: 55601 - protein, 134 aa, Zea mays
  Coding DNA Sequence Number=SeqID_13822
MQRGEFVAQRHDALEQTRRSAARASCGEWRTREITRGSHGKFYTIPNPIFDSLGPRDAAGSFVQTMAGAAVGAADGQPPQSIFARGDSGACRRLAQQVEVGVGLLWELELAAPWRAVPPECALHVRDYRRRLLL

SEQ ID NO: 55602 - protein, 424 aa, Zea mays
  Coding DNA Sequence Number=SeqID_13823
  Gene Ontology: Mol. function=protein disulfide oxidoreductase activity; Biological process=cell redox homeostasis
  Homolog annotation: Hit_ID=Q2HVR5; Match level="QueryCoverage=77%, HitCoverage=65%, E-value=9e-56, Identity=39%"; Hit description =Glutaredoxin
  Pfam annotation: Domain name=Glutaredoxin; Domain location=262-330; Score=60.8; E_value=4.5e-15; Accession=PF00462.14; Description =Glutaredoxin
  Subcellular localization annotation: CTP_CleavageSite=61; ConfidenceScore=5.30e-01
MGCATSTEARRDMVRTGAGAPPRRSFSLPSVDRQRLRLKTVSMLGNLGLAGSSARHSSSCRHATLSVEDLMKSDNDHAADAVLLGDDAAKRSLKPRTPTLTPPNEPEVINAWELMAGLEDDAPTPRATYRCSLLNELPQELGLEAPPLPEWMQADMDMPVALDFDPEVLSGFRDALEATAPSPEHVVSSAEADTETPREQERKGADACDMPTSPATGNMPELSGLVRARIIAFQEKIERRGSKGRDAKVSSRWPPGGERKAVVYYTSLRGVRKTFVDCCAVRSILRSYGVRLDERDVSMHAVFKAELAELLGPGFAAAALPRVFVDGRYLGGAEDVHFLHEAGELGRVLEGCEAAPSRKLGYMEACAACGDVRFVPCETCYGSCKVFVEDDDADDMYQYHDVGEFRRCPDCNENGLVRCPVCCC

SEQ ID NO: 55603 - protein, 276 aa, Zea mays
  Coding DNA Sequence Number=SeqID_13824
  Gene Ontology: Mol. function=oxidoreductase activity
  Homolog annotation: Hit_ID=Q2HVR6; Match level="QueryCoverage=65%, HitCoverage=71%, E-value=4e-37, Identity=42%"; Hit description=RNA -binding region RNP-1
  Pfam annotation: Domain name=RRM_1; Domain location=40-107; Score =22.4; E_value=0.0012; Accession=PF00076.12; Description=RNA recognition motif. (a.k.a. RRM, RBD, or
MTAGCCTPFLLVTTLHAWLMAPGPQLGHHCIIMSETGHTVQVTNLSSRVSESDLHEFFSFSGPIEHIELIRSEGYGATAYVTFKERFALETAVLLSGATIVDQPVCITYWGQPEGTFNFWDRPTWEVEEEIEYRNYQTCQYNTTPQEAFTVAQDIMKTMLEKGYVLSKDALAKARAFDESYGLTAAAAARAAELSKRIGLTDRVNAGVGAMRSVDETYRVRETTKTVATATGRTAAKVVNGIVTSSYFSAGAMILSDALTRAAKAAADLAAHGRQN

SEQ ID NO: 55604 - protein, 35 aa, Zea mays
  Coding DNA Sequence Number=SeqID_13825
MAEVSRESVAVEKKTPTPGPTEFKVEFEFGYEIHL

SEQ ID NO: 55605 - protein, 172 aa, Zea mays
  Coding DNA Sequence Number=SeqID_13826
  Homolog annotation: Hit_ID=Q2R0M5; Match level="QueryCoverage=41%, HitCoverage=9%, E-value=1e-12, Identity=41%"; Hit description =Leucine Rich Repeat family protein, expressed
MRNLKELNVLECSSLQRMPSGLRLLTKIEALPRISKKDAEKMQLQRMHKLEHLALRCNTNEEQNDKNKIPEINSGDFDLDALAEALEQSATLASNSKKKNKSKHANAPVKRPVLKAQACDLSIPVPHSALLQFPTLHYCLTLCQFTVELLPVLVRWKASERSGCSGDLARAN

SEQ ID NO: 55606 - protein, 270 aa, Zea mays
  Coding DNA Sequence Number=SeqID_13827
  Gene Ontology: Cellular component=integral to membrane; Biological process=autophagy
  Homolog annotation: Hit_ID=Q67WQ6; Match level="QueryCoverage=94%, HitCoverage=95%, E-value=1e-47, Identity=40%"; Hit description =Putative senescence-associated protein 5
  Pfam annotation: Domain name=Tetraspannin; Domain location=4-242; Score=183.5; E_value=5.3e-52; Accession=PF00335.10; Description =Tetraspanin family
MARLSHGLLGALNLVTLLLSLPVLCAGVYIVTRATTACERGLQIPVVAFGCGLLLLSLVGLAGACGRRGAARPFLWVYVAFMFLLAVLVFAFAVFAFVVTHRGAGGAVSGRGYREYRLGDYSGWLQARIAEPETWRRVESCLSEARVCGGREFYRQHLSPIQSGCCKPPTWCRFRYVNATFWEAPRSGLSAAAASDGDCRAWSNDQQVLCFECDTCKAGVLETAKKKWKTVAIVNVSLLAFIVIVYTVGCFALRSKGGGRYFNGGGPDQT

SEQ ID NO: 55607 - protein, 469 aa, Zea mays
  Coding DNA Sequence Number=SeqID_13828
  Gene Ontology: Mol. function=transferase activity, transferring glycosyl groups; Cellular component=cytoplasm; Biological process =metabolic process
  Homolog annotation: Hit_ID=Q6ZHS1; Match level="QueryCoverage=83%, HitCoverage=90%, E-value=1e-142, Identity=65%"; Hit description =Putative Limonoid UDP-glucosyltransferase
  Pfam annotation: Domain name=UDPGT; Domain location=11-464; Score= -66.1; E_value=2.7e-07; Accession=PF00201.9; Description=UDP -glucoronosyl and UDP-glucosyl transferase
MAEEVTPHNIHILLICYPSQGHINPMLRLAKRIAAKGILVTCSSSSVVRDDLAAASGVSAGGDGVPFGAGRLRFDFLDDPFDGTLLDLEDFLRHLETAGRLALADLLRRQAEAGRPVSCVIGNPFLPWVTDVAADAGIPSAVLWVQSCAVFSVYYHFVHGLAEFPREDDLEARFMLPGLPTLSVADVPSFLHASHPYKVLGDTIQDQFRNMGKASWVFVNSFAELERDVIAALPSVRPRPPQLIPVGPLVELGDQDDAPVRGDLIKAADDCIGWLDAQAPRSVVYASVGSIVTLSTEVIAEMAYGLASTGRPFLWVVRPDTRPLLPEGFLDAAVAGRGMVVPWSPQDRVLAHASTACFLTHCGWNSTLETVAAGVPVLAFPQWGDQCTDAKFLVDELRMGVLLRAPLRREGVREAVDAATTGAEADAMFANAMFWSAAARAALTPGGSSDRNVQAFIDEVSRQARQRTS

SEQ ID NO: 55608 - protein, 71 aa, Zea mays
  Coding DNA Sequence Number=SeqID_13829
  Subcellular localization annotation: CTP_CleavageSite=31; ConfidenceScore=5.01e-01
MADFCPGRTNPPAHPAMSSLEVSAFSSEDIVSASRWAALVRKTGDGSSLPVAQPPSTWAPPRLGKASPSSD

SEQ ID NO: 55609 - protein, 577 aa, Zea mays
  Coding DNA Sequence Number=SeqID_13830
  Gene Ontology: Mol. function=protein serine/threonine kinase activity; Cellular component=integral to membrane; Biological process=protein amino acid phosphorylation
  Homolog annotation: Hit_ID=Q0PW22; Match level="QueryCoverage=93%, HitCoverage=95%, E-value=0.0, Identity=64%"; Hit description=Leucine- rich repeat receptor-like kinase
  Pfam annotation: Domain name=LRRNT_2; Domain location=40-80; Score =57.7; E_value=3.8e-14; Accession=PF08263.3; Description=Leucine rich repeat N-terminal domain
  Pfam annotation: Domain name=LRR_1; Domain location=108-130; Score =15.6; E_value=0.18; Accession=PF00560.23; Description=Leucine Rich Repeat
  Pfam annotation: Domain name=LRR_1; Domain location=132-154; Score =15.8; E_value=0.16; Accession=PF00560.23; Description=Leucine Rich Repeat
  Pfam annotation: Domain name=LRR_1; Domain location=156-178; Score =13.7; E_value=0.65; Accession=PF00560.23; Description=Leucine Rich Repeat
  Pfam annotation: Domain name=LRR_1; Domain location=180-202; Score =13.6; E_value=0.74; Accession=PF00560.23; Description=Leucine Rich Repeat
  Pfam annotation: Domain name=LRR_1; Domain location=84-106; Score =1.2; E_value=1.7e+02; Accession=PF00560.23; Description=Leucine Rich Repeat
  Pfam annotation: Domain name=Pkinase; Domain location=311-521; Score=- 59.1; E_value=4.9e-05; Accession=PF00069.15; Description=Protein kinase domain
  Pfam annotation: Domain name=Pkinase_Tyr; Domain location=311-521; Score=-40.9; E_value=5.8e-10; Accession=PF07714.7; Description =Protein tyrosine kinase
  Pfam module annotation: Pfam domain module=LRRNT_2::LRR_1::LRR_1::LRR_ 1::LRR_1::LRR_1::Pkinase::Pkinase_Tyr; Domain location=40-80::108 -130::132-154::156-178::180-202::84-106::311-521::311-521
MEEAPPSSSPPSPPVMLLLLLLLIVSSPCSSSALLSPKGVNPEVQALMTIKNTLKDPHGVLKNWDQDSVDPCSWTTVSCSLENFVTGLEVPGQNLSGLLSPSIGNLTNLETILLQNNNITGLIPAEIGKLTKLRTLDLSSNHLYGAIPTSVGNLESLQYLRLNNNTLSGPFPSASANLSQLVFLDLSYNNLSGPVPGSLARTFNIVGNPLICGTNNAERDCYGTAPMPPYNLNSSLPPAIMSKSHKFAIAFGTAIGCIGLLVLAAGFLFWWRHRRNRQVLFDVDDQHMENVSLGNVKRFQFRELQSATGNFSSKNILGKGGFGYVYRGQFPDGTLVAVKRLKDGNAAGGEAQFQTEVEMISLALHRNLLRLYGFCMTATERLLTTAARPLSVTSGSLNSSTIGDSHVTTAVRGTVGHIAPEYLSTGQSSEKTDVFGFGILLLELVTGQTALEFGKTANQKGAMLDWVKKTHQEKKLDVLVDQGLRGGYDKMELEEMVRVALLCTQYLPGHRPKMSEVVRMLEAGEGLAERWEASHSQSQSADSHEFKVPDFTFSRCYSDLTDDSSLLVQAVELSGPR

SEQ ID NO: 55610 - protein, 133 aa, Zea mays
  Coding DNA Sequence Number=SeqID_13831
MEDKALESDFSKLQDDVLVNVLNVHHEDQKIGGLKEGTTFVLETLAHVEPAPVESLISVCADQKVMPSFGRLVLETDVLNKDAHAATGHVQASGHLARDGGLVGDDGLDRADAWNLSFQESDLTVGAHNSIQF

SEQ ID NO: 55611 - protein, 96 aa, Zea mays
  Coding DNA Sequence Number=SeqID_13832
MGVPAFCALWRALIVVAAVAVSRSWRVPEAPFLGAPDTVRCTPDSPTLLLHHAAAELDIAPEVANCEMKLELMQVAEADPARISGLGLDRKLGTVG

SEQ ID NO: 55612 - protein, 522 aa, Zea mays
  Coding DNA Sequence Number=SeqID_13833
  Gene Ontology: Mol. function=protein serine/threonine kinase activity; Cellular component=ubiquitin ligase complex; Biological process=protein amino acid phosphorylation
  Homolog annotation: Hit_ID=Q2HTK4; Match level="QueryCoverage=54%, HitCoverage=32%, E-value=2e-65, Identity=46%"; Hit description =Protein kinase; U box
  Pfam annotation: Domain name=Pkinase; Domain location=240-499; Score =123.9; E_value=4.4e-34; Accession=PF00069.15; Description=Protein kinase domain
  Pfam annotation: Domain name=Pkinase_Tyr; Domain location=240-502; Score=56.6; E_value=6.1e-16; Accession=PF07714.7; Description =Protein tyrosine kinase
  Pfam module annotation: Pfam domain module=Pkinase::Pkinase_Tyr; Domain location=240-499::240-502
MEGEVVHIAVGKNTRKEEPNIRWAAAAFPEAAIVLVHVHWPSEWMPFMGGNPSYKFADEKEKERHGDTEATHMMKMFSVYKSQCGTRKEDDTTAEEFIEKPSTCETEDFSNGEKAAKIMHLSPISTMCVLMLNHGSNVDVMQGKIFSKGYHLDSDDETTQHDAPTYDVVASAEEIDRLEKKLKELQGEVHNHEECSSLPAQTAAVSPKKCLAEPRYPELKIPEHIVQFSASQIQKATSDFRSENIIGEGGYGPVYKGDLEGIPVAIKSLRPDGKQGFSEYQHEVMVLSKLEHPHIVRLVGVCHASCTLVYEYLPNGTLLDRLSKGRLLPWEDRVRILVELRSALAYLHSHRPNAIIHADLKLANILLDAGDAARLGDFGTARMVHVKPLEDEEETIVRRTNPMGTMGYIDPVFFTTGELTTESDVYAFGVVILQLLTGLHGLNIAEQVRGARSKLHGLLDVSAGPWPQVHSARLLKLALRCCSLERKQRPLMTCDAQWKSLLVLRNKAAPPKKARKWNCFVC

SEQ ID NO: 55613 - protein, 156 aa, Zea mays
  Coding DNA Sequence Number=SeqID_13834
  Homolog annotation: Hit_ID=Q6QP51; Match level="QueryCoverage=28%, HitCoverage=20%, E-value=7e-10, Identity=68%"; Hit description =Putative growth-regulating factor 1
  Subcellular localization annotation: CTP_CleavageSite=39; ConfidenceScore=5.29e-01
MAVAGGQEQRPRRQPSSRPIRGQRENPLSRREDNAPVFRSSNGSRTRNGRPPTTRPVALTPQRDGRRLWQEKRTTLRLRHNDRDKKGSKAGPSEGFDSRLRSRGPYTHYWSDVRRPAPRKVSTTASGYSGSAPTTDQGFEGWPPKGSQSPQTQSEG

SEQ ID NO: 55614 - protein, 70 aa, Zea mays
  Coding DNA Sequence Number=SeqID_13835
MALHELYDDGGPQLSYGSRTTDPPVSKRRQKLIWTKGGRSIAGDEARSHLKPDDEAEEQVDEAEEREAEA

SEQ ID NO: 55615 - protein, 630 aa, Zea mays
  Coding DNA Sequence Number=SeqID_13836
  Gene Ontology: Mol. function=protein binding; Cellular component =integral to membrane; Biological process=electron transport
  Homolog annotation: Hit_ID=Q00XE4; Match level="QueryCoverage=52%, HitCoverage=42%, E-value=2e-36, Identity=29%"; Hit description=[S] KOG2103 Uncharacterized conserved protein
  Pfam annotation: Domain name=DUF1620; Domain location=520-630; Score=- 40.1; E_value=3.3e-09; Accession=PF07774.3; Description=Protein of unknown function (DUF1620)
MGAVNDGAGEGDGAIVNSGVVVDERAYDEIGDGDGDMEMRESNNKVANDNLVLVSAGRWIYAVSSTDGAILWEKEFSLDGLEIKRILQSPENGIVYALGLAGSSKLALYHLSAKTGEILKDIQESLPGGLLGETVLVSDNVLVALDKARSSLLVIEFKGERISYNKVHVSDLVQDLSGSLELQSLSNGVISLQTSSSISLLKLKGTDGLEVLQRFDQPAAVSDSLTITEKEAAFAVVQHLGSEIEFIVKSTSDLSSEIIKEKLVIDQNRGNVEKVFLNSYIRTDRSHGFRALVVMEDHSLLLIQQGEVVWSREDGLASIVDVTTSELPVEKDGVSVADVEHNLFEWLKGHMLKLKGSLMLANADEVAAIQAMRLKSSEKNKMTRDHNGFRKLLVVLTKAGKVMALHTGDGRVIWSKLVPSLRASRCGGVPSALRIYQWQVPHHSVMRENPSVLVVGKFGAEPSIPDIQANVIKGYSLQKSCNLNVGDEYCFSTKELWFIIFPSDSERITISETRKMNEVVHTQAKISGDHDVMYKYLSKNLVFVATLSPKAAVDIGSALPEEASLVAYLIDAVTGRILHRVTHHGAQGPVHAVLSENWVVYHYFNLRAHRFEMAVIEIYDQSRAVWLMLS

SEQ ID NO: 55616 - protein, 340 aa, Zea mays
  Coding DNA Sequence Number=SeqID_13837
  Gene Ontology: Mol. function=transcription regulator activity; Cellular component=nucleus; Biological process=regulation of transcription
  Homolog annotation: Hit_ID=Q8S3D1; Match level="QueryCoverage=34%, HitCoverage=31%, E-value=2e-29, Identity=58%"; Hit description =Putative bHLH transcription factor
  Subcellular localization annotation: CTP_CleavageSite=87; ConfidenceScore=5.22e-01
MSSGFKQSCHEDQQEASRNLQLLPSLSSPSSLLFSNAQQFPHTTSSGQQLAHTNAGGATAWFSPKSGRRRRQRGEFAGERYAATACLLSKGVEDWGDHAAAAASACMVGGGGGVEEEGSAAMPLYSLYGGGSHSHSHLAAAGDHEMPPAPAAAAAGANKSQLSQMLLASSPRSCVTTSLGSNMLDFSNNGVPPAPDQLKSHHHHQSDNSSECNSTVTGSAIKKPRVQASSSAQSTLKVRKERLGDRITALHQIVSPFGKTDTASVLQETIGYIRFLLGQIEALSYPYMGHGNGTSIQNGPTTGERNHAGLLPDQYPGQPAAVGQPDEQQQQQGYYSAMGY

SEQ ID NO: 55617 - protein, 50 aa, Zea mays
  Coding DNA Sequence Number=SeqID_13838
MKLGNCSTRMVAPKVAKPKLVLKVAELKLLFVSTCRNLRISLHYLAKVCN

SEQ ID NO: 55618 - protein, 51 aa, Zea mays
  Coding DNA Sequence Number=SeqID_13839
MAEETTLLANSYGRNEGTKGIHRGRKLMDADRSPGSQIKSLVLYMSGNLSK

SEQ ID NO: 55619 - protein, 173 aa, Zea mays
  Coding DNA Sequence Number=SeqID_13840
MKKKLMKAMPKATKLLAIAETPLVSLASETKEATTSEFLPCSPENEELIAPVMSLFFCDEDEDDNEEAEDATATAVATKDATPPIVTIAVPETPKIPAMPLLVTTSLAVIPEKKSDSAKPAAAAKKGKGLTETDEAKKVIKEDMSLGEGPFNKEIGGRRYRVHQSTGREMGAN

SEQ ID NO: 55620 - protein, 479 aa, Zea mays
  Coding DNA Sequence Number=SeqID_13841
  Gene Ontology: Mol. function=transcription regulator activity; Cellular component=nucleus; Biological process=regulation of transcription
  Homolog annotation: Hit_ID=Q6ZA99; Match level="QueryCoverage=50%, HitCoverage=71%, E-value=9e-50, Identity=53%"; Hit description=DNA -binding protein-like
  Pfam annotation: Domain name=ACT; Domain location=321-405; Score =15.0; E_value=0.046; Accession=PF01842.15; Description=ACT domain
  Pfam annotation: Domain name=DUF1517; Domain location=94-320; Score= -182.5; E_value=0.075; Accession=PF07466.2; Description=Protein of unknown function (DUF1517)
  Pfam annotation: Domain name=HLH; Domain location=227-276; Score =54.1; E_value=4.7e-13; Accession=PF00010.16; Description=Helix-loop -helix DNA-binding domain
  Pfam module annotation: Pfam domain module=ACT::DUF1517::HLH; Domain location=321-405::94-320::227-276
  Subcellular localization annotation: CTP_CleavageSite=31; ConfidenceScore=5.09e-01
MAVGSVLSHGALDIQVRHRTQSVDRCARSSRCSAGTPDSPVNYSGAPSEFPEGEEFSLECPGAPDTVRSCERGAADRPIGMWEGGGFHGSHEALLLQAAGSGAADYGHGAGPALLPWLGPAAGAAPGFSYMAPHHAQPGPSGAEAAASPFGFGGGGYSDGGVGGQFGVFGGPETALPAPHGLAAAAGGGTSAMQHGSRMVSGLLGTLQMELGRMAAKEIMDAKALAASRSHSEAERRRRQRINSHLARLRSLLPNTSKTDKASLLAEVIEHVKELKRQTSAVLDVEGEEAAAARQRLQLLPTEADDLAVDATEDGEGRLVVRASLCCEDRAGLIPDIARALAALRLRAHRAEIATLGGRVRNVLLITAAADDDDGEGEGDDDDDDVEGDGGRRHELVASIQEALRGVMDCKTASSDTSSSSNGGGSMKRQRMSECHIHSVNNQMHSTNPLPSATLDKDYSVNLISIKVSLSNVKRNSTK

SEQ ID NO: 55621 - protein, 146 aa, Zea mays
  Coding DNA Sequence Number=SeqID_13842
MWITCARVMNDDEGSSFSGDEGEEAAGSSTGGGGFDRAGKGQGFWVEQGSGAGVLDVGWLWRGGAGARWSWAWASGVAGVGAEVARVGASPWHSPAGSGREGEFLAARVGREQGRREQRGGSGCARREVRISRGRWRLPLLGLMGF

SEQ ID NO: 55622 - protein, 69 aa, Zea mays
  Coding DNA Sequence Number=SeqID_13843
MEAKSRDSQAVRDPMAKHRCVPPVGRKLFLRIEGAEDPMVPRNFSSTKFGATVKPTTRWLEHSDTPLPV

SEQ ID NO: 55623 - protein, 97 aa, Zea mays
  Coding DNA Sequence Number=SeqID_13844
MASRRHQWRELMGGETTTLKFLYAEGRNVRGWARRVADCVGGTGVGWSWAWGSGAAGVGAEAAGVGAGPWRGPVGWRREGEFLAGGDKTENEASSIA

SEQ ID NO: 55624 - protein, 254 aa, Zea mays
  Coding DNA Sequence Number=SeqID_13845
  Homolog annotation: Hit_ID=Q6QP51; Match level="QueryCoverage=29%, HitCoverage=33%, E-value=2e-13, Identity=56%"; Hit description =Putative growth-regulating factor 1
MQAACNRTKGAHPFDFNASSVEAQAHMSWTGKGDTPKGILLREGSGPRAPLLIRGSKAGPSKGFNSRLRALGLRAHYWSKVRRLAPRKGSTAASGHSGSAPTTDQGFVGWPPNGSTAASEHAKRGMTLARQKPRQATSSFALSPTSEFAESSSSFLASPDDPGTAVARTRPNSGDLTVTLISDPMAEKPDTASRGNFVKETLGLFGTNPPSLVFTHNEQPLVPECVVEDLPEQQPGGDAGNMENFEEFQDYDEF

SEQ ID NO: 55625 - protein, 164 aa, Zea mays
  Coding DNA Sequence Number=SeqID_13846
  Gene Ontology: Mol. function=zinc ion binding
  Homolog annotation: Hit_ID=Q6AUV7; Match level="QueryCoverage=74%, HitCoverage=13%, E-value=3e-13, Identity=32%"; Hit description=JmjC domain containing protein
MLMVEALFLCLQCLCLQCCQEFRQGLVSGNDAKVDGGGKQDFLLGVSHDKIISKKPSDGQNDMLIDSVVPEKFIAELLEKADSALNNEMEVKIEGSKCPCFTESGDMDDGISWKSSCRENSCDNYIYCPTATNVQNGSLDHFQEHWLKGEPVHIGREIGNGIRL

SEQ ID NO: 55626 - protein, 87 aa, Zea mays
  Coding DNA Sequence Number=SeqID_13847
MACCSTAAQAQPVPGDLSSRPDAQPTPEHDATVAAPTQPDATGAAPTEPAAAGASAPVPDTTGARPDPAGACFTGSSSGKWLYNLNF

SEQ ID NO: 55627 - protein, 300 aa, Zea mays
  Coding DNA Sequence Number=SeqID_13848
MTILALHFGESHPPLCGVQVLPRGEWRVTTERVEGRALMSRWGGNLSLLEFLIKPTIRQGEDRTTVFVLQRLERSLLHTSTDGGLLQTPTAAASSTGRWPPPPLPLAGGFHNPIPRPATSTVSLPSWRLARPSLPIQPPRAAEPVTIGATAHPRPHFPWSADSPHFRAPLPRHNQSNRSVPLNLHDFHFAWDSTQSMKINSEHVRGITPSPLCTSSSTRVCESRSSSLESVDDRDASDIPTTTPRKTRTTRVTESEDDCKASQRAARSSGVQLQSLIDKAIELWGFSREFEVLFGAKLLN

SEQ ID NO: 55628 - protein, 113 aa, Zea mays
  Coding DNA Sequence Number=SeqID_13849
MDVGSLSRSWVEERSPAHGFIPSSQPQPPSVHVGKVVPVFPRGRHVHRKHGGRQWSGPWVHMTDGGAGTPLSASQQSDSGARMAVKRRTQGPSCRCNTVGPSTQRRVGAELRG

SEQ ID NO: 55629 - protein, 133 aa, Zea mays
  Coding DNA Sequence Number=SeqID_13850
MDAIGVDEAGFIGGSGKEVKRAKHHVASWSEALAAVGSTDQSHGVVVCGMASLVVMSPSSPPSDVRVTVETPSVSQSCLAELVIIGELDIKELVIIRELVIWFVSQSWSSIVGHHLGFGHHPRVGHHWRGDHH

SEQ ID NO: 55630 - protein, 232 aa, Zea mays
  Coding DNA Sequence Number=SeqID_13851
  Gene Ontology: Mol. function=transcription factor activity; Cellular component=nucleus; Biological process=regulation of transcription, DNA-dependent
  Homolog annotation: Hit_ID=Q1SIN7; Match level="QueryCoverage=60%, HitCoverage=54%, E-value=2e-14, Identity=37%"; Hit description =Pathogenesis-related transcriptional factor and ERF
  Pfam annotation: Domain name=AP2; Domain location=100-165; Score =104.6; E_value=2.9e-28; Accession=PF00847.10; Description=AP2 domain
MSAADSLTSGRGRRAEPPLPRLKRVRVYFVDADATDTDSSGNEDERGKRRVREVIHIDVESASALTRSAQPLVLPKKRPLPSQAAAAALVRRRSSGAGFRRRFPGVRLRPWGKYAAEIRDPHQRKRLWLGTFDTAEEAAAAYDDAALRLKGSRHVVTGFPAEAPPPWPRLGLRPRREVPQGSGGGRRGRGRRGPRIGPGPGGSARVTGFAGGGRHRPGLPVLVSNLCSPSRR

SEQ ID NO: 55631 - protein, 89 aa, Zea mays
  Coding DNA Sequence Number=SeqID_13852
MDPARGGTACQHSGTTSQCRQPLLSQGGAQAELAPLQSPWRLESKSSFGDHVIKFFEFYEVEDPKQQLVGEVKDFGTGIVPWLSLRVEV

SEQ ID NO: 55632 - protein, 251 aa, Zea mays
  Coding DNA Sequence Number=SeqID_13853
MRAAQAKEHTDSAHDNMNTICHGDCRGASSAWAPPWESKGSALPHAGLPALAGRADAQAGHAAARRGPCCQSSTGGGETAHEDIARYGHGLLNQAKGVMRRWGYARWGSSSASEICRGSPREGRGSDARSWLAGRSADQLSQCTRGGARGWGCRDEDELGTLRGWPGLGAARSCGGGQRRNAHTRYATAALRWAGEHPPEHKGWTTSRMATATTALSIWAPVGCGEAAARATRWALHDEARQNEVAAIDSE

SEQ ID NO: 55633 - protein, 159 aa, Zea mays
  Coding DNA Sequence Number=SeqID_13854
  Subcellular localization annotation: CTP_CleavageSite=6; ConfidenceScore=5.10e-01
MAAACLAPAPPPLCACPLPPQTPTSSRQWRPHAPCPPRIPHARPDQFAVSNGGHACPDQFTIATATAPAYHTILVLQTTAQSFAPFISPPLHSHASVTLERKDEGEGACPATGEEGYLILLNRAGLDQGYNGIARLLLSRGANVDLVSSEGTPPHVAKI

SEQ ID NO: 55634 - protein, 126 aa, Zea mays
  Coding DNA Sequence Number=SeqID_13855
MPPLSTNQDGTKQIIMHHISKAIEVHVILAVSAGPRLDPIELRIHVLHESDKVTHEAALHNTTTRLHLLINLDKHKHSYSKIDKITRNTIVSIGDVKNNKIERKNTMIDVLELAINRKEANKGEQW

SEQ ID NO: 55635 - protein, 131 aa, Zea mays
  Coding DNA Sequence Number=SeqID_13856
MHRLPKAGDSLLYEEMGAHRHTRVNDAATFSDEDLRSFPGPLASAAPLPAAVTPDAAAAFVGDALAPHAAGCFQTRRRRTRWRRPWRAWWQRGAPGRSTEDLALAGGDQHGEVECLGLGKGGSTVPATERK

SEQ ID NO: 55636 - protein, 114 aa, Zea mays
  Coding DNA Sequence Number=SeqID_13857
MNPASGTDPAGNPTSCRDARAGPRQSTNKRGGITSDSAIYDYRDPAAHMRLRSRWWAGGERVVRCVPALPVPGRDGARRTPVPRRSAGRRRWLEMKGIFGWVVAVEKAIVGCEL

SEQ ID NO: 55637 - protein, 610 aa, Zea mays
  Coding DNA Sequence Number=SeqID_13858
  Gene Ontology: Mol. function=zinc ion binding; Cellular component =COPII vesicle coat; Biological process=ER to Golgi vesicle-mediated transport
  Homolog annotation: Hit_ID=Q9ZQH3; Match level="QueryCoverage=60%, HitCoverage=49%, E-value=1e-144, Identity=68%"; Hit description =Expressed protein
  Pfam annotation: Domain name=Sec23_trunk; Domain location=186-445; Score=0.8; E_value=3e-11; Accession=PF04811.5; Description =Sec23Sec24 trunk domain
  Pfam annotation: Domain name=zf-Sec23_Sec24; Domain location=118-155; Score=28.9; E_value=1.2e-05; Accession=PF04810.5; Description =Sec23Sec24 zinc finger
  Pfam module annotation: Pfam domain module=Sec23_trunk::zf-Sec23 _Sec24; Domain location=186-445::118-155
  Subcellular localization annotation: CTP_CleavageSite=18; ConfidenceScore=5.08e-01
MGRETVASGPSVSDTEAVAAVIPESRRLARSRPSPSPLVDWSGWSSPSASHSHLPSVPESQTCPPTASAMAVRATVSRFPATPEALESCAVQWGVAVTPFAAVDERGQPPTTGAGGDRIPRCEHCWAYLSSHCDLERWGWTCALCGTLNGFDDEAERRFQRPDACPELNSSFVDLEIAGAGGDGVQALPVYVAAVDLACSEEFLELIKSALLAALEALIPGSLFGLMTFSHKIGLYDVQGPIPLVKNVFIPPDLEEDGLPVALEDAMPLLSFLAPVDTCKDRIAAALETLRPTSSWERGAASGHEEDAGLLGGRGFGTAMSALIEYLSSGYGSTFALARVFAFLSGAPDYGAGLLDTRRYGEQYASKGVDANLALLPEQIPFYRDLAAVAVQSGVCIDIFAVTDEYTDLASLKFLSIESGGYLFLYANADDSTLPQDMHTDPAVVQIAFQYSVIEPAKETSGDGSQSSASYKFSLKRRLRIRTLQYRPARNISEIYDSVDPEVVLHILVHKTTPQGIAAEVWTYIRAVERSGLEGSDESEYSSDEEDSDGDEDEDDDDDDGDDDDGGDGDGSGSGGGSGGGDGSKGSTRGGSSNGSTRGGGGGSSSKASG

SEQ ID NO: 55638 - protein, 266 aa, Zea mays
  Coding DNA Sequence Number=SeqID_13859
  Gene Ontology: Mol. function=DNA binding; Cellular component=nucleus; Biological process=regulation of transcription
  Homolog annotation: Hit_ID=Q6F2M8; Match level="QueryCoverage=98%, HitCoverage=94%, E-value=2e-76, Identity=58%"; Hit description ='putative no apical meristem (NAM) protein, PF02365'
  Pfam annotation: Domain name=NAM; Domain location=1-137; Score=92.0; E_value=1.8e-24; Accession=PF02365.6; Description=No apical meristem (NAM) protein
EELICFYLRNKLSGTRRADIERVIPVADVCTLDPWDLISGTYSTMPRLHPYAEAHRGACSGNEEPWFYFCPRQEREARGGRPSRTTPSGYWKAAGTPGLVYAADGRPIGTKKTMVFYRGRAPAGAKTKWKLNEYKAFEDDDATAAVAAPAPPSHALQTWSQYSLCRLYTKSGCLRQFDRRRSSTAAATGGGNENKPPAPSTALPDGDQTGQKRKRAAPTDDTSSSYEDGDEDVSTQQRLRLAQRGADDEGVKDMTDWWSEFLDDCI

SEQ ID NO: 55639 - protein, 148 aa, Zea mays
  Coding DNA Sequence Number=SeqID_13860
  Gene Ontology: Mol. function=hydrolase activity
  Homolog annotation: Hit_ID=Q10J20; Match level="QueryCoverage=58%, HitCoverage=49%, E-value=2e-31, Identity=57%"; Hit description =Hydrolase, alpha/beta fold family protein, expressed
YVNDVDYYGGFEQDELDELFEAMQSNYKACLLPHVSVPCHIVQSTKVLAVPVVVSEYLHRHLGGDSIVEVMPSEGHLPQLSSPDIEIDRAESLLPYKGPRRASTLTHHAPAPVIPAEMLAQGCLRPILPDILCAVILAPASLHSRLFP

SEQ ID NO: 55640 - protein, 73 aa, Zea mays
  Coding DNA Sequence Number=SeqID_13861
  Homolog annotation: Hit_ID=Q2R1C4; Match level="QueryCoverage=94%, HitCoverage=19%, E-value=7e-23, Identity=65%"; Hit description=St12p protein, putative, expressed
MGSVLTKIDTKTSIKDLTIRSSGPCRVWDLQSSEVVASLPRETGEIFGFCRFSNKADNSHVLFITVMEGDIKV

SEQ ID NO: 55641 - protein, 242 aa, Zea mays
  Coding DNA Sequence Number=SeqID_13862
  Homolog annotation: Hit_ID=Q6ZH86; Match level="QueryCoverage=24%, HitCoverage=9%, E-value=1e-15, Identity=87%"; Hit description =Putative phosphate transporter 2-1
MAEGFGRWESDLLFPAAECVQDSADRYGLRSPCFFLDLLAAWRWSPTLGSREPIGGALKFQVELFGFKYFGYPRVEPELDPKFRVPKISGPALSAAKFWQQQGRISVHQRAESLSLGTQTQPGFSSAWCIGAGDMGPHEECARELQHCCSQQSALYAPCLLRRKRRLSGKACCQGEAATSPCPDVRPLRCGASSWRCLGEAKRGHGRAWTVSAARRLPISGDGMQGEGAAGREKGRGRTAGG

SEQ ID NO: 55642 - protein, 108 aa, Zea mays
  Coding DNA Sequence Number=SeqID_13863
  Subcellular localization annotation: CTP_CleavageSite=35; ConfidenceScore=5.05e-01
MDGAEAIFFICSRTHQSSTVVPWGFVSRFCLRKIPEAMGGGRSYLRWRQERTTAQRMTQRERPRRGKCRSLPETSQHTDSISDEHVYSMTPEQQPRTTRAKRAVDTEY

SEQ ID NO: 55643 - protein, 95 aa, Zea mays
  Coding DNA Sequence Number=SeqID_13864
  Subcellular localization annotation: CTP_CleavageSite=67; ConfidenceScore=5.65e-01
MGGGLASGATAELMSPPPLNLSRASWALPELRGMRPSCLQVSSVVGSSPGRASSFCAPNSLAGSGVCAAALCARLTPSRSHGEDGVLALGWEWCG

SEQ ID NO: 55644 - protein, 62 aa, Zea mays
  Coding DNA Sequence Number=SeqID_13865
MDRLPTMVYCDVVTPQITWRTSGKQPTPTRIILVSRRASGYGGQHPTSSVFGPKVPRIRIHP

SEQ ID NO: 55645 - protein, 345 aa, Zea mays
  Coding DNA Sequence Number=SeqID_13866
  Homolog annotation: Hit_ID=Q7XAK4; Match level="QueryCoverage=45%, HitCoverage=71%, E-value=3e-34, Identity=53%"; Hit description=F-box protein GID2
  Pfam annotation: Domain name=F-box; Domain location=42-89; Score =28.5; E_value=2.3e-05; Accession=PF00646.23; Description=F-box domain
MAGECSSSFLQAPPPLAEQLPQDARVGEQPPPGSEAGGDEQARVPDLGEDLVFEVLMRAEARTLAAAACVSRGWRLLARDERLWEAACVREWAYTGFSEQMLRSVVLSLGGFRRLHEMYIRPVQQRAAGAPPGQQRRQLPVRMGRDQVQVSLSLLSTSFFLKMPNAPPPPPKDKDRDRDKNGGGQSFNSKISLEIRVDSEKYEELIEFMEKVAKTVDSEEHYVLSIAYKIVMEPNVLHGASYPPLSRGKKAVSTWTVSLSLRTTITRLKLNSARSVMESSSSLIPTVSASLTAAESKVFYLKMKGDYYGIFLVEFMCIRYLAEFETGSRRKDAARIPWWHTNLLR

SEQ ID NO: 55646 - protein, 73 aa, Zea mays
  Coding DNA Sequence Number=SeqID_13867
MGGEEPAARKEVLCARIGKTGGRDVGENGGALASCCWRKKEQGAPRREEQRDAMAAGGAMDRERGAAVGKKRQ

SEQ ID NO: 55647 - protein, 87 aa, Zea mays
  Coding DNA Sequence Number=SeqID_13868
MGISARQGEGANTTELCAALGEAEPVDRTCDKVASAMSEQDGGSSTSWGWGEIGEGERTAGRRGSWRSIARFEQEDEAVRAWDLRPG

SEQ ID NO: 55648 - protein, 90 aa, Zea mays
  Coding DNA Sequence Number=SeqID_13869
  Subcellular localization annotation: CTP_CleavageSite=46; ConfidenceScore=5.51e-01
MARGVAKSAAPGTSKPPLGAKSTAPDPSKPLPAVPMQERRPLSPPRAAETEVFDENGAGSEAGQLAVAPASVVAGPVTVATGTTGSGQDP

SEQ ID NO: 55649 - protein, 89 aa, Zea mays
  Coding DNA Sequence Number=SeqID_13870
MGRDGEQSRAVQEKPARAGRNPSREAGREMDAGDGSSSRAQLESSSAWTAGAPWGSQRGREKGRTPQSSARHLEKLSRSTGPATRWLRP

SEQ ID NO: 55650 - protein, 116 aa, Zea mays
  Coding DNA Sequence Number=SeqID_13871
MENVEILALTYGAIVQQLFTDLEGVEEVNNYLVQSLQSSTQGNKCDGPNTGMFMDMDVTSKMHITEVRLGVPNSEKTGQAKDGGKKSFEVPSAWEDVKESEEPKVKGEEEDLKSQG

SEQ ID NO: 55651 - protein, 338 aa, Zea mays
  Coding DNA Sequence Number=SeqID_13872
  Gene Ontology: Mol. function=protein serine/threonine kinase activity; Cellular component=nucleus; Biological process=protein amino acid phosphorylation
  Homolog annotation: Hit_ID=Q67C40; Match level="QueryCoverage=80%, HitCoverage=44%, E-value=2e-80, Identity=71%"; Hit description =Mitogen-activated protein kinase 7
  Pfam annotation: Domain name=Pkinase; Domain location=3-175; Score= -58.8; E_value=4.6e-05; Accession=PF00069.15; Description=Protein kinase domain
MGSSELRSLGPGEAAFTFILDDPARNIFIENSERGNLCFMLVEMAHAPILTLQTISSGRPGTTTESSAPELCGSFFSKYSPAIDMWSIGCIFAEILIGKPLFPGKNVVHQLDLMTDLLGTPSADTISQHEEETANTLSEKFPNADHSALKLLQRLLAFDPKDRPTAEEALADPYFKGIAKEILQYHPQLLKDYKNGSEKTSFLYPSAVDRFRRQFASLEENGERNVALDRKHVSLPRTTTVHSTPIPAKEGPAATSQVAQRIPADQESGRPGTRWYRAPELCGSFFSKYSPAIDMWSISCTFAEILTGKPLFPGKNVVHQLDLMTDLLGTPSADTISQ

SEQ ID NO: 55652 - protein, 107 aa, Zea mays
  Coding DNA Sequence Number=SeqID_13873
  Subcellular localization annotation: CTP_CleavageSite=61; ConfidenceScore=5.48e-01
MGMPMYPTHPTLRAHRLHHFWSSCADDRNNRSSDRAASSSSLTAAISASATLSVSHARRLSCVMRVVWHTAAAPDNASGRELVLLIGGGGEDDQDASSRSTSPTPSP

SEQ ID NO: 55653 - protein, 315 aa, Zea mays
  Coding DNA Sequence Number=SeqID_13874
  Gene Ontology: Mol. function=zinc ion binding; Cellular component =integral to membrane; Biological process=defense response to bacterium
  Homolog annotation: Hit_ID=Q2R3P9; Match level="QueryCoverage=76%, HitCoverage=72%, E-value=3e-90, Identity=71%"; Hit description =Nodulin MtN3 family protein, putative, expressed
  Pfam annotation: Domain name=MtN3_slv; Domain location=155-241; Score= 128.9; E_value=1.5e-35; Accession=PF03083.6; Description=MtN3saliva family
  Pfam annotation: Domain name=MtN3_slv; Domain location=34-121; Score =123.4; E_value=6.3e-34; Accession=PF03083.6; Description=MtN3saliva family
  Pfam module annotation: Pfam domain module=MtN3_slv::MtN3_slv; Domain location=155-241::34-121
MAGLSLLHPMAFAFGLLGIFFTFPYFTYKFGIWFLPKNQSNIISFMTYLAPLPTFYRIYKNKSTEGFQSVPYVVALFSAMLWIYYALLKSNELLLITINSAGCVIETLYIAMYLLYAPKKAKLFTAKILLLLNVGVFGLILLLTLLLSAGQRRVVVLGWVCVAFSVSVFVAPLSIIRQVVRTRSVEFMPFSLSLSLTVSAVVWFLYGLLIKDKYVALPNVIGFSFGVVQMGLYALYRNATPRVPAKDVADDASKDKAPGEHVVVTIAKLTAATTAPAAAVAEDLVKVHDGHPEEAAKGAAKPAENGAGRSDAEQV

SEQ ID NO: 55654 - protein, 56 aa, Zea mays
  Coding DNA Sequence Number=SeqID_13875
MARLGRAGCRSGPARGSAGGEMTAPRRGLGYGRARCSNYRRELVTNIWAHSGKARL

SEQ ID NO: 55655 - protein, 179 aa, Zea mays
  Coding DNA Sequence Number=SeqID_13876
MADVQLGVGRSRVQPHGMKRELSTTDLGASVGSWSVSGWPGMSAVAQENGVGSAAMAVLGTEGKLGMKEEGTDYNWSGADMVNTPNRKKIVLSNKTRKNVGKKQLYIVNVHDLLTTMQMNLTFLFSLHQGPFLIARAQPSSSASPLQYLAPFLNPGHDTILDVGEGGIRCHSLSRPRGR

SEQ ID NO: 55656 - protein, 123 aa, Zea mays
  Coding DNA Sequence Number=SeqID_13877
MGRSTLNASPYYLILTIISYIIVKGVIVLKIFWSLIRRSQQYVLPPAAPAPHPARVLPSTAHQSTRGGHHVVADEDANGRPCRGDDAEDANGDGGSHPKPSTTTATKTKTPTVPVTSQILTQV

SEQ ID NO: 55657 - protein, 137 aa, Zea mays
  Coding DNA Sequence Number=SeqID_13878
  Homolog annotation: Hit_ID=Q8H6I0; Match level="QueryCoverage=99%, HitCoverage=9%, E-value=7e-28, Identity=45%"; Hit description =Putative gag-pol polyprotein
MSGDHTKKEMVTGEKPATSHEKAPSGESYNKGKGKEKESSSHKSRRSGDKKKKMRKVVYYETDTSPPSTSGSDTPSVTSKRHERKKFSKIPLRYPRIPKHTPLLFVPLGKPPTFDGEDYARWSDMIRYHLTSLHKSI

SEQ ID NO: 55658 - protein, 68 aa, Zea mays
  Coding DNA Sequence Number=SeqID_13879
MAGEHQEDKEGECFVRFGHGGGLTPSEKVIADRSSDEVSCIPGAGGGVGAAGGGLEQSEGDIGLRGRP

SEQ ID NO: 55659 - protein, 206 aa, Zea mays
  Coding DNA Sequence Number=SeqID_13880
  Subcellular localization annotation: CTP_CleavageSite=63; ConfidenceScore=5.16e-01
MSCTQVTVRQLDEQTRCQDVRPSRKQRQAAAVRPRGSSPRRDQAASRTAERRTGRLERGATERAESEAPSGWSVGRSDRRPSGQLAAFGQRATSRRLEASQGCEGGRRQSPGGPRAPAPQGAAPVRARLRVDDEQGSAAAGRGPGAGGPSGAWGSGTNGQSDTTGAAAPGEAQDGDPPVARLLPQPAAGLRRLPAGRAPPREQAGD

SEQ ID NO: 55660 - protein, 144 aa, Zea mays
  Coding DNA Sequence Number=SeqID_13881
MGKSKKGGSSSHHSGDKRKRESTPPLEDFGDSEYSEEEFSSESEGSPAPASPPASSDDSDDSQGIAADVWTYIRAVERSGLEGSDESEYSSDEEDSSDSSEEGGGGDGGDGDDDGGDGDGGSGSGTGGGGDDGSGSKGSNKASG

SEQ ID NO: 55661 - protein, 91 aa, Zea mays
  Coding DNA Sequence Number=SeqID_13882
  Gene Ontology: Mol. function=sequence-specific DNA binding; Cellular component=intracellular; Biological process=regulation of transcription, DNA-dependent
  Homolog annotation: Hit_ID=Q65XK1; Match level="QueryCoverage=98%, HitCoverage=65%, E-value=2e-33, Identity=74%"; Hit description =Nuclear transcription factor Y subunit B-4
  Pfam annotation: Domain name=CBFD_NFYB_HMF; Domain location=1-55; Score=70.2; E_value=6.6e-18; Accession=PF00808.13; Description =Histone-like transcription factor (CBFNF-Y) and archaeal histone
MRRAVTENGKIARDARESIQECVSEFISFITSEASDKCVKERRKTINDDDIIWSLGTLGFEEYVEPLKIYLNNYQEGDIKGSKSSDQNGKK

SEQ ID NO: 55662 - protein, 164 aa, Zea mays
  Coding DNA Sequence Number=SeqID_13883
MEREDGAEAKCDLFVVRAMCGCRELDASGPGELGTYSAQQLGCDGRQLDAQHQGPRGTHMLSIAVGSFAKGGMLWACVVAYKEPVTLGSLHVVIYGVSVVCSTGNSSSYDDTVRSHIILVDCRVPIDLRSRTPAGTVAAVIRSDDPIQASAARRLEYGTNGLAG

SEQ ID NO: 55663 - protein, 107 aa, Zea mays
  Coding DNA Sequence Number=SeqID_13884
  Homolog annotation: Hit_ID=Q9CAQ2; Match level="QueryCoverage=91%, HitCoverage=79%, E-value=4e-18, Identity=46%"; Hit description =Uncharacterized protein At1g77540
MANEGVAAERAVKAPPPETESIVWREDKGRFQTPDGEAFLQYRLLDGRGAPAAAVMDLVHTYVPRSKRGQGLAARLCDAAFAHAQARGMRVLPTCSYISLLTLCHLI

SEQ ID NO: 55664 - protein, 120 aa, Zea mays
  Coding DNA Sequence Number=SeqID_13885
MVLTRTDVRPTKFWLVDTGAVCGLARGVELAFQPSYASNDQTATSVSFTNTQGHSNTKSKAQNHTGSTWPWGRGGEHALRGLTGAMDVAVNFGVNRQSRWSYTTVRDNKFTVHYQFGARK

SEQ ID NO: 55665 - protein, 83 aa, Zea mays
  Coding DNA Sequence Number=SeqID_13886
MDSESSVRPAEEKGRPRSGELTRDGAGARRGRETAEGRGRTLGAEETTSEHHSTRPWEIGARTMELREARLGGRKPCVASAVL

SEQ ID NO: 55666 - protein, 659 aa, Zea mays
  Coding DNA Sequence Number=SeqID_13887
  Gene Ontology: Mol. function=protein tyrosine/serine/threonine phosphatase activity; Cellular component=intracellular; Biological process=protein amino acid dephosphorylation
  Homolog annotation: Hit_ID=Q655C5; Match level="QueryCoverage=99%, HitCoverage=78%, E-value=0.0, Identity=70%"; Hit description =Putative PROPYZAMIDE-HTPERSENSITIVE 1
  Pfam annotation: Domain name=Act-Frag_cataly; Domain location=1-189; Score=17.9; E_value=2.8e-09; Accession=PF09192.1; Description=Actin -fragmin kinase, catalytic
  Pfam annotation: Domain name=DSPc; Domain location=429-571; Score =101.8; E_value=2.1e-27; Accession=PF00782.11; Description=Dual specificity phosphatase, catalytic domain
  Pfam module annotation: Pfam domain module=Act-Frag_cataly::DSPc; Domain location=1-189::429-571
MATQAERLGYEFARLLGVHTPQARVVYNSSSEWLAIRHAAENARTVAVSNNDEVGEMTCSELLEALELSRCLLLMSYIHGSPLLESSKAFHSREAACVTASSLGRVLMLDLILRNEDRLPCRQLGWRGNPANLMISDKSSLPNLDRLDDFKSSTDSSNQLITHFLHREKRSHSLNGKFGSPGLDPMSPKLEPLINEKENAERTNGDFRIVAIDTDNAGVIHEFRGSFRAALRDLEGFHLFLLQLYQKLDGVLRVFLSIITKTSEESDNNDAALSDFPSPGASYSTPRLPSKHLNNELHSDSEMLKSAMKSSSVGSRGSSDSVSPLPRESWNNKSFKGSAEAPRSLRMTMKLRDFYKTPKVDPELLKEIEQWNEALKNDVIKFCQENNFHSGFFDGTENNMVADAYELKVRLEHIIERIALISDAANTERPSLVVNNLFIGGALAARSKYTLQHLGITHVLCLCSNEIGQSDSQFPDLFEYKNFSISDDDDANISDLFEEASDFIDHVDHVGGKVLVHCFEGKSRSATVVLAYLMLREGFTLAKAWNLLKKVHRRAQPNDGFAKALLALDKRLHGKVSMDWQHKRPEMKVCPICSKNVGLSTSSLKLHLQKAHKRLSAGSVDSAMTMEIQKSIESLQISRGGSLSPSQKLTKVFSNELSF

SEQ ID NO: 55667 - protein, 139 aa, Zea mays
  Coding DNA Sequence Number=SeqID_13888
MEQRDATQPEAAAEERDQERPSIIPPPKLLFAGHWSDLGLVIMVLDTLGVSVRHMPNLATIFLVRQGKLTARLIPVQVEHIMDVVSLLFGGDISTSAQTFEKWLSLVHLDSRIVSNKEMTLDSRMMATLSTIQGITFYI

SEQ ID NO: 55668 - protein, 120 aa, Zea mays
  Coding DNA Sequence Number=SeqID_13889
MVLTRTSVGPTEFWLVDTGAVYGLARGVELAFQPSYPSNDKTTTSMSFTNSQGHSNTKSKVQNHIGFARPRGRGGEHALRGPTGAMDVAVNSDVNRQSCWSYTAVRDNKFTVHYQFGARK

SEQ ID NO: 55669 - protein, 46 aa, Zea mays
  Coding DNA Sequence Number=SeqID_13890
MAQALVLAPGLPPEQLLAPERGCTLSQRDYNLSNRVQQNFLVNYAT

SEQ ID NO: 55670 - protein, 159 aa, Zea mays
  Coding DNA Sequence Number=SeqID_13891
  Subcellular localization annotation: CTP_CleavageSite=26; ConfidenceScore=5.36e-01
MATCLTRPSMPEHALGAPPTRAAPCRANPTSTPAPTAIKATSTSIVHPRASLTQLELEFAEPGIELYLTGDAGSTSPDFNRPPSHIDRAPRPEHTPPTSPTACARGQPYSGHHRRRDRQDLPDLTQPFTGPPSPLEPAPEHAIEDLRAPVLEGKPRFYA

SEQ ID NO: 55671 - protein, 175 aa, Zea mays
  Coding DNA Sequence Number=SeqID_13892
ETHAHREERLGGVGGRDACAGRTTERQRPARRRPSAGASQARAREKQGATAEGETERARRPSQRSTPARERTGGEGEGARAAWERELRGAAALGEDEAPAAQTNLRERDKQEWSARPREGTERPRRENSASTGRNRAAEEREQEISCDGIRPTAGTRLGASAGEQGEQRMSSAAG

SEQ ID NO: 55672 - protein, 61 aa, Zea mays
  Coding DNA Sequence Number=SeqID_13893
MDFDQISEVHGQLPESIAPAPWFSRSVTTKGKVLTWVTHLAERTGKGYQRGRRGDEGGPYC

SEQ ID NO: 55673 - protein, 523 aa, Zea mays
  Coding DNA Sequence Number=SeqID_13894
  Gene Ontology: Mol. function=RNA-directed DNA polymerase activity; Cellular component=nucleus; Biological process=RNA-dependent DNA replication
  Homolog annotation: Hit_ID=Q8S472; Match level="QueryCoverage=99%, HitCoverage=48%, E-value=0.0, Identity=82%"; Hit description =Putative gypsy-type retrotransposon RIRE2
  Pfam annotation: Domain name=Retrotrans_gag; Domain location=11-102; Score=64.7; E_value=3.1e-16; Accession=PF03732.7; Description =Retrotransposon gag protein
RGAHGDNFIFRNLPLFLSDSARAWLEHLPPGQISNWEDVVQAFTGNFQGTYVRPGNSWDLRGCRQQPGESFRDYIRRFSKKRTELPNITDSDVIGAFLAGTTCRDLVSKLGRKTPTRASELIDIATKFASGQEVVEAIFRKDKQPQGRPPEDAPEASTQRGAKKKGKKKSQAKRDAADADLVAAAEYKNPRKPPGGANLFDKMLKESCPYHQGPVKHTLEECAMLRCHFHRAGPPAEGGRARDDDKKEDHQAGEFPEVRDCFMIYGGQAANASARHRKQERREVCSVKVAAPVYLDWSDKPITFDQADHPDHVPSPGKYPLVVDPVTGDVRLTKVLMNGGCSLNIIYAETLGLLRVDLSSVRAGAAPFHGIIPGKRVQPLGQLDLPVCFGAPSNFRRETLTFEVVGFRGTYHAVLGRPCYAKFMVVPNNTYLKLKMPGPNGVITVGPTYRHAFECDVECLEYAEALAESEALIADLESLSKEVPDVKCHAGNFEPAETVKSVPLGPSSDASKQIRIGSELDPK

SEQ ID NO: 55674 - protein, 127 aa, Zea mays
  Coding DNA Sequence Number=SeqID_13895
MRGTEGRLGQAENAANDDQGGRAEDADGLQLVSMEGRAQEEAGPSSNRRGLLLLCFGTERRKRGDGVREKGGGAGAATFKGVLAPAIGGLGGCCRAQVASASCSRWQSDFGHSFLAFSFWNRTLVVA

SEQ ID NO: 55675 - protein, 201 aa, Zea mays
  Coding DNA Sequence Number=SeqID_13896
MGLSKHPRDALGSGLRSSVSAYRNSELVAGEREPRRGSLAGEMEAREEELLLPCGPGHRKKAGVELLDMGVAGCCCKGAAPWPLAGARAEARSATEGTRPWGRRGGKEEGEPAALRGIGIGRAPGRGDGSGELGGHHGWAVKQRELAGVNAAGALRATGKDPATWVLSAMAGRGEEVEELSSLLAARRGQQREGGRFLCQE

SEQ ID NO: 55676 - protein, 206 aa, Zea mays
  Coding DNA Sequence Number=SeqID_13897
MTARRRCADPAKQDAETVELRRSTTQHGAVQTPTRRLGSGLRSSVSAYRNSELAAGEREPRRGSLAGEMEAREEELLLPCGPGHRKKAGVELLVGRWLLLVGEQEEDGCASAARGWARESCAGDEVVVGHRMGEEIARAPRHGRWPELELKLGVNAAGALRATGKDPTAWKLSAMAGRGEEVEELSSLLAARRGQQREGGRFLCQE

SEQ ID NO: 55677 - protein, 81 aa, Zea mays
  Coding DNA Sequence Number=SeqID_13898
MGEEKPNRQQSVCQSDCQTDWQTDLQAGQTGQDRLNRPLGRLNRPPNTPGDLTASLTGRLQIRSQRVRDQLSCPPGPVQLV

SEQ ID NO: 55678 - protein, 299 aa, Zea mays
  Coding DNA Sequence Number=SeqID_13899
  Homolog annotation: Hit_ID=Q53ND9; Match level="QueryCoverage=77%, HitCoverage=65%, E-value=3e-15, Identity=32%"; Hit description =Expressed protein
  Pfam annotation: Domain name=DUF623; Domain location=209-268; Score =106.7; E_value=7e-29; Accession=PF04844.4; Description=Protein of unknown function, DUF623
MAKKGLAAILYKFRDVHCPPSASLPPSTPSAHYAQRCYPPPLSAWPWPSCRHPRTSSFRGPKDDAAAVFRTVNTVYDYDTISGSEQVLRRSSIDEAACIDRRPLSLLGEAIAEQAVDEEEEKETELRETAVVRGMRSERLFFEPAGAEFLPNQRFQSVAVAPARGKDEAATADVKSEEQATTDAPHDKDEPPAEAVTAKGGAVVVTVESKDPYGDFRASMAEMVAAHGLRDWEALEELLAWYLKLNAKGVHAAIVGAFVDLLLQLAVFSTIFMAFEQLSLAQVKQKAESNTCPLVLQKH

SEQ ID NO: 55679 - protein, 167 aa, Zea mays
  Coding DNA Sequence Number=SeqID_13900
  Pfam annotation: Domain name=Ctr; Domain location=23-153; Score=65.6; E_value=1.6e-16; Accession=PF04145.6; Description=Ctr copper transporter family
  Subcellular localization annotation: CTP_CleavageSite=35; ConfidenceScore=5.08e-01
MEMAPAGAGKAAAAAPASRMPMMHMSFFWGNRAVVLFPGWPGARGAGAYLLCLLLVLALAALTEALAAASRCVARRGAGAGAGRVPASSAALLTAAHAARMGTAYLVMLAVMSFNGGVLLAAVAGHALGFLIARSRVHNRGGSAAAAAARDRELGGMDVHPPDVSKA

SEQ ID NO: 55680 - protein, 197 aa, Zea mays
  Coding DNA Sequence Number=SeqID_13901
  Subcellular localization annotation: CTP_CleavageSite=60; ConfidenceScore=5.35e-01
MAPRTLYDDGGSQPPYGSKRTSARTRQPRQLSFRQAPQHQRNTSEHSKAHSPLLPEHFTSLSSPPACIQRLVTLQNNSTYLQRMSRSNRKSSRGLDLKLNLSLPATGDSSRRAMADEESSPSSCLSSENEHGLQWSNSPEATSMVLAACPRCFIYVMLPQDDPRCPQCKSPVLLDFLQDNNNSKNNSNNSSRRSRRG

SEQ ID NO: 55681 - protein, 173 aa, Zea mays
  Coding DNA Sequence Number=SeqID_13902
MAGLGQITSWGGGQAGHGVDALTGGCGRGRAAPWMSRRDLRWCALGVARDPRLACWLSRMWLPIVGGRVGEVADVAVADGAPHRGRQGGRGRRQTYLHVEGINDFAHAWCSTNTALSGQILSGMCACEHYVFLWACTRVYVHVLGSWHMSTITMHVLIPVIFLFEGVLTQYLA

SEQ ID NO: 55682 - protein, 564 aa, Zea mays
  Coding DNA Sequence Number=SeqID_13903
  Gene Ontology: Mol. function=transferase activity; Cellular component= nucleus; Biological process=mRNA editing
  Homolog annotation: Hit_ID=Q8S090; Match level="QueryCoverage=81%, HitCoverage=87%, E-value=1e-100, Identity=42%"; Hit description =Selenium-binding protein-like
  Pfam annotation: Domain name=PPR; Domain location=141-175; Score=0.7; E_value=6.2; Accession=PF01535.11; Description=PPR repeat
  Pfam annotation: Domain name=PPR; Domain location=238-272; Score =33.7; E_value=6.6e-07; Accession=PF01535.11; Description=PPR repeat
  Pfam annotation: Domain name=PPR; Domain location=300-334; Score =43.5; E_value=7.3e-10; Accession=PF01535.11; Description=PPR repeat
  Pfam annotation: Domain name=PPR; Domain location=402-436; Score =44.0; E_value=5e-10; Accession=PF01535.11; Description=PPR repeat
  Pfam annotation: Domain name=PPR; Domain location=437-471; Score =22.9; E_value=0.0011; Accession=PF01535.11; Description=PPR repeat
  Pfam annotation: Domain name=PPR; Domain location=473-506; Score=8.5; E_value=0.74; Accession=PF01535.11; Description=PPR repeat
  Pfam module annotation: Pfam domain module=PPR::PPR::PPR::PPR::PPR::PP R; Domain location=141-175::238-272::300-334::402-436::437-471::473 -506
  Subcellular localization annotation: CTP_CleavageSite=53; ConfidenceScore=5.69e-01
SLHRQSRPPQPPSPPIPLCRRLQCPRVPVPQRRRRQPAIRCARPLSSGAAAPCAASPSSTPASSYSVSTTTTPSSPASPPPCDALECPSVAASFIAALTDSHAAPLRLRNAVLASLARHAPLHAALTEFNLLRQAALPDSFSFPCLLRACARVSCLPAGRALHAAAIRLGVHADLFIRTALIQFYGRCGVADAARALFYQIDIPSEVSWTAIIVAYVNNGGIIDARALFDTMPQRNVVHWNVMVDGYVKCGDLEGARRLFDEMPERTATACTSLIGGYAKAGNMEAARLLFDKLEDRDVFSWSAMISGYAQNGYPGEALRTFDEFQGQGIHPDELVVVGLMSACSQLGNIRLASWIEDYITKYSIDMNNAHVLAGLVNMNAKCGNLERATFLFESMPVRDVFSYCSLMQGYCLHGSADKAVKLFSRMLLEGLTPDNAVFTIVLTACCHAGLVEEGKKFFDIMKNVYLMVPSGEHYACLVNLLGRCGMLEDAYWLIMSMPGKPHPGAWGALLGGCKLHCNIELGKIAAKKLFEIEPDNAGNYVSLSNMYANIDRGAAYHWIEKNT

SEQ ID NO: 55683 - protein, 58 aa, Zea mays
  Coding DNA Sequence Number=SeqID_13904
MSFSPVKLVLSPKLKGQPVVQSLFGGTSALPAAPALELEELNACTKQQHKEKCFCYRV

SEQ ID NO: 55684 - protein, 89 aa, Zea mays
  Coding DNA Sequence Number=SeqID_13905
MDPGRPKMLALRAHGVGDVHGSFYHCAREAKERAPWKRSRAPCCSHGKKVSLLSNAVEKGTKKGTRLEQACAREKEQGERSAVEGSSAA

SEQ ID NO: 55685 - protein, 92 aa, Zea mays
  Coding DNA Sequence Number=SeqID_13906
MNWLGEPVAFLPLLFPFGAVSWREKLGESRHYGLVRTPYAGFWCRVWELQLVTGMMLMAAMLRIGREFAVVGELARLAIANRGRLSNLRLGL

SEQ ID NO: 55686 - protein, 93 aa, Zea mays
  Coding DNA Sequence Number=SeqID_13907
MNWLGEPVAFLPLLFPFGAVSWREKLGESRHYGLVRTPYAEFWCRVWELQLVTGMMLMAAKLRIGREFAVVGELARLAIADRGRLSNLRLGLR

SEQ ID NO: 55687 - protein, 62 aa, Zea mays
  Coding DNA Sequence Number=SeqID_13908
  Subcellular localization annotation: CTP_CleavageSite=44; ConfidenceScore=5.27e-01
MPQRLDHCRASTTADPTPPAPSPATHRLACEPPSRPRPNLQGFRNFLVQGRCCRNFLLIGFY

SEQ ID NO: 55688 - protein, 546 aa, Zea mays
  Coding DNA Sequence Number=SeqID_13909
  Gene Ontology: Mol. function=RNA-directed DNA polymerase activity; Cellular component=mitochondrion; Biological process=RNA-dependent DNA replication
  Homolog annotation: Hit_ID=Q8S463; Match level="QueryCoverage=99%, HitCoverage=28%, E-value=0.0, Identity=87%"; Hit description =Putative prpol
  Pfam annotation: Domain name=RnaseH; Domain location=1-123; Score= -28.6; E_value=0.027; Accession=PF00075.14; Description=RNase H
  Pfam annotation: Domain name=rve; Domain location=328-487; Score =123.5; E_value=6e-34; Accession=PF00665.16; Description=Integrase core domain
  Pfam module annotation: Pfam domain module=RnaseH::rve; Domain location=1-123::328-487
MFFDGTLMKTGAGAGLLFISPLGKHLRYVLRLHFPASNNVAKYEALVNGLRIAIELGVRRLDARGDSQLVIDQVMKNSHCRDPKMEAYCDEVRRLEDKFYGLELNHIARRYNETVDELAKIASGRTTVPPDVFSRDLHQPSVKIDDTPELEAPSAQPEVPSAQSEAPSARPEAPSVQPEVPSAPEGEALRVEEERSGVTPNRNWQTPYQQYLHRGELPLDRAEARRLARRAKSFVLLGDGKELYHHSPSGILQRCIPIAEGQELLREIHSGACGHHAAPRALVGNAFRQGFYWPTAVADATRIVGTCEGCQFYAKQTHLPAQALRTIPITWPFAVWGLDLVGPLQKAPGGYTHLLVAIDKFSKWIEVRPLNSIRSEQAVAFFTNIIHRFGVPNSIITDNGTQFTGRKFLDFCEDHHIRVDWAVVAHPMTNGQVERANGMILQGLKPRIYNDLNKFGKRWMKELPSVVWSLRTTPSRATGFTPFFLVYGAEAILPTDLEYGSPRTRAYADQSNQASREDSLDQLEEARDMALLHSARYQQSLRRYHA

SEQ ID NO: 55689 - protein, 68 aa, Zea mays
  Coding DNA Sequence Number=SeqID_13910
MAQLTANYETWATLSSPDPESLSPCLALRLRLSLSSGAYDAPQSPSTIATCNFKAGTLAQGASVTPGL

SEQ ID NO: 55690 - protein, 206 aa, Zea mays
  Coding DNA Sequence Number=SeqID_13911
  Gene Ontology: Mol. function=structural molecule activity; Cellular component=chloroplast envelope
  Subcellular localization annotation: CTP_CleavageSite=36; ConfidenceScore=5.61e-01
MAAAHTVQRVKGPASLMVRRVILRRSVSVSPVVHTMCRMIRGSAGLRLNLSAGRKLRTEALLVPSVSSLLLPAPFPDSWELTREVLLPKDGHQEVAEVALQLGKYCIDDPVKSPPGGRRMVIRTAKRMGGCVLLGANLAGRALPDALGRLVFKTDEMVQAVEAPDVVRNKVSFSVFGLEGAVSLKGKLNVLDSKWIQVVFEAPELK

SEQ ID NO: 55691 - protein, 891 aa, Zea mays
  Coding DNA Sequence Number=SeqID_13912
  Homolog annotation: Hit_ID=Q108Z7; Match level="QueryCoverage=98%, HitCoverage=39%, E-value=0.0, Identity=56%"; Hit description =Transcriptional regulator, putative, expressed
MRGRWAWGPQLVDSGLDGCILVLRVCLNQMLLNAGEVKNLQLQQKLLSDVFRYCLHKTCFTTSFCEALATIALTDDFLESLTNLLELSVAEKIGVGLALSDSEDSEMKQKGSHFCMVIDIASSVPGQWFSIAQIEKLCTSHIQSLSNGQIHEIVMFLHQSDGLSKHMDTFNNIISLLKVTERPFFVPVTNGDFDSQANPSRHLEMYFGSTNDDFESLLSEIGKEISMADIVAELGYGFTVDSTHCKEILSIVEPLDDIAISKLLGAVVGTHIGLGEAHNTYATFVSAIRNSHTNDSPQPTKWNTDVLVDSINELAPSTNWVRVIEYLDHEGFNIPDEASFYLLMSIYECACKDPFPLHAVCGSLWENTEGQISFLKHAVCAPSDKFTFAHSSRHLAFQDLAGPSQGNHAWFCLDLLEVLCQLAEVGYTASVRSMLEYPLGHCPELLLVGVSHISTVYNLLQNEVLSCVFPALLKDPTKRNVVNYLWHTNSYLTLQGFVDAHNDPDCLLRIVDVCHDLKECVNFLKATMSNTDYVLEGTTQPQSIVRNIYWESSYAFIKVYMVLQSHSGQLLSDAILDEIRKLCVSFESRNPSSAVRELANSDGGSDDIEVEANAYFQHMFSGQISVDSMIQMLGRFKESTDKREVSIFNCMISNLFKEYTFFPKYPDKQLKIAAVLFACGGSSFEGTSSLPLSLQLESRATTEGSCETGEMFMFGTSALEQFMDRVIEWPRYCNYILQISHLRGTHLEMVSVIERALAKISSSQNEPNVGNLLSAEQHVSGSSSMEGIEASESSWLMGTIPSQLGRPLSSPLQHRQQGLLSERSEVSMNSLNKSNLSSQPPLASSSADLTINSKTTAPPSLLASPHQSISVSTSVHVGFLRSRSTPGGLLA

SEQ ID NO: 55692 - protein, 189 aa, Zea mays
  Coding DNA Sequence Number=SeqID_13913
  Homolog annotation: Hit_ID=Q6QP51; Match level="QueryCoverage=21%, HitCoverage=18%, E-value=4e-12, Identity=82%"; Hit description =Putative growth-regulating factor 1
EDVSASPDPQGSAPRLGLERWSPPRPTPGLGLDLGLRRRSPPRPTLGLGPPPWPRKVVSASPDPRAWPQPRPQEEVSALPDPRARPPPRPRKVVSASPDPRARPQPRPSGGITSSPDPGLDLRRSLRLARPWARTDCATGDASLPYPLASLGYGGTRPASHPGSPRPDSCASTGLKRSSDGHDTAYTGL

SEQ ID NO: 55693 - protein, 220 aa, Zea mays
  Coding DNA Sequence Number=SeqID_13914
  Homolog annotation: Hit_ID=Q8S8T8; Match level="QueryCoverage=50%, HitCoverage=52%, E-value=1e-06, Identity=32%"; Hit description =Expressed protein
  Pfam annotation: Domain name=PLAC8; Domain location=66-202; Score =138.4; E_value=2e-38; Accession=PF04749.7; Description=PLAC8 family
MAEDATSSHPSRYVKLTKDQDAPAEDIRPGELNQPVHVPQQLEGRRCSECGQVLPESYEPPADEPWTTGIFGCTDDPETCRTGLFCPCVLFGRNVEAVREDIPWTTPCVCHAVFVEGGITLAILTAIFHGVDPRTSFLIGEGLVFSWWLCATYTGIFRQGLQRKYHLKEHRERTGRLAENNAVPMTVVNPPPVQEMSMLEEVEEKGAEKSEHDDVEVIPL

SEQ ID NO: 55694 - protein, 584 aa, Zea mays
  Coding DNA Sequence Number=SeqID_13915
  Gene Ontology: Mol. function=nucleic acid binding; Cellular component= intracellular
  Homolog annotation: Hit_ID=Q8GSF4; Match level="QueryCoverage=97%, HitCoverage=65%, E-value=0.0, Identity=71%"; Hit description=SNF2P
  Pfam annotation: Domain name=Helicase_C; Domain location=134-223; Score=76.9; E_value=6.3e-20; Accession=PF00271.21; Description =Helicase conserved C-terminal domain
MGDEANKAKGQFKIIKHVLKAFMLRRTKFLLIESGILALPPLTELTVYGSLLQDGAVDTVTKEALHVIQLRKVCSHPYLFSGIEPEPYVEGEHLIQASGKLIVLDLILKKLHECGHRVLLFAQMTQTLDILQDFLELRNYTYERLDGSVRAEERFAAIRNFSSQSTKGLIRDDNRSEAFVFMISTRAGGVGLNLIGADTVIFYEQDWNPQADKQALQRAHRIGQLNHVLSINLVSQRTIEEVIMRRADRKLKLSHNIIGEEDGTDGKGGDPGIEASDMRSIIFGLHLFDPADTATETIDEDITAETFSVEKLAKLKTMSEKVVMMRSHESSEKDERAFEINPNMTDDSGTVIRRASDSIRIDPGLNEAAYLSWVKKFKEASISSEDATVGFGRQRAAPEEKLLKHDVNKQKIEEKRLAKWESLGYQTLAVKEPDITASQNISDAGSIQFVYGDCTNPSKVCPAKPAIIFSCIDNSGTWGHGGMFDALTSLSTCIPDAYHRASEFDDLHMGDLHLIQLDEGNCTRSLDAPLWVALAIVQSYNPRRKVPRSEISMSDLELCISKAAFSAAQHSDTTFSDDRQIARL

SEQ ID NO: 55695 - protein, 196 aa, Zea mays
  Coding DNA Sequence Number=SeqID_13916
MEFPKRGRAFLQGSLRRSPKATIPGAATGADENASSKHLVPVGAASPKRKKVLGERNDSGVGGMEGAASAPVQQPKLALSPPTPASRDAGPYDPKTNYTTPRPAFLRYDPERRREILLRVSRAAEVMYDDCSSTTSGTAASEEDGGSSLASDAAADSLISSPPLRGGGGACAGFAAWAGEGGGGGGLHFALNSCRD

SEQ ID NO: 55696 - protein, 135 aa, Zea mays
  Coding DNA Sequence Number=SeqID_13917
  Subcellular localization annotation: CTP_CleavageSite=58; ConfidenceScore=5.28e-01
MPQMTTLLPQLSTLLNLHAQAVVVPIIRALVSLFLDVNSTFYARWRGSSRRGGTEGVSASAELVGTAFCLEPWTTPLVEGDWPAWRGPMRRRLEELAEGLGEVACVAAGRSPPLEQQIDLVRRDFNSVGVEAVFG

SEQ ID NO: 55697 - protein, 67 aa, Zea mays
  Coding DNA Sequence Number=SeqID_13918
MPLYNPDEDPKPHYHIGGQLMKPAVWTAAAAIHRDRNTLEAVEAGISTGDQQTAMATIWGFSGNRED

SEQ ID NO: 55698 - protein, 184 aa, Zea mays
  Coding DNA Sequence Number=SeqID_13919
  Subcellular localization annotation: CTP_CleavageSite=26; ConfidenceScore=5.27e-01
MATVRSARAFVMVSIFFSSAALAELVATANATSPVLSSLPGIEQAARLSVITSSINTFWFPLEIYPHGASLILLVYSKEGWQIIRFCIRVGYKMKVDHDHISRSDKIFAMFILLEFLCRQAFLLVVTVESMGSEPILYLRKLRKWFEGRNAVYLRRWSNYDPNLSNRELGHVPRSGNVGTISFQ

SEQ ID NO: 55699 - protein, 217 aa, Zea mays
  Coding DNA Sequence Number=SeqID_13920
  Gene Ontology: Cellular component=extracellular region; Biological process=cellulose and pectin-containing cell wall organization and biogenesis
  Homolog annotation: Hit_ID=Q4PR51; Match level="QueryCoverage=68%, HitCoverage=68%, E-value=9e-61, Identity=65%"; Hit description =Expansin-A14 precursor
  Pfam annotation: Domain name=DPBB_1; Domain location=37-130; Score =106.4; E_value=8.2e-29; Accession=PF03330.8; Description=Rare lipoprotein A (RlpA)-like double
  Pfam annotation: Domain name=Pollen_allerg_1; Domain location=141 -214; Score=34.4; E_value=4.1e-07; Accession=PF01357.11; Description =Pollen allergen
  Pfam module annotation: Pfam domain module=DPBB_1::Pollen_allerg_1; Domain location=37-130::141-214
MATSSVLPAVVLVIVGWALAVAADGIVAANAPSPTGWLRAHATFYGGADASGTMASCGQCYKIACDRKTAPTLCKPGVTVTVTATNFCPPNSALPDGGWCNQQRPHFDMAQPAWENIGSTVSAGIMPVIYQRVPCVRRGGVRFMINGHNYFNLVLVTNVGGAGSIKSMAVKSSDSTDWMPMEVFKNLSNEEQAPHRQRTREAKNQQENTLYVFELCQ

SEQ ID NO: 55700 - protein, 103 aa, Zea mays
  Coding DNA Sequence Number=SeqID_13921
MGRMFDERPPTIGVEGHIVGIEKNFTEKNMKMRILVSAMDSIFSALVVEDVVEVATLISIIRMEGIVQPVADVIITDVLIGNIILIIVIEMTQIILPSLVGYS

SEQ ID NO: 55701 - protein, 268 aa, Zea mays
  Coding DNA Sequence Number=SeqID_13922
  Gene Ontology: Mol. function=DNA binding; Cellular component=nucleus; Biological process=regulation of transcription, DNA-dependent
  Homolog annotation: Hit_ID=P92986; Match level="QueryCoverage=36%, HitCoverage=72%, E-value=1e-33, Identity=72%"; Hit description =Snapdragon myb protein 305 homolog
  Pfam annotation: Domain name=Myb_DNA-binding; Domain location=17-57; Score=21.5; E_value=0.0031; Accession=PF00249.21; Description=Myb -like DNA-binding domain
MEGQFAGWGREEGGWRKGPWTAQEDKLLVEYVRQHGEGRWNSVAKLTAKRQRAAGFGGVNYLRPGPEERQDHAAGGERHTPPPRHVGKQVVDDRAQPAGTDGQRDQELLADALQQKGKPSKNIERARARFLKQRREMQSQQLLLQGQAQQQEEEEEKRPDHDDGPEAAPAVSLARQLEEDLRRMLQQDMDDLMFQFCPMASSCLLPRGSGCTSVSASASEEGSSGDHHQLDGSATWDWGSLWNLDDVVDGGAWDSSSPLLQDQGLAFY

SEQ ID NO: 55702 - protein, 85 aa, Zea mays
  Coding DNA Sequence Number=SeqID_13923
MQVEEIFESAPSRSALVLLWLDISELCHVFKMRGDIGGSDCSVATKLVSCSIILQGRHWMVRPWVNWRMRLRVGRVVGFVVARLG

SEQ ID NO: 55703 - protein, 77 aa, Zea mays
  Coding DNA Sequence Number=SeqID_13924
MPRNMVNRGLYPSRDLRRGLPFRLWWVQVRSLHDGQSGSVRHCSLEEMVAGITWPSTLPPGWTVEWDPASAEEEHEE

SEQ ID NO: 55704 - protein, 108 aa, Zea mays
  Coding DNA Sequence Number=SeqID_13925
  Subcellular localization annotation: CTP_CleavageSite=43; ConfidenceScore=5.07e-01
MAAQEAVPIVAIGSQVEISLVGLEAWSTRSFSPTTSTSPDGPSSSKKSRISNEIEVVVAVVIPQLLRDNVDPTGARLLRRYAWSICHAARKVDGALFEPELSRRTVRP

SEQ ID NO: 55705 - protein, 120 aa, Zea mays
  Coding DNA Sequence Number=SeqID_13926
ESRAGGVNVVAEQLRDDDGNDHLDLIGNPGDVAQLQGAGYADHPLPLGIAEGPLDDLKQGRRLAHLDFFDDEGPSGEVEVVGEKDRVLQASSPTRLISTWLPMATIGTASWAAMASHLYG

SEQ ID NO: 55706 - protein, 131 aa, Zea mays
  Coding DNA Sequence Number=SeqID_13927
MYHLTLALLNAGGGEEGGDQFLLTRKSREGLPADAAGQAASDGERRRAKAGGVVALPRGEWREVHGVLASAAIAEPTYAAHYHVGSGPGCPRPPLAAEPGRKLRRRDCLNVYVSGVSGAVAWAKDEPRSSE

SEQ ID NO: 55707 - protein, 284 aa, Zea mays
  Coding DNA Sequence Number=SeqID_13928
MVQGFGGFRREREREKKGGERIGERKELAGGGGGLGEASQGEGAAEREVTTVPVARDSRRGRAQTEAPGHDAKRSRAAQADTNGHPDAGTWAAGYAPHHECRGHARLPLGEGLGSAGPGGLRACRASAKPSTASGEEERDGERKGASLPRINEGRVQGNFRQAQDFTSCDELDEGESRAQLTLSGRRGSTASFGVASVLRTVAREGERSEEPHGVAEGRVHDAVERAGVERGMERAHWAAWGMAEPWARARAPAGRPGEAGGTAAAPMRMRACRGTVAAGEGAA

SEQ ID NO: 55708 - protein, 98 aa, Zea mays
  Coding DNA Sequence Number=SeqID_13929
MNGHPDAGTRAAGYTPRYECRGHARLSLGEGLGSVGPNGLRARRASAKPSTARGEEERDGERKGASSPRINEGRVLGNFRQAQDFRPCDELDEGESRA

SEQ ID NO: 55709 - protein, 171 aa, Zea mays
  Coding DNA Sequence Number=SeqID_13930
MNVVVTSHLPVCLYSAAAFENKSPTLSLACGIFLQVHKGSTQTNKKIKLGFKKKGAKETEGCPGLAHRTQTVSAAPGPYKSKLFTFGFQKRRSAIIHRTVRCATGLSGAPAKQRLTSATIACKATVRGQFTQKSEQLPEAHRTVNSTCPVRHQTVRCHQKTKLQRSKPSKP

SEQ ID NO: 55710 - protein, 223 aa, Zea mays
  Coding DNA Sequence Number=SeqID_13931
  Subcellular localization annotation: CTP_CleavageSite=48; ConfidenceScore=5.22e-01
MRGPLLGLCGARRVQQNGSPTVWVHCPASIALASPLISGSLPSSLSPRATRNKPCARRAQTADLARGFRVVGQSRAEFGTDTAAVNCGLDPERGALGYISVGRRKHQLVQGGKRSRESRARRTENVCASPPRASAYSSKWTPIWALGDRAGHGEAIRGHNRSVVTGDRVNPSPELAIRRASRATSLGSPLRAVDRFINGQDLKIGVPRLMPVSTVGSSANVWD

SEQ ID NO: 55711 - protein, 221 aa, Zea mays
  Coding DNA Sequence Number=SeqID_13932
  Subcellular localization annotation: CTP_CleavageSite=41; ConfidenceScore=5.22e-01
MKGIKTSKESNHSSEASGATPRRENSAACAAPTVVPPVRVRLTATKTGLRRHRKLRLARPSGLGLDLDLGRRSPPRPTLGLELYLDLGRRSPPRPTPRAQTQPRPRTTDSASPDPRARTQPRPRTTVSALPAPRARTLPRPRKTVSASPDPRGSDSTSTSDDGLRLARPPGLGINLDLGRRSPPRPTPGPGLILDLGGASAPPDLGLGPTMSQGGPSLPYP

SEQ ID NO: 55712 - protein, 133 aa, Zea mays
  Coding DNA Sequence Number=SeqID_13933
MEKTTRQTRWRGCGHETDVREGETAGKKLRAGQGNSSEEFRPPGEAIDRDRARASSSGGGGALWANTGALDGVRLAEHRASTARKRDRTLARPNWLQGFQFKFKSSFQIQTNSNMCNNSKNIQTQHDATCQDP

SEQ ID NO: 55713 - protein, 195 aa, Zea mays
  Coding DNA Sequence Number=SeqID_13934
  Gene Ontology: Mol. function=glutathione transferase activity; Cellular component=cytoplasm; Biological process=aromatic amino acid family metabolic process
  Homolog annotation: Hit_ID=Q9FQC1; Match level="QueryCoverage=98%, HitCoverage=100%, E-value=5e-77, Identity=67%"; Hit description =Glutathione S-transferase GST 18
  Pfam annotation: Domain name=GST_C; Domain location=69-177; Score =31.2; E_value=3.7e-06; Accession=PF00043.15; Description=Glutathione S-transferase, C-terminal domain
  Pfam annotation: Domain name=GST_N; Domain location=4-74; Score=69.5; E_value=1.1e-17; Accession=PF02798.10; Description=Glutathione S -transferase, N-terminal domain
  Pfam module annotation: Pfam domain module=GST_C::GST_N; Domain location=69-177::4-74
MAASKPILYSAWISSCSFRVRIALNLKGVDYEYRAVTRNDLDYEKINPIKYVPALVDGDFVVSDSLAIILYLEDKYPQHPLLPQDLKKKAINLQGLLDGTLGSNQSLQIVRNYTDKGFKAIEKLLEGCDSKYATGDEVQLADVFLAPQMYAGVTRFGIDMSKYPLLERFYKAYMEIPAFQVAVPEKQPDAPASPY

SEQ ID NO: 55714 - protein, 55 aa, Zea mays
  Coding DNA Sequence Number=SeqID_13935
MERTSTVEVVAEVVDVARAAAAAVEARCVAIAADKEASVAVRSSMGAEDVFCEAW

SEQ ID NO: 55715 - protein, 219 aa, Zea mays
  Coding DNA Sequence Number=SeqID_13936
  Gene Ontology: Mol. function=4 iron, 4 sulfur cluster binding; Cellular component=intracellular; Biological process=base-excision repair
  Homolog annotation: Hit_ID=Q2QW21; Match level="QueryCoverage=99%, HitCoverage=47%, E-value=2e-57, Identity=55%"; Hit description=A/G -specific adenine glycosylase family protein
  Pfam annotation: Domain name=HhH-GPD; Domain location=91-217; Score =49.1; E_value=1.5e-11; Accession=PF00730.15; Description=HhH-GPD superfamily base excision DNA repair protein
MAKNPKAPDTRSGRSPTRRPRPRRAKAVPEASSAADIEDLAPSVPGAAAPGAAAPTALRAQLLRWYDAHRRDLPWRCVSGSEEERAYAVWVSEVMLQQTRVPVVVAYYERWMARWPTVRSLAAATQEEVNEMWAGLGYYRRARFLLEEWMISICGLWSIFFMMEKQGAKQIIEKGLFPCTALALREVVPVVDGNVIRVISRLYTIADNPKESSTVKRFW

SEQ ID NO: 55716 - protein, 234 aa, Zea mays
  Coding DNA Sequence Number=SeqID_13937
  Subcellular localization annotation: CTP_CleavageSite=23; ConfidenceScore=5.17e-01
MTVGGGCLSYGAPDSPVHTGHVRRQSRSDRSHFAAPLTGLTEGQRRLRRSDCCATRQSEADRQSGPASGTIGNSTSPDPGLGLGLSPGRRRTPLRPTQGSDSGSAPEDGELRSARPRARTRAQPRKTANSAPPNPGLGLGLSPERRQTPLRPTQGSDSGSAPEDDELRSARPRARTRAQPRKTTNSVSPDPRARTQPWPQPTVSASPDPGARTRPRPRKTDLTSTSEEPPHRPT

SEQ ID NO: 55717 - protein, 90 aa, Zea mays
  Coding DNA Sequence Number=SeqID_13938
  Subcellular localization annotation: CTP_CleavageSite=29; ConfidenceScore=5.57e-01
MAPHTLYDDSGSQSPYGSKRTSARTRQPRQLSFRQAPALLRRPRHHTNRVPKPLRLPRWHEQYASVREIQWGTFRKYSGDRRNSVSWNYK

SEQ ID NO: 55718 - protein, 796 aa, Zea mays
  Coding DNA Sequence Number=SeqID_13939
  Homolog annotation: Hit_ID=Q10NU9; Match level="QueryCoverage=19%, HitCoverage=30%, E-value=9e-10, Identity=27%"; Hit description =Expressed protein
  Pfam annotation: Domain name=DUF292; Domain location=98-252; Score =82.7; E_value=1.1e-21; Accession=PF03398.5; Description=Eukaryotic protein of unknown function, DUF292
MPHESMPCGVHARSSFGRPASASAALRASHHLLCHWLKAEGGAVGEEPKRREQREAQERGPPTTEGAGQDVRQSAQLQVLQQMVQESSLPVRKHAIKCTRTRLDLLRRKKQAMVKFLKKDVADLLTSGLESHAFARWHRTGRIYVGFSKLNRTEEPMTKCRRHVMVFVMMEGLIIEMNQASCYDTIEEYCEYIVKQLSHMQKESECPQEALEAVSTLIFAAARFPDLPELCDLRHIFTERYGSSVEPFVNSEFVQNLQNKSFTDEEKLRVMKRVAEEFSVPFDSRALQWKITCGSQNKHDLPKKSSLKHDMERDGHKVDRHAVHERKSKAMPEGYEQKQEMNVKPKDIHVVPDGIGQLGEKNRKNYSDKPSERRHVDNPLPPLDMKEKNGQKEMKKSGKKDSDRRRELMDVEVLDINGLKKQDVGAMKPSGGPDRSWGHADLGLKTLGIEKQEIDPISTLNGKAVNKPPPYSKPYRAPMGEKVAEDRQPVPEKATNMRPPYVKPNFEKHANQGANGHKQSGTEETIYQKREPIYDPVSVRSRVPRPPAHADEYAGMEEKMANQAPDGRRRHSSKRNGAHDNHDQRVAHVVPPLEGMGVDDDINNARPFHRVPSERRKHKSRQNGSTSGSDYNWASEGHESDGDDVNTSIDFGNLLPRAPSSHRKHRSRSADPRKAGGRGDDEERMMDKLLMHYSKKGLDREERKERANKSRTLFPRDDQRGDGAGELSSKGGGASAHRPERAASLPSESASPKAKAKAKPPARSMSMQPEMSRGNVHPSMPDFDELAARISALRNA

SEQ ID NO: 55719 - protein, 716 aa, Zea mays
  Coding DNA Sequence Number=SeqID_13940
  Gene Ontology: Mol. function=protein binding; Cellular component =integral to membrane; Biological process=protein amino acid phosphorylation
  Homolog annotation: Hit_ID=Q67TW5; Match level="QueryCoverage=94%, HitCoverage=93%, E-value=0.0, Identity=53%"; Hit description =Putative Phytosulfokine receptor
  Pfam annotation: Domain name=LRRNT_2; Domain location=39-78; Score =37.2; E_value=5.7e-08; Accession=PF08263.3; Description=Leucine rich repeat N-terminal domain
  Pfam annotation: Domain name=LRR_1; Domain location=106-125; Score =9.5; E_value=4.7; Accession=PF00560.23; Description=Leucine Rich Repeat
  Pfam annotation: Domain name=LRR_1; Domain location=130-151; Score =9.7; E_value=4.5; Accession=PF00560.23; Description=Leucine Rich Repeat
  Pfam annotation: Domain name=LRR_1; Domain location=155-178; Score =5.8; E_value=23; Accession=PF00560.23; Description=Leucine Rich Repeat
  Pfam annotation: Domain name=LRR_1; Domain location=180-199; Score =7.6; E_value=11; Accession=PF00560.23; Description=Leucine Rich Repeat
  Pfam annotation: Domain name=LRR_1; Domain location=205-227; Score =12.3; E_value=1.4; Accession=PF00560.23; Description=Leucine Rich Repeat
  Pfam annotation: Domain name=LRR_1; Domain location=229-252; Score =7.7; E_value=10; Accession=PF00560.23; Description=Leucine Rich Repeat
  Pfam annotation: Domain name=LRR_1; Domain location=253-276; Score =12.4; E_value=1.4; Accession=PF00560.23; Description=Leucine Rich Repeat
  Pfam annotation: Domain name=LRR_1; Domain location=278-300; Score =14.3; E_value=0.43; Accession=PF00560.23; Description=Leucine Rich Repeat
  Pfam annotation: Domain name=LRR_1; Domain location=302-324; Score =15.3; E_value=0.21; Accession=PF00560.23; Description=Leucine Rich Repeat
  Pfam annotation: Domain name=LRR_1; Domain location=326-349; Score =11.4; E_value=2.1; Accession=PF00560.23; Description=Leucine Rich Repeat
  Pfam annotation: Domain name=LRR_1; Domain location=351-373; Score =13.6; E_value=0.7; Accession=PF00560.23; Description=Leucine Rich Repeat
  Pfam annotation: Domain name=LRR_1; Domain location=375-397; Score =9.2; E_value=5.5; Accession=PF00560.23; Description=Leucine Rich Repeat
  Pfam annotation: Domain name=LRR_1; Domain location=399-420; Score =7.1; E_value=14; Accession=PF00560.23; Description=Leucine Rich Repeat
  Pfam annotation: Domain name=LRR_1; Domain location=451-473; Score =1.7; E_value=1.3e+02; Accession=PF00560.23; Description=Leucine Rich Repeat
  Pfam annotation: Domain name=LRR_1; Domain location=475-497; Score =14.5; E_value=0.4; Accession=PF00560.23; Description=Leucine Rich Repeat
  Pfam annotation: Domain name=LRR_1; Domain location=499-521; Score =12.0; E_value=1.6; Accession=PF00560.23; Description=Leucine Rich Repeat
  Pfam annotation: Domain name=LRR_1; Domain location=552-574; Score =7.7; E_value=11; Accession=PF00560.23; Description=Leucine Rich Repeat
  Pfam annotation: Domain name=LRR_1; Domain location=576-598; Score =11.6; E_value=1.9; Accession=PF00560.23; Description=Leucine Rich Repeat
  Pfam annotation: Domain name=LRR_1; Domain location=600-622; Score =21.5; E_value=0.003; Accession=PF00560.23; Description=Leucine Rich Repeat
  Pfam annotation: Domain name=LRR_1; Domain location=624-656; Score =3.5; E_value=64; Accession=PF00560.23; Description=Leucine Rich Repeat
  Pfam annotation: Domain name=LRR_1; Domain location=82-104; Score =2.5; E_value=96; Accession=PF00560.23; Description=Leucine Rich Repeat
  Pfam module annotation: Pfam domain module=LRRNT_2::LRR_1::LRR_1::LRR_ 1::LRR_1::LRR_1::LRR_1::LRR_1::LRR_1::LRR_1::LRR_1::LRR_1::LRR_1: LRR_ 1::LRR_1::LRR_1::LRR_1::LRR_1::LRR_1::LRR_1::LRR_1::LRR_1;
  Pfam module annotation: Domain location=39-78::106-125::130-151::155 -178::180-199::205-227::229-252::253-276::278-300::302-324::326 -349::351-373::375-397::399-420::451-473::475-497::499-521::552
MQPLQYSYNNRKSEMLHIPLLGVSLVLLLFLASPASSCKEEEKTSLFEFLNGLSQASGLTSSWQNDTNCCLWEGVICNGDRTIIDISLAAMGLEGHISPSLGNLNGLLKLNLSGNLLSGGLPSTLLLSSSITVLDVSFNKLSGEFHELQSTPNSAMKVMNISSNFLTGYFPSTTLEGMKNLAALNMSNNSFAGEIPSTICVDKPFFVVLDLSYNQFVGRIPSELGNCSGLKVLKAGQNQLNGTLPSEIFNVTSLEHLSFPNNHLQGTLDPECIGKLRNLVILDLGWNGLNGKIPNSIGQLKRLEELHLDNNNMSGELPPALSSCSNLTTIILKDNNFQGDLNHVNFSTLSNLKFLDCRSNKFTGTIPESLYSCSNLIALRLSFNNLHGQFSSGINNLKSLRFLALAHNSFTNIRNTLQILSKSRTLTLVLIGGNFKHETMPDDDEFHGFENLMGLGINKCPLYGKLPNWLAKLKNLRALLLDDNKLSGPIPAWINSLNLLFYLDISNNNLTGDIPTALMEMPTLEAAHSAPIILKFPVYLAPFLQYRTTSGFPKMLNLGNNKFNGIIPPEIGQLQALLTLNLSFNNLHGEIPQSVGNLTNLQVLDLSYNNLTGEIPSVLERLHFLSKFNISSNDLEGPVPTGGQFSTFPDSSFFGNPKLCGATLMRHCNSADAVPVTDVSTEEYADKVIFAVAFGMFFGVGVLYDQMFLFRYIYFG

SEQ ID NO: 55720 - protein, 111 aa, Zea mays
  Coding DNA Sequence Number=SeqID_13941
  Homolog annotation: Hit_ID=Q3LRV2; Match level="QueryCoverage=51%, HitCoverage=42%, E-value=2e-11, Identity=42%"; Hit description=Gag
  Subcellular localization annotation: CTP_CleavageSite=20; ConfidenceScore=5.05e-01
MARLASASWWPGAVGQGALGCAALQGPGRVGSRGRKNNERTPSKEAGDKYKEESPSSTKYTTSKRQERKKYSKIPLRYPRIPKHAPLLPVPQVGDEDYDSDEAAQIRHFNS

SEQ ID NO: 55721 - protein, 146 aa, Zea mays
  Coding DNA Sequence Number=SeqID_13942
MSPPAGVPPLLQLAAALGELRQRLPLHDRHTQRWRGRDIANTAGGGGLGSPYTALVAASSIEGQYSVVRSDSSGCAELGGSGSGRGCGLDQGVAGSAAAAWVEAKPMRRSVPGSPTSASMLTSLATAAAETLVISHTAAVGKGWIE

SEQ ID NO: 55722 - protein, 178 aa, Zea mays
  Coding DNA Sequence Number=SeqID_13943
MATDEFHVHLRRPQTTPRDRTSVNQDSAACAAPTAVPLDRVRLTAAKSGLGRHRKLRLARPQGSDSASAPKDDELRLARPLDSDSVSAPEDEELRLARPQGSDSASAPEDDELRLARPQGSDSALASADGLRLVRPKGSDSTSTSEDRLDLDLRGASASPYPGLGPTTSQEGPSLPYP

SEQ ID NO: 55723 - protein, 104 aa, Zea mays
  Coding DNA Sequence Number=SeqID_13944
  Homolog annotation: Hit_ID=Q5N9G9; Match level="QueryCoverage=40%, HitCoverage=5%, E-value=3e-08, Identity=67%"; Hit description =Putative mitotic checkpoint protein
  Subcellular localization annotation: CTP_CleavageSite=77; ConfidenceScore=5.51e-01
MADLPPHPHPNHSLLMASTIPFVGAASMVGPSSLIIGPYSVSFLLPTLASASFSRVVSEDKRMQLLDKLKYMERELVATKGWESALQERLLKELGDYQGRIVVK

SEQ ID NO: 55724 - protein, 58 aa, Zea mays
  Coding DNA Sequence Number=SeqID_13945
  Homolog annotation: Hit_ID=Q10MS6; Match level="QueryCoverage=98%, HitCoverage=34%, E-value=9e-12, Identity=75%"; Hit description =Expressed protein
MDEIMNKVGVYWMGPPANKEISAGDDLEVFTLDQCRGWSGMAGEKVEGQDAEATGGPA

SEQ ID NO: 55725 - protein, 131 aa, Zea mays
  Coding DNA Sequence Number=SeqID_13946
MTIIYRQLLTALCRASPFAECSVLAECLSVSRVLLSVKVVITESVTLPSVALDKVFFTECPTKSTRQSAKHSVKSQIPVVPGRPTRADERVDLDAHGAGVDGEGDGAHPLLRHPTSTEGRQRGKPTPLPGL

SEQ ID NO: 55726 - protein, 470 aa, Zea mays
  Coding DNA Sequence Number=SeqID_13947
  Gene Ontology: Mol. function=metalloendopeptidase activity; Biological process=proteolysis
  Homolog annotation: Hit_ID=Q84NY6; Match level="QueryCoverage=42%, HitCoverage=36%, E-value=2e-54, Identity=77%"; Hit description =Hypothetical protein OSJNBb0016P23.2 (Os03g0579000 protein) (Membrane- associated zinc ...
  Homolog annotation: Hit description=metalloprotease family protein, expressed) (Putative sterol-regulatory element binding protein (SREBP) site 2 protease)
  Pfam annotation: Domain name=Peptidase_M50; Domain location=314-424; Score=-6.8; E_value=0.00029; Accession=PF02163.12; Description =Peptidase family M50
  Subcellular localization annotation: CTP_CleavageSite=29; ConfidenceScore=5.08e-01
MAFYGVTPSRAIARRLRLVHTTQPLSPLRSLTVKSTPQTPSLQECQIIHCGLFLLFLRPSHHDCHPSLPSPQAVPPFLKIPLVPLRSDTVAVCSLSCSKRRSLGASEVVIRQADSRGQSAAQAVTFPHPLRPPSSCSRPSFAPQSITTPQPHPANPSSQSHYAPEPRTLSRCLLYLMRWLPRCRRQTRSGQPCQAPPGNRCEAPREAAQAWAGCGEPVRSLRRAPAFLSRFAPDDPDLFRNRPVPDRLLVVSAGVTANLAFTFLVVYAQALTVGVPMQAQLPGVLVPEVRPGSTMDAVQAAERALTEARPTSPARSRGIHVSQFSIGFGPALARFCLGPVEYALRAIPLGGYVGFPDDDPESGFAPDDPDLLRNRPVPDRLLVVSVGVTANLAFAFLVVYAQALTVGVPVQAQLPGVLVPEVRPGSAMDVVQAAERALTEARPTSPARSRGGGLAMDADDTEAGGRVMRM

SEQ ID NO: 55727 - protein, 310 aa, Zea mays
  Coding DNA Sequence Number=SeqID_13948
  Gene Ontology: Cellular component=chloroplast thylakoid membrane
  Homolog annotation: Hit_ID=Q6H444; Match level="QueryCoverage=53%, HitCoverage=57%, E-value=6e-56, Identity=70%"; Hit description =Rhodanese family protein-like
  Pfam annotation: Domain name=Tim17; Domain location=4-115; Score=5.2; E_value=0.003; Accession=PF02466.9; Description=Tim17Tim22Tim23 family
MEGSNLKGLVDDEIVVKTGKAAGIGLAFGSVYGALHSMLFDGPQVGNNVKYPQLIRTTKALARYRMKKDIINGAVAGFAAGASLGFSAGSFRAAFFSGSAVALTSVVLDRFLDSRKDQAGWPTCRDQLVSISKEQEELRGSGSGGGTIVKRQLHNNFAGLFFGLPFTKLNPDFALTVKDKFSPESKLLVVCQEGLRSAAAADALEKEGFQNIACITSGLQTVKPGTFESVGKSELQNAGKAGLVTIQGKISVVLGTVLISKIIGLPSFRDNQMYQLITLSYGRSCAGAYLFITFFPDQAEKLFDLAGISL

SEQ ID NO: 55728 - protein, 313 aa, Zea mays
  Coding DNA Sequence Number=SeqID_13949
  Gene Ontology: Mol. function=nucleic acid binding
  Homolog annotation: Hit_ID=Q6H443; Match level="QueryCoverage=67%, HitCoverage=84%, E-value=1e-65, Identity=65%"; Hit description =Putative plastid-specific ribosomal protein 2
  Pfam annotation: Domain name=RRM_1; Domain location=170-241; Score =63.5; E_value=6.9e-16; Accession=PF00076.12; Description=RNA recognition motif. (a.k.a. RRM, RBD, or
  Pfam annotation: Domain name=RRM_1; Domain location=71-142; Score =108.1; E_value=2.5e-29; Accession=PF00076.12; Description=RNA recognition motif. (a.k.a. RRM, RBD, or
  Pfam module annotation: Pfam domain module=RRM_1::RRM_1; Domain location=170-241::71-142
  Subcellular localization annotation: CTP_CleavageSite=52; ConfidenceScore=5.70e-01
MATAISSLVTPPTLHRRCLGPACVSVSVCTPIRISFRPAAAPQVSRRGSALRVSASSAVLEAPEAVAARKLYVGNIPRTVTNDELRDMFAAHGTVERAEVMYDKYTNRSRRFGFVTMSTAEEANAAVEALNGTEVGDRKIKVNVTESFLPNIDRSAPEPEALFVDSQYKVYVGNLAKTVTTEVLKNFFSEKGNILSATVSHIPGTSKSKGYGFVTFSSEEEVEAAVATFNNAVYKALNMSGVTPDTSRNMCPVPYRSLHRIGHCTGYLEFGAISAIAPDTWSSTVGNGKFQHLADMDTPGVFGGIIKVIDEYT

SEQ ID NO: 55729 - protein, 141 aa, Zea mays
  Coding DNA Sequence Number=SeqID_13950
  Subcellular localization annotation: CTP_CleavageSite=59; ConfidenceScore=5.12e-01
MGNGPYLGMLFWGFGTTSGAPSRRHDGRGLPASSGGGDCARERLGVSEMRQGERVSALRAQKGAREHGARHGLLSRCACAPGVNGGCGEDRADMAGPRCRDEGAQGGTTLTGQAYDAESGEAHAAGEIGADRTSYMDQVMC

SEQ ID NO: 55730 - protein, 248 aa, Zea mays
  Coding DNA Sequence Number=SeqID_13951
  Homolog annotation: Hit_ID=Q6QP51; Match level="QueryCoverage=18%, HitCoverage=20%, E-value=3e-09, Identity=65%"; Hit description =Putative growth-regulating factor 1
MEAQAHTSCNRLAGCYVRATAPPLAPLPRLLDYGTGRRSKRRFAFAIITASKKGPGKGDTPKRILLREGNRPRASLLIRGSKAGPSEGFNGRLRALGFCAHYWSEVRWLAPRKGSTAASGHSGSTPTTDQGAACAAPTAEPLDRVRLTAAKSGLRRHRKLRFARPQGSDSGSAPEDGELCSARPRARTRAQPRKTTDSASPDPRARTRAQPWPMPTVSALSDPGARTRPRPWKTDSTSTSEEPPPRPT

SEQ ID NO: 55731 - protein, 76 aa, Zea mays
  Coding DNA Sequence Number=SeqID_13952
MPESESVRLPRRLLPCSLAGFVEPEGMESDRGLNGGGRAAGNIGNDSRAGEETDKIDIMQFKVTNHEDIVEPTPQY

SEQ ID NO: 55732 - protein, 482 aa, Zea mays
  Coding DNA Sequence Number=SeqID_13953
  Gene Ontology: Mol. function=carboxypeptidase activity; Cellular component=membrane; Biological process=auxin mediated signaling pathway
  Homolog annotation: Hit_ID=Q10RR0; Match level="QueryCoverage=71%, HitCoverage=91%, E-value=1e-150, Identity=74%"; Hit description =Integral membrane protein DUF6 containing protein, expressed
  Pfam annotation: Domain name=DUF6; Domain location=275-404; Score =66.1; E_value=1.2e-16; Accession=PF00892.11; Description=Integral membrane protein DUF6
  Pfam annotation: Domain name=DUF6; Domain location=99-232; Score =22.6; E_value=0.0014; Accession=PF00892.11; Description=Integral membrane protein DUF6
  Pfam annotation: Domain name=TPT; Domain location=266-404; Score= -10.3; E_value=0.0022; Accession=PF03151.7; Description=Triose -phosphate Transporter family
  Pfam module annotation: Pfam domain module=DUF6::DUF6::TPT; Domain location=275-404::99-232::266-404
  Subcellular localization annotation: CTP_CleavageSite=45; ConfidenceScore=5.39e-01
EPQSLTLRRSLVSSGVSVNSSSRSQGRRRGEQSRDSEMLCRRLAVAAVVACVTGWERIEQRGRGRNIMAEREVVEGGTTTGGGLWRRYAPHVQMVLAQLCYTLMYFITEAAFNQGLNPYVYITYRHLLVAVLIWPFAYYLEKGLRPKMTLMLFVEIFVLSLLGVSLTLNMYFTSLKYTSPTFVTSVVNTIASMTFVIAIILRMEIVDVKSLRGVAKVAGTVVSFAGVTTMTLYKGAAITSLWKSPVQIAGSGSGGGGVAHDSWVKGSVLAVASCVCWSIWYIMQASSLKRYPAQLSLTAWMCTVGGIQSTVFTLFMQHEPEEWRIGFGVKFWSIVYSGLACNGFTVFVQLWCTEKKGPVFVTMFNPLSTIMVAILAYFIFGENLYVGSIVGGGVVILGLYMLLWGKEKDQERGTGKEREQLETDCEKQAKKVSDCVYEAPKTTNRRDEGLGAVNHRHGAGSRLLCPGGVLQNARAGTAPSTS

SEQ ID NO: 55733 - protein, 283 aa, Zea mays
  Coding DNA Sequence Number=SeqID_13954
  Gene Ontology: Mol. function=isomerase activity; Biological process =cell redox homeostasis
  Homolog annotation: Hit_ID=Q5EUC3; Match level="QueryCoverage=99%, HitCoverage=100%, E-value=1e-133, Identity=79%"; Hit description =Adenosine 5'-phosphosulfate reductase 7
MTRVLLPLLLLLALPGAYARPARQYLGQCPGLEYGLPPFAAALRATCPVSTEGYWPPYELFKRLMHMGPSWNDSKIHSVVVSGEELLRMLDGKEKHTAVLFYASCILSRYHVRALPSIIIARNSHVFWPLGSKDLDSLVSLYTAATGEEPVAYIGSRKWSAAQSTDGYAKAWNSSIISETVKREPYLALSILFICMRVFFFFFPKSFALIQDLWTGYREQINLGILGRLAQLLECVPHAVDVRKVWSKLRLVVGANENGRVWAALTSLPLGGRPSPIHGLLLD

SEQ ID NO: 55734 - protein, 187 aa, Zea mays
  Coding DNA Sequence Number=SeqID_13955
MACDHSHTTVSRLSLEMRKEELLPVEEKISELSESQSELLGRLRGLKEDLLSWRSNLDSQVTKYKVGSFRIVKELSDIKSALNNEIEQLRSDFQELRTTLKKQQEDVSLSLKNLGLQDATENDGNKGNGDGTNEVLSANLGNLKLDGSSENYDESRESKEDKVLDGSKQSLRCEGPNMLWHIEHLQC

SEQ ID NO: 55735 - protein, 108 aa, Zea mays
  Coding DNA Sequence Number=SeqID_13956
MVLTLGRRSGELGSVNSGDRRGNDDAEQLTGWGGGPGTTWANAPRGRNDLGRLRGEGMTGGGWALGERAADGRARPIEEGAPDGPQDEDWATRSWRGMPVGRGTGPGR

SEQ ID NO: 55736 - protein, 439 aa, Zea mays
  Coding DNA Sequence Number=SeqID_13957
  Gene Ontology: Mol. function=acyl-CoA binding; Cellular component =intracellular; Biological process=lipid transport
  Homolog annotation: Hit_ID=Q2QP63; Match level="QueryCoverage=91%, HitCoverage=84%, E-value=1e-162, Identity=66%"; Hit description =Kelch motif family protein, expressed
  Pfam annotation: Domain name=Kelch_1; Domain location=159-205; Score =21.5; E_value=0.003; Accession=PF01344.15; Description=Kelch motif
  Pfam annotation: Domain name=Kelch_1; Domain location=211-256; Score =13.6; E_value=0.11; Accession=PF01344.15; Description=Kelch motif
  Pfam annotation: Domain name=Kelch_1; Domain location=261-306; Score =23.9; E_value=0.00059; Accession=PF01344.15; Description=Kelch motif
  Pfam annotation: Domain name=Kelch_1; Domain location=58-103; Score =37.7; E_value=4e-08; Accession=PF01344.15; Description=Kelch motif
  Pfam annotation: Domain name=Kelch_2; Domain location=159-205; Score =30.2; E_value=7.3e-06; Accession=PF07646.5; Description=Kelch motif
  Pfam annotation: Domain name=Kelch_2; Domain location=210-256; Score =20.9; E_value=0.0045; Accession=PF07646.5; Description=Kelch motif
  Pfam annotation: Domain name=Kelch_2; Domain location=261-306; Score =10.7; E_value=1.5; Accession=PF07646.5; Description=Kelch motif
  Pfam annotation: Domain name=Kelch_2; Domain location=58-103; Score =42.0; E_value=2e-09; Accession=PF07646.5; Description=Kelch motif
  Pfam module annotation: Pfam domain module=Kelch_1::Kelch_1::Kelch _1::Kelch_1::Kelch_2::Kelch_2::Kelch_2::Kelch_2; Domain location=159
MGSAILNSIAPEEPKVVVPEYGETADIQDKEVSMEQLCSISTYDQWTPLSVSGQLPKPRYKHGAVVIQQKMYVFGGNHNGRYLGDIQVLDFKTLSWSKLEAKSQAEPSESAGAVPFSACAGHSVCLSSYFLCAFMTVKEFDPQTCTWSTLRTYGRSPSSRGGQSVTLVGDTLVVFGGEGHGRSLLNDLHILDLETMTWDEFETTGTPPSPRSEHAAACFAERYLLIFGGGSHSTCFSDLHLLDTQTMEWSRPKQQGVTPESRAGHAGVTIGEYWFITGGGNSRKGVSDTLVLNLSTYEWSVLTNLEARAPPAYALKASLKPSVPSQQINESDTNGFSPLSVAENSSRKVIFEIEELKDEKPGNRADNSKTLGQVVMVEQNEIENRLNQEHLQSLRLKQELTGLENRNAELTEASYISLTKLCKTAENVDNIYLQATTNA

SEQ ID NO: 55737 - protein, 90 aa, Zea mays
  Coding DNA Sequence Number=SeqID_13958
MVGHKDHNNVAPDIITRLTNSPAAEYEKLEDHMKMMDETFQRQKAQIEKMTEKWYLSKFRIDRHQKVVKEREIKHDSLLALLRQLPTALK

SEQ ID NO: 55738 - protein, 509 aa, Zea mays
  Coding DNA Sequence Number=SeqID_13959
  Gene Ontology: Mol. function=transporter activity; Cellular component= integral to membrane; Biological process=transport
  Homolog annotation: Hit_ID=Q49B42; Match level="QueryCoverage=96%, HitCoverage=96%, E-value=0.0, Identity=72%"; Hit description =Inorganic phosphate transporter 5
  Pfam annotation: Domain name=MFS_1; Domain location=28-446; Score =72.2; E_value=1.6e-18; Accession=PF07690.6; Description=Major Facilitator Superfamily
  Pfam annotation: Domain name=Sugar_tr; Domain location=23-486; Score =101.4; E_value=2.7e-27; Accession=PF00083.14; Description=Sugar (and other) transporter
  Pfam module annotation: Pfam domain module=MFS_1::Sugar_tr; Domain location=28-446::23-486
MVRRQLRVLSALDVARTQLYHFMAIVIAGMGFFTDAYDFFSISLVIDLISFQYYDGHMRSAVKAAINGIALCGALPGQLVFGWLGDKMGRKRIYGVTLVLMVVTSLASGLSFSKRRGKNVVTVLCFFRFWLGVSIGGDYPLSATIMSEYANKRRRGAFIAAVFAMQGFGNLAAGIVGMVVSAAFTNSAPSNADFVWRIVLMFGAVPATLTYYWRMKMPETARYTALVAKDAKKVASDMSAVLNMHIVPEDEAVYELARHDQYGLFSAEFLRRHGAHLVGTSMCWLALDITFYSLNLFMKDFFTKVRLLGAPHQGDEPFKRMVHTTAMHTILVLSFSLPGYFFSVAFVDRIGRVRIQLLGFAMMSAFILCLAIPYDHWTDDKNNKYGFAVMYGLTSFFANFGPNTTTFIIPAEIFPARLRSTCHGISGAFGKLGAIIGVFAFVYAEKHNNNRSMLFALVGCNLVGLVFTLLLPESKGKALEEISGEMEEQHPEQDAAAVAAAEYVNVVPV

SEQ ID NO: 55739 - protein, 115 aa, Zea mays
  Coding DNA Sequence Number=SeqID_13960
MSAQAEAHKAEVQELKRKIAEATENFEVEVVKHEICEIERSRAQKNVDELHVGKEKCYEQKFIRVELSPPPEQYNPEVDPALKEALEMIKIANEDVDEAVNRLLNEAAEKVLNED

SEQ ID NO: 55740 - protein, 625 aa, Zea mays
  Coding DNA Sequence Number=SeqID_13961
  Gene Ontology: Mol. function=transporter activity; Cellular component= integral to membrane; Biological process=transport
  Homolog annotation: Hit_ID=Q49B42; Match level="QueryCoverage=74%, HitCoverage=93%, E-value=0.0, Identity=75%"; Hit description =Inorganic phosphate transporter 5
  Pfam annotation: Domain name=MFS_1; Domain location=188-593; Score =63.2; E_value=8.3e-16; Accession=PF07690.6; Description=Major Facilitator Superfamily
  Pfam annotation: Domain name=Sugar_tr; Domain location=184-619; Score= 18.2; E_value=1.9e-07; Accession=PF00083.14; Description=Sugar (and other) transporter
  Pfam module annotation: Pfam domain module=MFS_1::Sugar_tr; Domain location=188-593::184-619
  Subcellular localization annotation: CTP_CleavageSite=48; ConfidenceScore=5.20e-01
MAVRLRINVFEFKTLQANLGKQSARSAKTTAMRNNPSWAPCPQLSVPSGAIEGGAVQPVKLTPRAHESEFGQTWLRLAGGDRLSVGVRRERGALGSPLRCCFFGGMTKETKGQEMVRKYGEDYDWRGAPTIDAEVVHSIGGKAHERSGLQQQLARGRRPMALRRQLRVLYALDVARTQLYHFKATVIAGMGFFTDAYDFFAVSLVMDLISYLYFEEQIRRGVKAIIYGIALCGAVPGQLVFGWLGDKMGRKRVYGVTLVLMVVTSLASGLSLSFGTNDNEAANVVAVLCFFRFWLGFSIGGDYPLSATIMSEYANKRRRGAFIAAVFAMQLKTNPRRNANFVWRIVLMLGAVPAIFTYYWRMKMPETARYTALVAKDARKAASEMSSVLNMEIGQEDEAVRELVRQDEYGLFSVQFLRCHGTHLLATSVCWLAVDITFYSLNLYMKDIFVDVGLIDPPEKSDLFKRMTVSTLLHMAIAFGGTLPGYFFTVAFVDRIGRVRIQLLGFTMMAALTASLAATYDPYWKQQKTKRRKIGFAVLYGLTNFFTNFGPNTTTFIVPAEIFPTRMRATCHGIAGAFGKIGAIIGVFGFMFTMEEHHVAPRALWALFASNLVGLVFTFLLPDSK

SEQ ID NO: 55741 - protein, 107 aa, Zea mays
  Coding DNA Sequence Number=SeqID_13962
MEEGEGSRGGPWPNGGGYGACARMWAQVDEMRGSRRSSFMAQGAAAPTGYHAPERGVRPAIAPHEAESVRGAREEDGKEEEADEAGPRDSSTRVTTRVVRNKEMGRI

SEQ ID NO: 55742 - protein, 60 aa, Zea mays
  Coding DNA Sequence Number=SeqID_13963
MTTYLQAMSTRDRNGNNIKLQMYLRLDRSPSFEGTCSYVTLGKILLNHIFEDPSEDEGPQ

SEQ ID NO: 55743 - protein, 135 aa, Zea mays
  Coding DNA Sequence Number=SeqID_13964
  Subcellular localization annotation: CTP_CleavageSite=52; ConfidenceScore=5.24e-01
MVPIETNMFSKAQIAAPKSKRKQGKATANSLAPAARPSEPGANYLTRESGPSAPHREASNGTPIPVDEDDLLGEDLVDYRASPEHLRIDVNVITFLADYTINGDDELAVAQFDFSPKDVVFTKPKGSVNHCHTRI

SEQ ID NO: 55744 - protein, 32 aa, Zea mays; identical to SEQ ID NO: 55117
  Coding DNA Sequence Number=SeqID_13965

SEQ ID NO: 55745 - protein, 87 aa, Zea mays
  Coding DNA Sequence Number=SeqID_13966
  Subcellular localization annotation: CTP_CleavageSite=77; ConfidenceScore=5.53e-01
MTKLSYAQLRDQLVLRPNHPSSRSGFVPTMLSISHMLVIRVRRTFGGRRPPTGTLINHVMRKTTQVDPKHGLICMVMLMDEPEDRMI

SEQ ID NO: 55746 - protein, 565 aa, Zea mays
  Coding DNA Sequence Number=SeqID_13967
  Gene Ontology: Mol. function=binding; Cellular component =intracellular; Biological process=protein kinase C activation
  Homolog annotation: Hit_ID=Q6ZIP5; Match level="QueryCoverage=90%, HitCoverage=79%, E-value=2e-84, Identity=30%"; Hit description =Pentatricopeptide (PPR) repeat-containing protein-like protein
  Pfam annotation: Domain name=PPR; Domain location=165-199; Score =13.1; E_value=0.21; Accession=PF01535.11; Description=PPR repeat
  Pfam annotation: Domain name=PPR; Domain location=227-261; Score =40.4; E_value=6.1e-09; Accession=PF01535.11; Description=PPR repeat
  Pfam annotation: Domain name=PPR; Domain location=331-365; Score =37.7; E_value=3.9e-08; Accession=PF01535.11; Description=PPR repeat
  Pfam annotation: Domain name=PPR; Domain location=366-400; Score =22.8; E_value=0.0012; Accession=PF01535.11; Description=PPR repeat
  Pfam annotation: Domain name=PPR; Domain location=401-434; Score=3.5; E_value=2.9; Accession=PF01535.11; Description=PPR repeat
  Pfam annotation: Domain name=PPR; Domain location=470-504; Score =11.8; E_value=0.3; Accession=PF01535.11; Description=PPR repeat
  Pfam annotation: Domain name=PPR; Domain location=90-124; Score=12.2; E_value=0.27; Accession=PF01535.11; Description=PPR repeat
  Pfam module annotation: Pfam domain module=PPR::PPR::PPR::PPR::PPR::PP R::PPR; Domain location=165-199::227-261::331-365::366-400::401 -434::470-504::90-124
MGDVLHLGRAVHAHLVKTALTSHTLLSNRLVALYSSLPSPAAAVKAFYDLPHKNAHSYNTLLAALLRRPDTLPDAFRLFDTMPADSRNLVSYNTLMSSLAHHGRQVEALRVVARLARDRFLGPGLAMDRFTVVSVATACAGIGAARPLREMHGAVVVSGMEFTVIMANAMLNAYSKARRVEDARHLFDQVSIRDNVTWTSMISGYCQVKKLHEAVQVFDMMPDKDRIAWTALISGHEQNGEEDTALELFEQMLAKGVSPTPFVLVSALGACAKLGLVTRGKELHCFILRRNIGSVPFNIFIHNALVDMYSKCGDMMAAMAVFDWMPERDFISWNSMVTGFSHNGLGKQSLAIFEEMLVAGVRPTHVTFLAVLTACSHSGLVSNGRLVLESMEDHGVEPRAEHYAAFIDALGRNHQLEEATEFIKDLPSRIGPGTAGSWGALLGACRLHGNIELAEEVAEFLFRLEPGNSGRYVMMSNIYAAAGQWDDARRVRGLMKEKGLKKDQAYSWIEVRSAKHVFVADDISHCEADKIYEMLGKLLDHMSVAEDPTEHQLNFCLDLSGTAHV

SEQ ID NO: 55747 - protein, 247 aa, Zea mays
  Coding DNA Sequence Number=SeqID_13968
  Gene Ontology: Mol. function=DNA binding; Cellular component=nucleus; Biological process=regulation of transcription
  Homolog annotation: Hit_ID=Q69ST3; Match level="QueryCoverage=93%, HitCoverage=97%, E-value=6e-70, Identity=60%"; Hit description =Putative NAC domain protein NAC2
  Pfam annotation: Domain name=NAM; Domain location=8-151; Score=108.8; E_value=1.6e-29; Accession=PF02365.6; Description=No apical meristem (NAM) protein
MGGGATNLPPGFHFFPSDEDLVVHFLRRKAANLPCRPDIVPTILLHRYDPWELNGLRSHPYIAIAHSVRTALQAGNQWYFFSSHAHAHAHSAAGQTRTSPSGYWNPAGADETVVLASSGRVVGLKKTLVFCTGEPFRGFRTNWVMHEYHLQDGPAGCNVGGSSGATTPSSSSSSGSSRRSQRKRVHSSTESINSWVICRVFESSCGSQVSFHDEGTELSCLDEVFLSLDDYDELQESHYTVIKSHKF

SEQ ID NO: 55748 - protein, 88 aa, Zea mays
  Coding DNA Sequence Number=SeqID_13969
  Gene Ontology: Mol. function=protein serine/threonine kinase activity; Cellular component=ubiquitin ligase complex; Biological process=protein amino acid phosphorylation
  Homolog annotation: Hit_ID=Q5WA76; Match level="QueryCoverage=57%, HitCoverage=6%, E-value=2e-12, Identity=71%"; Hit description =Putative stress-induced protein sti1
MTLTQFNLISVKIADLTAKLLRKTIRTWNGAKTISSLKIGEGGFGCVYKCTLQNMTLAIKALEFDGLQGQSQFEEEAAILIKVHPKKN

SEQ ID NO: 55749 - protein, 129 aa, Zea mays
  Coding DNA Sequence Number=SeqID_13970
  Gene Ontology: Mol. function=isopentenyl-diphosphate delta-isomerase activity; Biological process=isoprenoid biosynthetic process
  Homolog annotation: Hit_ID=Q8L831; Match level="QueryCoverage=46%, HitCoverage=9%, E-value=4e-12, Identity=63%"; Hit description=Nudix hydrolase 3
MEVFPHGLPSFFLTGNTITHGAPGIKMGQIDRIEKGLLVQDAEVQKPLLSVFPMMNGLKMNEELPWLCLKTFQKPRWDEQKEYVDFEPYYTHIFCHQWCHGIGVLSPFQVVKNQQLEWYIPPLTLSIES

SEQ ID NO: 55750 - protein, 104 aa, Zea mays
  Coding DNA Sequence Number=SeqID_13971
  Subcellular localization annotation: CTP_CleavageSite=19; ConfidenceScore=5.12e-01
MPMSTDLRRRHQSCLPAPPTSSGSGARTRKSWRRIWGMGMGGRRIEYGFPTAPDPIALPCDEDRFFTAFHHASSSALEGRRCGCRGGGLGGLAAKPPQGRRGDR

SEQ ID NO: 55751 - protein, 305 aa, Zea mays
  Coding DNA Sequence Number=SeqID_13972
MEDDDFTFPTVAAARGPTAPLGRPDDEDPVPHLLQLPPPPSPTLAGTTSPLWPFAGSTPKTTTTTAAPPSSPPVTEEDDEDRMDLLWESTLTTRPVATAPAPAPESAGSAVVSPHAGPPPERRAAAADDKQRAAALAAAERMDRLWESFNEDLVVLRRHVRDRCRRSKVRRRAPRRHQTPTPKAPRGPGRRLRRTTTWYLCKLLGVVGRRRRRVRCPGDVGVVARGAARVRVRAHHAARVVARGRGGPVLRRRRQPPRPTARPRRRGGGWVGAPAEALPQALRRRQDGAAVPQRLRAMTITRSLP

SEQ ID NO: 55752 - protein, 116 aa, Zea mays
  Coding DNA Sequence Number=SeqID_13973
MASAGVGLSTASSAWVLQADTTTQAEAAPRGRGKEVARRPLLLRLLIRYQYGISRSGVRSGVWTGSTTGKQGQICMLSSGLLVSKWGVSYALLLLASFLDKNHMVARVAQTRHYLV

SEQ ID NO: 55753 - protein, 337 aa, Zea mays
  Coding DNA Sequence Number=SeqID_13974
  Subcellular localization annotation: CTP_CleavageSite=28; ConfidenceScore=5.71e-01
PLWFALSTLTGVFPVQLKSATVDPRLPRVSAVAQALQTRSSVEVIILPVGFFPPLPSLRRPSSSRSPWQTWPGSRFPLHTSLASRPACLAYHVSCHGPQLPYRARPAPPSDGMLLRWPHHARRPAPADPSRARRYGQCPAWLDPSAAVCPSQNRLTAPASALRQGPPFVGVAQPFRAMRNALALPSDAVSLRSPLAVCPRLTIAVVEHRPWPCPGLLCASRRGTRLVQLACGAWPTACPAVPKHRRRRTDDTPSMSARASPMAAVEHRPWPCPGLLCASRRGARLARLACSAWPTACPAVPKHRRRRTDDTPSMSARKEEGDEVDLQEFQDFDEFVV

SEQ ID NO: 55754 - protein, 145 aa, Zea mays
  Coding DNA Sequence Number=SeqID_13975
MGAIPVRGHQRARNTARRSNGGQINSGEKLCGRWGRTRSAWATAGTWGSLGSTVVDFGCTGKTPGSGREVREAEGADGWGPRGSEGKSANGRSTLTERVHRVAGENGREREGIGADRPTPQSSERERERRGAGAGADRRGPRVRG

SEQ ID NO: 55755 - protein, 330 aa, Zea mays
  Coding DNA Sequence Number=SeqID_13976
  Gene Ontology: Mol. function=metal ion binding
  Pfam annotation: Domain name=zf-C3HC4; Domain location=283-317; Score= 5.5; E_value=0.043; Accession=PF00097.15; Description=Zinc finger, C3HC4 type (RING finger)
MAVQGRHLSHDLAAQAAGGYLFLDEYAGCAPAAAPAPARIGDATTALSDFPRVEVAWCNYDGFLPRKRPRLETAAPAAGGGLSEDQRAGLPPAGTERLLPLPVAVAPFVNARSRRAVAASGTASTSGRVASGATVAASRGLLSSWTHRHGVEIDALVRLEAERMRAALEEARRRHARALLAAVGRAASGRLRASETDLERALRRGAELEEKARQAGAECQAWMAVARRHEAAAAGLRATLDQLLQSPYGAGGGREEGGEAEDAESCCFEDGGASCASRSKLACRSCGAGEASVLLLPCRHLCLCRACEAGVDACPVCAAAKNGSLHVLVS

SEQ ID NO: 55756 - protein, 1045 aa, Zea mays
  Coding DNA Sequence Number=SeqID_13977
  Gene Ontology: Mol. function=small protein activating enzyme activity; Cellular component=cytoplasm; Biological process=protein modification process
  Homolog annotation: Hit_ID=Q2RBM4; Match level="QueryCoverage=99%, HitCoverage=96%, E-value=0.0, Identity=84%"; Hit description =Ubiquitin-activating enzyme E1 2, putative, expressed
  Pfam annotation: Domain name=ThiF; Domain location=29-155; Score =27.7; E_value=1.6e-08; Accession=PF00899.11; Description=ThiF family
  Pfam annotation: Domain name=ThiF; Domain location=456-600; Score =174.2; E_value=3.2e-49; Accession=PF00899.11; Description=ThiF family
  Pfam annotation: Domain name=UBACT; Domain location=743-808; Score =42.9; E_value=1.1e-09; Accession=PF02134.11; Description=Repeat in ubiquitin-activating (UBA) protein
  Pfam annotation: Domain name=UBACT; Domain location=844-916; Score =123.9; E_value=4.6e-34; Accession=PF02134.11; Description=Repeat in ubiquitin-activating (UBA) protein
  Pfam module annotation: Pfam domain module=ThiF::ThiF::UBACT::UBACT; Domain location=29-155::456-600::743-808::844-916
MAGRAPEIDEDLHSRQLAVYGRETMKRLFGSNVLVSGLQGLGAEIAKNLVLAGVKSVTLHDDGKVELWDLSSNFFLSEKDIGQNRAQACVPKLQELNNAVIISTITGDLTKEQLSNFQAWCSGEISQSHQATACTLHNLRILELALSQAVVFTDISIEKAVEFDDYCHSHQPPIAFIKSEVCGLFGSVFCDFGPAFTVLDVDGEEPHTGIVASISNDNPALISCVDDERLEFQDGDLVVFSEVHGMTELNDGKPRKIKNARPYSFTLEEDTTSYGTYIRGGIVTQVKPPKVLKFKTLKEAIKEPGEFLMSDFSKFDRPPLLHLAFQALDKFRTELTRFPIAGSADDAQKLIDLAIGINETLGESKLEEIDKKLLQHFASGSRAVLNPMSAMFGGIVGQEVVKACSGKFHPLYQFFYFDSVESLPVEPLEPSDLKPENSRYDAQISVFGAQLQKKLEQSKIFMVGSGALGCEFLKNLALMGISCSQNGKLTVTDDDVIEKSNLSRQFLFRDWNIGQPKSTVAATAAMTINPELHVEALQNRASPDTENVFNDAFWESLDAVVNALDNVTARMYIDSRCVYFQKPLLESGTLGAKCNTQMVIPHLTENYGASRDPPEKQAPMCTVHSFPHNIDHCLTWARSEFEGLLEKTPTEVNAFLSNPGGYATAARTAGDAQARDQLERVIECLETDKCETFQDCITWARLKFEDYFSNRVKQLTFTFPEDAMTSSGAPFWSAPKRFPRPLEFSSSDSSHLSFLLAASILRAETFGIPIPDWAKNPKKLAEAVDKVIVPDFHPKQGVKIEIDEKATSLSSASVDDAAVIEELIAKLEAISKTLPPGFHMNPIQFEKDDDTNFHMDLIAGFANMRARNYSIPEVDKLKAKFIAGRIIPAIATSTAMATGLVCLELYKVLAGGHKVEDYRNTFANLAIPLFSMAEPVPPKTIKHQDMSWTVWDRWTVTGNMTLRELLEWLKEKGLNAYSISCGTSMLYNSMFPRHKERLDKKVVDVAREVAKLEVPSYRRHLDVVVACEDDDDNDVDIPLVSIYFR

SEQ ID NO: 55757 - protein, 793 aa, Zea mays
  Coding DNA Sequence Number=SeqID_13978
  Homolog annotation: Hit_ID=Q338Y6; Match level="QueryCoverage=48%, HitCoverage=92%, E-value=0.0, Identity=88%"; Hit description =Expressed protein
  Pfam annotation: Domain name=DUF641; Domain location=1-132; Score =211.3; E_value=2.1e-60; Accession=PF04859.3; Description=Plant protein of unknown function (DUF641)
MNQNGDSVDTMIGRIFNNISSLKSAYIQLQEAHTPYDPDKIQEADKLVIEELTNLSELKHAYREKHPKPIAASPQDSRLLSEIQEQQNLLKTYEVMVKKFQSQIQTRDTEITHLQQQIDEAKLRKSKLEKKLKQRGLLNRESEESDEEENYFSIELTPSLFTSAVDNAYQSIHEFSKPLINMMKAAGWDLDGAANAIEPGVVYTRRAHKKFAFESYICQRMFSGFQEESFSIKDSNISVSNEAFFHQFLAVRAMDPLDVLSQNPDSVFGKFCRSKYLLLVHQKMEGSFFGNMDQRNYVMSGGHPRTPFYQAFLKLAKSIWLLHRLAYSFDPKAKVFQVKKGSEFSDIHMESVVKNIILEEGAERPKVGLMVMPGFLIGTSVIQSRVYLSDANKHLPIPLSSKEKQQSKVSHHTTLQFSSHGQSLLSTAAMAAASDSTHLPPSVNHDLDEMAAASDSTHLPPSVNHDLDEDDDDEEFDEDDDDLVDGTADDDGEPSASPSEAARLEAVLRRLTADEVRIRVHQVTIRGCARTRRAAVEAAVGPDVGRAATVRDLVRAAAAAGDRLRRLGAFDTVSITLDAAPPGIPGSAVVVLVDVAEARGRASGDFGVFANTQTRSCSLEGSVKLKNLFGYCETWDASGALELDKTAELSAGVQMPRIGAIPTPLMARISFLSGDWLKSSLKEHLMGVSVGLLSTMNHNIAYNLTWRKFTDPTRMTSNSVQEELGHSLLSSIKYAYKVDQRDSSIRPTRGYAFMSTSQVGGLAPESKYSRFLRQPLSTSRLVDLYLSSHSRDA

SEQ ID NO: 55758 - protein, 130 aa, Zea mays
  Coding DNA Sequence Number=SeqID_13979
MCARGVQHAGDRFDRESGEQNRSQGGPGAITNGGNGPAYSNFLDSMEDVVWDHRAQHMPMTTARLRRGGLPAQRERGPMSATLARLRARRASGATRVQPQRWHTVADLPLLSSYAAFSTRNKSASASARS

SEQ ID NO: 55759 - protein, 70 aa, Zea mays
  Coding DNA Sequence Number=SeqID_13980
MEKRRKVQHAGEIHGRGGRRLGAGGERETCTGRKKNAESEFGWGDKENHRYSYIQIFSDNYRVNNIGDMV

SEQ ID NO: 55760 - protein, 232 aa, Zea mays
  Coding DNA Sequence Number=SeqID_13981
METHLPQPKTSSTGDSILAFPSYDGIDAEKYIECETKIDCLFPKYFMCQWKKMKKATSVLTHFALSWWESLTPSNKPHTWKYLKILMRETFINTAPILNSSDEDRIQKREDDVKENEVLIAALESLDPSFHNSSSIPFASESKEGSVKANYTISSSTYPSLYVLQQKGQLQEGEQSWTMSRPIRTPCAGTNYFESRTTQNQKGQNDKYMDVNYMVKSQSMIESQVQGESKSS

SEQ ID NO: 55761 - protein, 72 aa, Zea mays
  Coding DNA Sequence Number=SeqID_13982
MDDVLQLDHDDSKDLGEDHIVHLTSGRWGHCILKEVDIKGVALQGEEDEVALADGVTTRYSRDGSRDVTQTL

SEQ ID NO: 55762 - protein, 582 aa, Zea mays
  Coding DNA Sequence Number=SeqID_13983
  Gene Ontology: Mol. function=electron carrier activity; Cellular component=endoplasmic reticulum; Biological process=electron transport
  Homolog annotation: Hit_ID=Q8VX49; Match level="QueryCoverage=99%, HitCoverage=84%, E-value=0.0, Identity=68%"; Hit description =Cytochrome P450 reductase
  Pfam annotation: Domain name=FAD_binding_1; Domain location=191-414; Score=325.4; E_value=9.7e-95; Accession=PF00667.10; Description=FAD binding domain
  Pfam annotation: Domain name=Flavodoxin_1; Domain location=1-127; Score=74.7; E_value=2.9e-19; Accession=PF00258.15; Description =Flavodoxin
  Pfam annotation: Domain name=NAD_binding_1; Domain location=435-547; Score=112.9; E_value=9.3e-31; Accession=PF00175.11; Description =Oxidoreductase NAD-binding domain
  Pfam module annotation: Pfam domain module=FAD_binding_1::Flavodoxin _1::NAD_binding_1; Domain location=191-414::1-127::435-547
ALAEEAKARYDKAIFKVVDLDDYAAEDEEYEEKLKKEKLALFFVATYGDGEPTDNAVRFYKWFTEGNERGVWLHDFEYAVFGLGNRQYEHFNKVAKVVDEILTEQAKRLFSLSENDDNALRMTSTHVELCCVLIFRKETLWPELDRLLGDGNDISTGTTYTAAIPEYRVEFMGPEEAAHLERNSSLANGHAVHDAQHPCQADVAVRRELHTPASDRSCTHLEFDIAGTGLTYETGDHVGVCTENCPEVVEEAERLLGYSPDTSFTIHADRDDGSPPPFPSPTTLRNALARYADLLNSPKKASLVALATYASDPAEADRLTFLASAAGKDEYAQWVVASQRSLLEVMAEFPSAKPPLGVFFAAVAPRLQPRYYSISSSPSMAPTRIHVTCALVHETTPAGRNAVPSEGSEDCSSWAPIFVRQSNFKLPADPSVPIIMIGPGTGLAPFRGFLQERLARKESGAELGRSVFFFGCRNSNMDFIYEDELSNFLEQGALFELVLAFSRQGPTKEYVQHKMAQKASEIWDMISQGAYIYVCGDAKGMARDVHRVLHTIVQEQGSLDSSKAESFVKNLQMEGRYLRDVW

SEQ ID NO: 55763 - protein, 169 aa, Zea mays
  Coding DNA Sequence Number=SeqID_13984
  Gene Ontology: Biological process=embryonic development
  Homolog annotation: Hit_ID=Q6Z0I0; Match level="QueryCoverage=63%, HitCoverage=82%, E-value=2e-24, Identity=53%"; Hit description =Putative seed maturation protein
  Pfam annotation: Domain name=LEA_1; Domain location=8-80; Score=37.0; E_value=6.6e-08; Accession=PF03760.6; Description=Late embryogenesis abundant (LEA) group 1
MQAGKTAVEATKEAAANVGASANAGMQKTRAAVQGQVEKATARNASDKVAAEERQRERVRAAELEKQDAGAPGIGAQQEYGGGRVAPAGGHVEAGVGETRPVARGTGTARPSAAHNPLVGSDFSQARGTGGQYHFDGLLSIKSGRRFRPSGGRFALRNRSRPSSLNIKG

SEQ ID NO: 55764 - protein, 87 aa, Zea mays
  Coding DNA Sequence Number=SeqID_13985
MPAFGGFPRGVGCQGLVVSAPALVPHRLAKGAVGSLKGRVPLLPSTWLLGCWHSLSFNIIAVDATTAASGKAYHWYIIFLYQLNIEK

SEQ ID NO: 55765 - protein, 198 aa, Zea mays
  Coding DNA Sequence Number=SeqID_13986
  Gene Ontology: Mol. function=RNA-directed DNA polymerase activity; Cellular component=mitochondrion; Biological process=RNA-dependent DNA replication
  Homolog annotation: Hit_ID=UPI00004C1733; Match level="QueryCoverage =56%, HitCoverage=8%, E-value=3e-57, Identity=93%"; Hit description =UPI00004C1733 related cluster
  Pfam annotation: Domain name=rve; Domain location=37-180; Score=63.9; E_value=5.3e-16; Accession=PF00665.16; Description=Integrase core domain
  Subcellular localization annotation: CTP_CleavageSite=24; ConfidenceScore=5.56e-01
MGRSSTTAAPSASSSDAFPSPKSRSSYKRYTRGLAAITQRLGPSLEMPSDKKAPGGYTHLLVAIDKFSKWIEVRPLNSIGSKQAVAFFTNIIHRFGVPNSIITDNGTQFTGRKFLDFCEDHHIRVDWATVAHPMTNEQVERANGMILQGLKPRIYNDLNKFAEPYGRVRVHVNGKADRSEGLLRLRDTDTSLITFREK

SEQ ID NO: 55766 - protein, 188 aa, Zea mays
  Coding DNA Sequence Number=SeqID_13987
  Homolog annotation: Hit_ID=Q10CE8; Match level="QueryCoverage=81%, HitCoverage=45%, E-value=1e-36, Identity=57%"; Hit description=TCP family transcription factor containing protein, expressed
QPEIPPESPSPSFEAQTLQKPVLQNHQPNVSAAAAGCVGIAHNGKGAHGLSTHAFSGPAAAKFGSAPPFGLVPAQPFNFTSPIEMPHFSLGQDTLAASSAAAGDYSLGFSMSSGFLGASRGTLQSNSQSNFSGHHHHQLQRLDGPLLFGHVHGAAVAHPASENQLTSSAALQLWDGLRHSGMKEKSKN

SEQ ID NO: 55767 - protein, 70 aa, Zea mays
  Coding DNA Sequence Number=SeqID_13988
MENPPPSSAGPYSAPAPAAQHQDAAKEDQDVAQLVLNLCIPELREKAIIILSKAFPRTCAFRIFCCLSPT

SEQ ID NO: 55768 - protein, 250 aa, Zea mays
  Coding DNA Sequence Number=SeqID_13989
  Homolog annotation: Hit_ID=Q6F3B8; Match level="QueryCoverage=84%, HitCoverage=75%, E-value=3e-55, Identity=59%"; Hit description =Expressed protein
  Pfam annotation: Domain name=DUF860; Domain location=3-233; Score= -44.2; E_value=2.1e-10; Accession=PF05898.4; Description=Plant specific of unknown function (DUF860)
MGRHDATKLCRSCAEDEAASQRLGLAALIVVYDDRWVTAFLRRFSAAFVESVGQHNIPWFRLSDAATQLLQEEWIVISGDGDHGRELELIDDGKNEEMPLSVLHVNAMRKLGSVEEVSVPLFPSNHINPGSDVSEKQAVGVLHELLSLFVTCSGERRRLRYLRQHLGLPQKFHLVFERHPRVFYLLLKEKTCFVVLKEAYIAGEDNAIEAHPMLEVFKKYVELMEQSREIIRCRRGGKPIELESKSRGDN

SEQ ID NO: 55769 - protein, 107 aa, Zea mays
  Coding DNA Sequence Number=SeqID_13990
MALSRCGESCFGPSTHCLDSRKYDADTYRGGNRDMMDRFIAKKQTKMILTVLGFRVVRFGLKTTILTAATPATFFGGQKPQKVEQSIGMRMTAANRVVRDEAATDWK

SEQ ID NO: 55770 - protein, 140 aa, Zea mays
  Coding DNA Sequence Number=SeqID_13991
  Subcellular localization annotation: CTP_CleavageSite=39; ConfidenceScore=5.16e-01
MELQAGAWALAPGGVAAGMRQRLVLPGVLGGRARRPRPSVGAPAAVLLLELFARSYPYAALPRLPNRPPVLLPPCNIFPAPARAATLGARRALVASVGLSLSLSSRPGRCGSAERQKLLRGARCSGTAVLLRAGAEPQRG

SEQ ID NO: 55771 - protein, 144 aa, Zea mays
  Coding DNA Sequence Number=SeqID_13992
  Subcellular localization annotation: CTP_CleavageSite=73; ConfidenceScore=5.28e-01
MAVCPFPVPVPRPPVPVPARTTPTRMASLGWSTVAEPQPTAEAPHHPPSPVGSLWDSRSMPGRHVPVRRSQLRASARGRVAAATHWPAVQWWWNGGEKGRMPSTLDRPAKPPAAPTPYHPSRETLCPAAVRVRPSPAVPLLPIG

SEQ ID NO: 55772 - protein, 454 aa, Zea mays
  Coding DNA Sequence Number=SeqID_13993
  Homolog annotation: Hit_ID=Q6H5H5; Match level="QueryCoverage=71%, HitCoverage=81%, E-value=1e-114, Identity=64%"; Hit description=Emsy N terminus domain-containing protein-like
  Subcellular localization annotation: CTP_CleavageSite=18; ConfidenceScore=5.05e-01
QLALLPRISPDSAPRRALASAAGSRLCPRVLYYRRTAVLVVVGGVADDGAPSGASATSGNRRKGDWEIIREGRPGTDDDLPQFPHKSIRGSGRVSGNGRAVVPAGSYARAPTDMHLKPMMPFCLREWRSTGGLQASLSNNPQLIHDSVPSPTTSGRKRQKTSQSVPALPAPPPAMHSQQLATPTQPSSSTARKAKFMHFQGQKVPGGSAAKPIPSSAGPSGRGPHMNRGGSAPEAQAQNVDPLIGRKVMSRWPEDNSFYEAVIYEYDAETGLHALVYDIDTADETWEWVDLKEMGPEDIRWQEDDSGIDPVTYLRSRGGPTSGVRKPAGRGGPMPGSVRGRGLQKNMPKKDFPPPQNGVGKRSSDDIDILHTESLIKEVGKVFSVSNPDPQEVEKAKKALKEQEQSLIDAIARLAEASDGESDGHNRGRRNLYAANQHQASYVGAMPVGDRAGA

SEQ ID NO: 55773 - protein, 104 aa, Zea mays
  Coding DNA Sequence Number=SeqID_13994
  Homolog annotation: Hit_ID=Q6QP51; Match level="QueryCoverage=41%, HitCoverage=20%, E-value=3e-13, Identity=79%"; Hit description =Putative growth-regulating factor 1
  Subcellular localization annotation: CTP_CleavageSite=64; ConfidenceScore=5.47e-01
MEVEPSRLGKTESRSPTSSASGATGSSASPNLSLGLGRRSPPRPTPGLGLSLGLGRSHILAQPQASGGVTSSLDLGLGLRRSLRLARPQPRTDYATGDTSLSYS

SEQ ID NO: 55774 - protein, 84 aa, Zea mays
  Coding DNA Sequence Number=SeqID_13995
MEDFKLHYPDFKLEDELFVGKEGNVVDSFLGRQYTRRNKKCGNIAAILELDENLNKQFRVFEAAPHVCVPPPFAICYASTDLTR

SEQ ID NO: 55775 - protein, 400 aa, Zea mays
  Coding DNA Sequence Number=SeqID_13996
  Gene Ontology: Cellular component=microtubule; Biological process =microtubule cytoskeleton organization and biogenesis
  Homolog annotation: Hit_ID=Q45NK4; Match level="QueryCoverage=44%, HitCoverage=79%, E-value=4e-36, Identity=49%"; Hit description =Putative ABI3-interacting protein
  Pfam annotation: Domain name=Frigida; Domain location=42-317; Score= -13.4; E_value=4.8e-08; Accession=PF07899.2; Description=Frigida-like protein
MAIDLPSWALAAIDKIRKGFLWRGRKEVRGGHCLVAWGRVCRPLELGGLVISSLNEMCWALLMRWLWLHKTDPERPWANLPIQVPYQAWALFSTVLISEVGNGAHTLFWTDMWLFARRIIDTAPRLFDTIPKRIVNKKLFRSLLRFLEGVLVPASTTFRSAKFNPAARFLISGVIEVLVKSGRTIDAINLAYVFELTEQFEPVQLLKAYLRDVKKLSHARNVKISPGAQEAPFLSGKSNKEFYLAHINTEEVIKGGACRPLSSNEMNERELCALKSVIKCIEDHKLEEQYPVDPLQKRVLQLEKAKADKRRAVEAAKPQSKRPRANGSTFAPRATGFADKSFYPATPERHPSNPYERQFVYGAEAHLPPMMSSASYPMQPAHGPYYGNGYPVQYQVPYIH

SEQ ID NO: 55776 - protein, 131 aa, Zea mays
  Coding DNA Sequence Number=SeqID_13997
MANPPAGMKTAHPEEESKIGHSPNNETGRRGRRWRLLLASGSEGKDIEGPTATPTIVVAATVIPALVAHGVAPSLPSEVEPYAQQGRSKAEQWANSSRHQEKLKDTKLEDLKVSGGEAEGKRGEVVRSRCH

SEQ ID NO: 55777 - protein, 80 aa, Zea mays
  Coding DNA Sequence Number=SeqID_13998
MDQRPREGGREDRRRETARQSPPVRLAVNLSRAHGASAVTGADDFERAEKDMGQWRLVGEAKHDGAVLLPVITAGYSTKK

SEQ ID NO: 55778 - protein, 98 aa, Zea mays
  Coding DNA Sequence Number=SeqID_13999
  Homolog annotation: Hit_ID=Q69TF4; Match level="QueryCoverage=40%, HitCoverage=6%, E-value=2e-09, Identity=75%"; Hit description =Pantothenate kinase 1-like
FLLVYHGKNLSISDLSLIRSQSQMQAVFLRHEGYLGALGALMSYGDPSGENLTLEEKGECTRKNARVEMIGRMNASGRETGDEHSRCGHQGEGKNSPG

SEQ ID NO: 55779 - protein, 197 aa, Zea mays
  Coding DNA Sequence Number=SeqID_14000
  Subcellular localization annotation: CTP_CleavageSite=65; ConfidenceScore=5.16e-01
MALHKLYDDGGPPALLRKQDDVSRDSTAPTAVPPPGSAAPPTATTSRQQGAQISPAATLAFPHSCAPEKTSRTVTHPKIALGQARLTPSSSLMRTREDFSDGHPAQDCSRPSTLNPKVLLSETSFASTSSIICETNMLGEEEEHNRWRPNDESSSPTGSSFTIHKCFVTNDDNSGSKSDDEEEYEDDSKDDDENIII

SEQ ID NO: 55780 - protein, 222 aa, Zea mays
  Coding DNA Sequence Number=SeqID_14001
  Gene Ontology: Mol. function=catalytic activity; Cellular component =intracellular; Biological process=metabolic process
  Homolog annotation: Hit_ID=Q6K1V9; Match level="QueryCoverage=97%, HitCoverage=23%, E-value=9e-91, Identity=70%"; Hit description =Ribosomal protein-like
MYQDYLADNSTFSLTDFRRRYRMSRNLFKRIMAAVEDHDDYFKFKFNAASTPGLSCFQKVTAVFRMITYGVAADATDEYVRIGESTVIESLKKFVKAIIKVFGNEYLRAPNEMDTSRLLAIGQERGFPGMLGSIDCTHWRWKNCPSSWHGMYSGHLHEPTIILEVVASQNLWIWHAFFGLPGSHNDINVLHRSPLFSKLAEGQAPQVYYNINGHDYTMVKVA

SEQ ID NO: 55781 - protein, 528 aa, Zea mays
  Coding DNA Sequence Number=SeqID_14002
  Gene Ontology: Mol. function=DNA binding; Cellular component=nucleus; Biological process=protein folding
  Homolog annotation: Hit_ID=Q1SDC2; Match level="QueryCoverage=82%, HitCoverage=58%, E-value=2e-24, Identity=37%"; Hit description=DnaJ domain, putative
  Pfam annotation: Domain name=TolA; Domain location=1-308; Score= -156.7; E_value=0.1; Accession=PF06519.2; Description=TolA protein
MKYTQDLIKRFGMKDAKPTKTPMGTDGHVDLNKGDDDEYDLEQAESPEHKRWMERQNAMPQEKAKKVEYARVRTLVDNVYKKDPKIQMRKEEQKAEKQRRKEAKYLTKKLQEEEATRAAEEERVRKEEESKKVAEAALHQKKVKEKEKKLLRKEKTRLCTLAAPVVADSHFGMSKEDVESTCASLDMEQLKKLCDGMDGKDAAENARMMSNALRNESSSKEEKKIEANSVECPGGAVVVLRAVPGFFRGDGGDALVASLYLLGHHWEASCSLLHGALEGVNPVHPWTCDGGAIGVVPSLEAPHLRLVLVRGAMGDGGLELMRLVRWCPQCRWAACRSLRLLAWHSVDDGSAVRGGFFRFLSQFVVKPDSSKAFDSFLEKCKQAQSIASPLWTRDEISSSTEGARTASSKAPQPASSQTANGKAVVDPVPDEAPSVADPDAWTEAQVLALLQALKAFPKDASQRWERVAAAVPGHQSCCTVASRRMMPVDAFSERQTLNKNRGGGGAAEDRRRRLDLAPGRDPVGEERF

SEQ ID NO: 55782 - protein, 187 aa, Zea mays
  Coding DNA Sequence Number=SeqID_14003
  Gene Ontology: Mol. function=heat shock protein binding; Cellular component=nucleus; Biological process=protein folding
  Homolog annotation: Hit_ID=Q7X9Y1; Match level="QueryCoverage=78%, HitCoverage=22%, E-value=6e-62, Identity=73%"; Hit description =Gonidia forming protein GlsA
MDPSVRAYCACTAPDPPTDTEEAKQAKKDEIENHFKAHLGEAYEVLIDPAKRRIYDSTNEFDDNVPTDCSPQDFFKVFGPAFMRNRRWSVMQPIPSLGDHTTPIEDVDKFYNFWYNFKSWREFSDDDDYDLEQAESPEHKRWMERQNAKLHEKAKKVEYARVHTLVDTFVVWPNLGLNLVSCVLACL

SEQ ID NO: 55783 - protein, 325 aa, Zea mays
  Coding DNA Sequence Number=SeqID_14004
  Gene Ontology: Mol. function=heat shock protein binding; Cellular component=nucleus; Biological process=protein folding
  Homolog annotation: Hit_ID=Q7X9Y1; Match level="QueryCoverage=72%, HitCoverage=36%, E-value=1e-62, Identity=49%"; Hit description =Gonidia forming protein GlsA
MKKKKLMIPASHRMIKAKILILLLIPLAAKGRSHLVVDNRITMHYLCWGTRDCSPQAFFKVFGPAFMRNRRWSVMQPIPSLGDHTTPIEDVDKFYNFWYNFKSWREFSDDDEYDLEQAESPEHKRWMERQNAKLHEKAKKVEYARVHTLVDNVYKKDPRIQMRKEEHKAEKQRRKEAKYLTKKLQEEEATRAAEEERIRKEEESKKAAEAAQHQKKLKEKERKLLRKEKTRLRTIAAPVVADSHFGMSKEDVESTCASLDMEQLKKLCVGMDGKDAAEKARLMSNALRNESSSKEEKKIEAMVWNVLLQILTLHEVERQKAVAAY

SEQ ID NO: 55784 - protein, 118 aa, Zea mays
  Coding DNA Sequence Number=SeqID_14005
MTALGLRIYGPDLPTHTTNRNSDAETPSNDGARLRGGSTAPVSNCQKHGSAQAYATNGSEFHGEAPPCAAGWLKASAYNPGPRVRGTSENERLGRGVPQAETVRVSAHATRLTDGPRV

SEQ ID NO: 55785 - protein, 267 aa, Zea mays
  Coding DNA Sequence Number=SeqID_14006
  Subcellular localization annotation: CTP_CleavageSite=35; ConfidenceScore=5.33e-01
MQLIRAWKKETAHSLSPFLSNSLFASHHARTAGARAASAARGVNPCVQPRRPVLLDIAVVRARPVHFVVHAEPLPIVVVHVLPSDALAIFVYVKEFAMAQISERRPARPAVPPARLRVPAAHDRRGLPPMQHRLGLHVAGVLTACPRLARTPPWRSPRARHHRRSPEQHLAASVVVALLSSLRSGVYVALVVVEVSFVYPDLLSVYFMRKSPNLVPNHIVVAPRLSSCSCRERGDKDDVYDYGNGSPIHLPLGALNWYRSRSLPARD

SEQ ID NO: 55786 - protein, 81 aa, Zea mays
  Coding DNA Sequence Number=SeqID_14007
MAHGYRPNWADVHGGAAQADGGVLTGDRPSGTAEVHLLPQLVLREVYDTTNYMGSQTYQIQEPDVPPAAYGGSGLRFKNFF

SEQ ID NO: 55787 - protein, 591 aa, Zea mays
  Coding DNA Sequence Number=SeqID_14008
  Gene Ontology: Mol. function=protein kinase activity; Cellular component=integral to membrane; Biological process=protein amino acid phosphorylation
  Homolog annotation: Hit_ID=Q9LV84; Match level="QueryCoverage=99%, HitCoverage=67%, E-value=0.0, Identity=71%"; Hit description=ABC transporter-like
  Pfam annotation: Domain name=ABC1; Domain location=18-138; Score =177.0; E_value=4.6e-50; Accession=PF03109.7; Description=ABC1 family
MDQVPPFPSETAVKIVEEELGASVNEIFDRFDFEPIAAASLGQVHRARLNGQEVVIKVQRPGLKELFDIDLKNLRVIAEYLQKVDPKSDGAKRDWVAIYDECASVLYQEIDYMKEAFNAEKFAENFKKLDYVKVPEIYWAHTTPQVLTMEYVPGIKINRIKQLDKLGVDRKRLGRYAVESYLEQILSHGFFHADPTENIRLTVLDLLWKIPPQYTILSMKMIYSIEIASQSIRVETGDHVNAITDLYLCAEEHPGNIAVDDVNGGRLIFYDFGMMGSISQNIREGLLEVFYGVYEKDPDKVLQAMVQMGVLVPTGDMTAVRRTAQFFLNSFQERLAAQRKEREMATAELGFKKQLTKEEKFEKRKQRLAAIGEDLLAIAADQPFRFPATFTFVVRAFSVLDGIGKGLDPRFDITEIAKPYAKELLRFNDAGVEIVVKASFNIWSKLLTYLYDSTSPKALFGYSSISTYPDDAKKRWERQSRAFYNLFRQPDRVEKLAQIIERLEQGELKLRVRTLESERAFQRVAAVQKTIGYGVAAGSLMNLATMLYFNSIRGPATIAYSLCAFFGLQVLIGLVKVKKLDRQERLITGTA

SEQ ID NO: 55788 - protein, 274 aa, Zea mays
  Coding DNA Sequence Number=SeqID_14009
  Homolog annotation: Hit_ID=Q69S79; Match level="QueryCoverage=40%, HitCoverage=15%, E-value=4e-54, Identity=89%"; Hit description =Putative ABC transporter
  Subcellular localization annotation: CTP_CleavageSite=58; ConfidenceScore=5.48e-01
MSVASAAAAASLIASTSLSVPDRIRLHPRPALPPLPCFRRRSRVCLVRAILEDRPSPPAEEDAKRYGLNGNGSGLGYDDAAVQAYLGSNGNGSASGNGGAVKQNPEVAGSSAAIVPAPVPPAEGERRRKERVEEIGREDAWFKQSSAEVSVAPGGRWNRFKTYSTIQRTLEIWGFVFTFIFKAWLNNQKFTYRGGMTEEKKIMRRKVLAKWLKESLLRLGPTFIKIGQQFSTRVDILPQEYVDQLSELQGLRRPTEGLRQQQPWALQGGLDKDS

SEQ ID NO: 55789 - protein, 154 aa, Zea mays
  Coding DNA Sequence Number=SeqID_14010
MGFWRDAPRCGVAWRNGGRSGGARKRVPETPPGKQELGTREVVGKPRERHGGLGYLTWHSVIGRGKIDTSKKNPVDAYYMLRPADIAARAPEQRSGGSPRAADKPPRFLQPKSLTTSLWAAAFNRLYVLKVDDEVIRACTVERHQNGSPSTGDN

SEQ ID NO: 55790 - protein, 95 aa, Zea mays
  Coding DNA Sequence Number=SeqID_14011
  Homolog annotation: Hit_ID=Q69XZ5; Match level="QueryCoverage=45%, HitCoverage=5%, E-value=1e-12, Identity=86%"; Hit description =Putative transcriptional regulator
MAITVSNNYFTHHNKAGAHIIVAHMGLTTAGSIGAMTAATLDDSVLCVQAIADAAFGVKLISLFSITEGRRSAPKLKQSKRYINILYNSDEARET

SEQ ID NO: 55791 - protein, 789 aa, Zea mays
  Coding DNA Sequence Number=SeqID_14012
  Gene Ontology: Mol. function=protein serine/threonine kinase activity; Cellular component=integral to membrane; Biological process=protein amino acid phosphorylation
  Homolog annotation: Hit_ID=Q94IJ5; Match level="QueryCoverage=70%, HitCoverage=100%, E-value=0.0, Identity=76%"; Hit description=SERK2 protein precursor
  Pfam annotation: Domain name=LRRNT_2; Domain location=263-303; Score =55.8; E_value=1.4e-13; Accession=PF08263.3; Description=Leucine rich repeat N-terminal domain
  Pfam annotation: Domain name=LRR_1; Domain location=307-329; Score =12.5; E_value=1.3; Accession=PF00560.23; Description=Leucine Rich Repeat
  Pfam annotation: Domain name=LRR_1; Domain location=331-353; Score =13.8; E_value=0.61; Accession=PF00560.23; Description=Leucine Rich Repeat
  Pfam annotation: Domain name=Pkinase; Domain location=467-741; Score =141.8; E_value=1.9e-39; Accession=PF00069.15; Description=Protein kinase domain
  Pfam annotation: Domain name=Pkinase_Tyr; Domain location=467-741; Score=122.2; E_value=1.5e-33; Accession=PF07714.7; Description =Protein tyrosine kinase
  Pfam module annotation: Pfam domain module=LRRNT_2::LRR_1::LRR _1::Pkinase::Pkinase_Tyr; Domain location=263-303::307-329::331 -353::467-741::467-741
MNPDLRDRGLPGDERRGDVCRNATTAVYRARRGRRPGTTMRRHGACLEMRGGADSADASEEQDALSGKRGCDSGASFLLDGGPGGVRRGDGTGDAKLGGGELYESTPSLENDETGRTEDRVHEIPSGQRPHAAMSADARRGGASTSPLLPSLLLPTTLLPSSHPPHSPRDREHAACARNRVALSLPRGPERSLVPHVGDVLRWGAPSSASAHQRWGDPRAHAPVRWWGPLGARVGMAASASAGRWWAVVLAVAVLLGPGRVVANTEGDALYSLRQSLKDANNVLQSWDPTLVNPCTWFHVTCNNDNSVIRVELYSNNISGTIPPELGNLTNLVSLDLYMNNFSGNIPDSLGNLVKLRFLFANNPNLCGPGTSKPCPGAPPFSPPPPFNPPSPPTQSTGASSTGAIAGGVAAGAALVFAVPAIAFAMWRRRKPEEHFFDVPAEEDPEVHLGQLKKFSLRELQVATDNFSNKNILGRGGFGKVYKGRLADGSLVAVKRLKEERTPGGELQFQTEVEMISMAVHKNLLRLRGFCMTPTERLLVYPYMANGSVASRLRERQPSEPPLSWEPRRRIALGSARGLSYLHDHCDPKIIHRDVKAANILLDEDFEAVVGDFGLAKLMDYKDTHVTTAVRGTIGHIAPEYLSTGKSSEKTDVFGYGIMLLELITGQRAFDLARLANDDDVMLLDWVKGLLKEKKVEMLVDPDLQKAYEEVEVESLIQVALLCTQGSPLDRPKMSEVVRMLEGDGLAERWDEWQKVEVVRQEAESAPLRNDWIVDSTYNLRAVELSGPR

SEQ ID NO: 55792 - protein, 127 aa, Zea mays
  Coding DNA Sequence Number=SeqID_14013
  Gene Ontology: Mol. function=nucleic acid binding; Cellular component= intracellular
  Homolog annotation: Hit_ID=Q2Z1Y7; Match level="QueryCoverage=94%, HitCoverage=38%, E-value=2e-30, Identity=48%"; Hit description=Pm27 protein
  Pfam annotation: Domain name=DUF1644; Domain location=1-125; Score =152.1; E_value=1.5e-42; Accession=PF07800.3; Description=Protein of unknown function (DUF1644)
MDHPHNAVLLVCSSHEKGCRPFMCDTSSRHSNCYDQYRKASKDSSKDSGTECSECQQQVQLSCPLCRGPVSDCIKDYDARRYMNTKVRSCTMESCEFRGAYQELRKHARVEHPAARPMELNTWANPL

SEQ ID NO: 55793 - protein, 123 aa, Zea mays
  Coding DNA Sequence Number=SeqID_14014
MALPMQTLAAILALPMRANRPFLRMQAGGVQRGDAGASARERARERGRWRESCGYLPPSRCDRCYIPPPPSPSSARPALLSPPVTGAEFLPSSPYFFFFVQIRGGFVLYLSSVKWHDLGSLMP

SEQ ID NO: 55794 - protein, 61 aa, Zea mays
  Coding DNA Sequence Number=SeqID_14015
MEFFARVDRCEEVLTVGIFVRPQGLRNFKLSRPPVPENAVGRTARRLAAEKDKEKKDAEKA

SEQ ID NO: 55795 - protein, 1054 aa, Zea mays
  Coding DNA Sequence Number=SeqID_14016
  Gene Ontology: Mol. function=ATP-dependent helicase activity; Cellular component=intracellular; Biological process=RNA processing
  Homolog annotation: Hit_ID=Q9SP32; Match level="QueryCoverage=99%, HitCoverage=62%, E-value=0.0, Identity=70%"; Hit description =Endoribonuclease Dicer homolog
  Pfam annotation: Domain name=DUF283; Domain location=77-150; Score= -10.2; E_value=0.021; Accession=PF03368.5; Description=Domain of unknown function
  Pfam annotation: Domain name=PAZ; Domain location=364-503; Score =95.0; E_value=2.3e-25; Accession=PF02170.12; Description=PAZ domain
  Pfam annotation: Domain name=Ribonuclease_3; Domain location=537-684; Score=142.6; E_value=1e-39; Accession=PF00636.16; Description=RNase3 domain
  Pfam annotation: Domain name=Ribonuclease_3; Domain location=759-863; Score=144.2; E_value=3.5e-40; Accession=PF00636.16; Description =RNase3 domain
  Pfam annotation: Domain name=dsrm; Domain location=887-947; Score =42.4; E_value=1.5e-09; Accession=PF00035.15; Description=Double -stranded RNA binding motif
  Pfam annotation: Domain name=dsrm; Domain location=971-1043; Score =42.3; E_value=1.7e-09; Accession=PF00035.15; Description=Double -stranded RNA binding motif
  Pfam module annotation: Pfam domain module=DUF283::PAZ::Ribonuclease _3::Ribonuclease_3::dsrm::dsrm; Domain location=77-150::364-503::537 -684::759-863::887-947::971-1043
VTLLVATSVAEEGLDIRQCNVVIRFDLAKTVLAYIQSRGRARKPGSDYILMLERGNMSHEAFLRNARNSEETLRKEAIERTDLSHLDGTSMLSPVDISPDSMYQVESTGAVVSLNSAVGLAVCLAACKKLHEMGAFTDMLLPDRGSGEGEKTEQNDEGDPLPGTARHREFFPEGVAEILHGEWILSGRDGYQSSQFIKLYLYSVNCVNIGTSKDPFVTQLSNFALIFGNELDAELILLKSFHVRLMSIVLDVDVDPSTTPWDPAKAYLFVPVGAEKCMDLLREIDWTLVNSIVNSDAWNNPLQRARPDVYLGTNERTLGGDRREYGFGKLRHGTAFGQKAHPTYGIRGAIAEFDVVKASGLVPGRGWGHFNDYQNKGKLFMADSCWDAKDLAGMVVTAAHSGKRFYVDSICYNMNAENSFPRKEGYLGPLEYSSFADYYKQKYGVELVYKKQPLIRARGVSYCKNLLSPRFEHSEASNGEFSENLDKTYYRLPSIMRRVESMLLAIQLKDIIGYPVPANKILEALTAASCQETFCYERAELLGDAYLKWVVSRFLFLKYPQKHEGQLTRMRQQMVSNMILYQYALNKNLQSYIQADRFAPSRWAAPGVLPVFDEETRDSEPSIFDEEFTPSSELQKNLYDDYDGDSMQEDGEIEGDSSCYRVLSSKTLADVVEALIGVYYVAGGKIATNHLMKWIGINAELDPQEIPSSKPYNIPESIIKSINFDTLEGALGIKFQNKGLLVEAITHASRPSSGVSCYQRLEFVGDAVLDHLITKHLFFTYTDLPPGRLTDLRAAAVNNENFARVAVKHKLHVHLRHGSSALETQEELSKPGFNSFGLGDCKAPKVLGDIFESIAGAIFLDSGCATSVVWKPLLDPMVTPDTLPMHPVRELQERCQQQAEGLEYKASRTGNVATVEVLVDGIQIGVAQNPQKKMAQKLAARNALVVLKEKETAAKKDTEKDGEKKNGSQFTRQTLNDICLRRQWPMPQYRCINEGGPAHAKRFVYAVRVNTSDSGWTDECIGEPMPSVKKAKDSAAVLLLELLNRNYRGKPDGK

SEQ ID NO: 55796 - protein, 220 aa, Zea mays
  Coding DNA Sequence Number=SeqID_14017
  Subcellular localization annotation: CTP_CleavageSite=26; ConfidenceScore=5.18e-01
EYLCGSPAILAPTRPHHPQGRYHAPRSSPLRAILAPRAPAHLARAPLPLPPSSPRKGLSSRKGAPSPAPVVSAPSLDPGFAQVASPRKVPTTRGQGAWWVGKTGRSRGVGEAQHRQHVHGARVPQEEGQQEQGGWAVLQEESWRRARTTAEQELPQRRRMAPWYWARASVPRMLEFAERAPSSSDASRFHKREISQARLQKYHGVTNLDMTSGGSFIATG

SEQ ID NO: 55797 - protein, 106 aa, Zea mays
  Coding DNA Sequence Number=SeqID_14018
  Gene Ontology: Mol. function=rRNA binding; Cellular component=small nucleolar ribonucleoprotein complex; Biological process=rRNA processing
  Homolog annotation: Hit_ID=Q2R242; Match level="QueryCoverage=56%, HitCoverage=30%, E-value=2e-27, Identity=95%"; Hit description=H/ACA ribonucleoprotein complex subunit 1-like protein 1, putative, expressed
  Pfam annotation: Domain name=Gar1; Domain location=41-105; Score =97.2; E_value=5.1e-26; Accession=PF04410.5; Description=Gar1 protein RNA binding region
MRPPRGRGGGGRFGGGGGRGGGGGRFGGGGRGGRFGGGFRDEGPPAEVVEVSTFVHACEGDAVTKLTNEKVPYFNAPIYLQNKTQVGKVDEIFGPINESVSISSPP

SEQ ID NO: 55798 - protein, 138 aa, Zea mays
  Coding DNA Sequence Number=SeqID_14019
  Gene Ontology: Mol. function=identical protein binding; Biological process=negative regulation of enzyme activity
  Homolog annotation: Hit_ID=Q6EPJ5; Match level="QueryCoverage=62%, HitCoverage=15%, E-value=2e-15, Identity=41%"; Hit description =Putative subtilisin-like serine proteinase
MGWRPHVVSVSSSALLVLLQLLVLLMLPADASSSSQLFLERTQTTTTTIYVVYMGEKKHDDPSLVVASHHATLASVLGRIPWSCEREPNTYHHVHTTRSWDFLGMSYGQQRWSSWSSSSRLLRNAKYGTYVIVGVRHS

SEQ ID NO: 55799 - protein, 177 aa, Zea mays
  Coding DNA Sequence Number=SeqID_14020
  Homolog annotation: Hit_ID=Q75GP2; Match level="QueryCoverage=33%, HitCoverage=8%, E-value=5e-19, Identity=72%"; Hit description =Expressed protein
MASSSPQQHTEVGSSSNLAQFRNSGIISMNMGDIICNIYDHETVNAAAASVSPGPVDPSQACIVETDSQVMQVEEEHIEPLREQVWWQQILIDNLVGYDTIPTNSLVISPGHGYLYNFEMKELYGLSYRHETPEGPTRFGEGMLTPLDPNPLFTPNLSHLEHLLFLRFISNLHRFKC

SEQ ID NO: 55800 - protein, 490 aa, Zea mays
  Coding DNA Sequence Number=SeqID_14021
  Gene Ontology: Mol. function=oxidoreductase activity; Cellular component=intracellular; Biological process=lignin catabolic process
  Homolog annotation: Hit_ID=Q339K6; Match level="QueryCoverage=94%, HitCoverage=90%, E-value=1e-113, Identity=66%"; Hit description =Multicopper oxidase family protein, expressed
  Pfam annotation: Domain name=Cu-oxidase; Domain location=122-274; Score=127.1; E_value=4.9e-35; Accession=PF00394.12; Description =Multicopper oxidase
  Pfam annotation: Domain name=Cu-oxidase_2; Domain location=317-459; Score=153.4; E_value=5.8e-43; Accession=PF07731.4; Description =Multicopper oxidase
  Pfam annotation: Domain name=Cu-oxidase_3; Domain location=2-111; Score=197.2; E_value=3.8e-56; Accession=PF07732.5; Description =Multicopper oxidase
  Pfam module annotation: Pfam domain module=Cu-oxidase::Cu-oxidase _2::Cu-oxidase_3; Domain location=122-274::317-459::2-111
MTHLCEETPVTVVNGQLPGPAIEVTEGDSVAVHVINKSPYNMTIHWHGVKQRMNCWADGVPMVTQCPIRPNHSFTYRFSVAGQEGTLWWHAHVSCLRGSVHGALIIRPRHGASSYPFPKPHKEVPLVIGEWWQTDLGQIDKSLAVGFFGFNPSSATLNGKLGDLNNCSSGGVTEEGYVLEVEAGKTYLLRLINAALISEYYLKIAGHRFTVVAADANYVKPYATDVIAIAPGETVDALLVADAAPGRSYYVVALANQPSVANPPAESCERGGSLESIIVATMNNASFQLPAAAAKTILEAHYDHTHNHTAAGELYTPLPERPPWPFNFTDRAFIPIGPVEAPLEPTRKATTGRRFRYGDAVEVVFQNTAVMQSDYNPMHLHGHDMFVLAQGRGNFDAARDAARFNLVDPPVRNTVLVPSLGWAVVRFVADNPGVWYVHCHYEFHVAVGMATVFVTEEGGRADGQLNSSSTAGRSPQFCTEGTFRPMATRA

SEQ ID NO: 55801 - protein, 271 aa, Zea mays
  Coding DNA Sequence Number=SeqID_14022
  Gene Ontology: Mol. function=hydrolase activity, hydrolyzing O -glycosyl compounds; Cellular component=anchored to membrane; Biological process=carbohydrate metabolic process
  Homolog annotation: Hit_ID=Q2R256; Match level="QueryCoverage=91%, HitCoverage=56%, E-value=3e-36, Identity=40%"; Hit description =Glucan endo-1,3-beta-glucosidase 5, putative, expressed
  Pfam annotation: Domain name=X8; Domain location=160-241; Score=28.8; E_value=4.7e-08; Accession=PF07983.3; Description=X8 domain
  Subcellular localization annotation: CTP_CleavageSite=70; ConfidenceScore=5.09e-01
MADMVRFLNRSGAPLTVNIYPFLSLYGNDDFPAGLRLSSNGGRRVRPVVDGPGPSTTNVVRRQLRQRWVSAASRRVGLGHLPVMYRRRSGWPTDGRQARHGGPSGSRFLRGAPPAARGRRRHAAPAGARGIGAYLFGLVDEDAKERGAGQLRAPLGHLHLRRAAPSSRWTCAATGGRRCPSRPGAWSTCPGGAAARWTPRGNASYAFNAYYQAQGQVESACDFQGLAVVVDEDASQGACNFSVQLVGSGAPVATAVTTMAAVLVPLFLVLL

SEQ ID NO: 55802 - protein, 68 aa, Zea mays
  Coding DNA Sequence Number=SeqID_14023
  Homolog annotation: Hit_ID=Q2QQM5; Match level="QueryCoverage=91%, HitCoverage=8%, E-value=4e-12, Identity=51%"; Hit description =Pumilio-family RNA binding repeat containing protein, expressed
MACNLNELMHDPKLLHIILDRYGNFVIQTAFKQCQSKQYAAFVETIRLHTAAMLNNMYGKMVLSSIHA

SEQ ID NO: 55803 - protein, 305 aa, Zea mays
  Coding DNA Sequence Number=SeqID_14024
MAPSSASFCSSAVTNMLAEAPAREDASAMLSDSGSSGLAVVSSDMVRSIPSYGLLVGGAVDLILLVLCLGGDGCGDGGAGRAHAGRDGSRALEVTVLRQDDMIRSELGSNPFLAPFPRLIPPRRSLTSSPCPSPETSTSTRSESNFPAATAPTTPAPQSRRCPSTIAASGAGESQYHPSAAAPHCLRSPLPPQSADSAGHHIPPPLAHLFLAARRPFPSDADQNRNSTTPWALASFTLFPSLSSLLLSCAYLPPSPLNNPKKSHPVCLSPPGFASPEQTLFHPGPTAYPRVHEAFLGCPWRGHGE

SEQ ID NO: 55804 - protein, 217 aa, Zea mays
  Coding DNA Sequence Number=SeqID_14025
  Homolog annotation: Hit_ID=Q75GP1; Match level="QueryCoverage=93%, HitCoverage=97%, E-value=7e-24, Identity=49%"; Hit description =Expressed protein
MVGEDNAAAPTQDFGLPAELIAVLPSDPFAQLDVARKITSIALSHRLGLLEAEAARLRSQLAERDAEAEDLREHVEQLDAALAVATGRLRHAEEEKDALQRDNSELSNTVRKLNRDVAKLEVFKKTLVQSLQEDDSSDVHIILVPIGRTRVDGKEFFRQVRNRLSYEQFGAFLANVKELNAHRQTREDTLRQAYEIFGPENKDLFTIFEGLISRNIR

SEQ ID NO: 55805 - protein, 332 aa, Zea mays
  Coding DNA Sequence Number=SeqID_14026
  Subcellular localization annotation: CTP_CleavageSite=7; ConfidenceScore=5.18e-01
MQLPRVVAALASRTKPSRGASTCRLPQQPLSCVGRHALWLDTRNQAHIVRRVTHSRTPELMLADAVGPGTRDHQPALSRATGRRRHTTKREEGLADAKPAGCTALPVHLTERLDALLHPCSFPTPKQAPPLEDHHLHGADPTRGKQLNTNGLARQTFSAVNLQQVGKCNSIESLNTAIVSGKTENGNNGYISTPPETKASIRSLSSYSLLDGHVDGMLSPNSASHKPETTNNSVLSNAASTDVQNGCLTTVDSGQQEASHSHSSVEFTQYFQEGYCKISELDDCRELTEAVTDADSSSSHCEREKPEEDGDNDDLLGGVFAFSEEGSSHLFI

SEQ ID NO: 55806 - protein, 660 aa, Zea mays
  Coding DNA Sequence Number=SeqID_14027
  Gene Ontology: Mol. function=RNA-directed DNA polymerase activity; Cellular component=intracellular; Biological process=RNA-dependent DNA replication
  Homolog annotation: Hit_ID=UPI00004C1731; Match level="QueryCoverage =99%, HitCoverage=52%, E-value=0.0, Identity=77%"; Hit description =UPI00004C1731 related cluster
  Pfam annotation: Domain name=RnaseH; Domain location=267-394; Score =12.8; E_value=3.7e-06; Accession=PF00075.14; Description=RNase H
  Pfam annotation: Domain name=rve; Domain location=396-571; Score =97.7; E_value=3.5e-26; Accession=PF00665.16; Description=Integrase core domain
  Pfam module annotation: Pfam domain module=RnaseH::rve; Domain location=267-394::396-571
MSFGLRNAGATYQRCMNHVFGEHIGRTIEAYVDDIVVKTRKASDLLSDLEVTFRCLKAKGVKLNPEKCVFGVPRGMLLGFIVSERGIEANPEKIAAITSMGPIKDLKGVQRVTGCLAAQSRFISRLGERGLPLYRLLRKVECFTWTPEAEEALGNLKALLTNAPILAPPAAGEALLIYVTATTQVVSAAIVVERREEGHALPVQRPVYFISEVLSETKIRYPQVQKLLYAVILTRRKLRHYFESHPVLADFVAEWVDTQLPTVPIQPKLWTMFFDGSLMKTGAGAGLLFISPLGKHLRYVLRLRFPASNNVAEYEALVNGLRIAIELGVRRLDARGDSQLVIDQVMKNSHCRDPKMEAYCDEVRRLEDKFYGLELNHIARRYNETADELAKIASGRTTVPPDVFSRDLHQPSVKIDDTPEPEAPSAQPEKAPGGYTHLLVAIDKFSKWIEVRPLNSIRSEQAVAFFTNIIHRFGVPNSIITDNGTQFTGRKFLDFCEDHHIRVDWAAVAHPMTNGQVERANGMILQGLKPRIYNDLNKFGKRWMKELPSVIWSLRTTPSRATGFTPFFLVYGAEAVLPTDLEYGSPRTRAYADQSNQANREDSLDQLEEAQDMALLHSARYQQSLRRYHARGVRSRDLQVGDLVLRLRQDARGRHKLTPP

SEQ ID NO: 55807 - protein, 167 aa, Zea mays
  Coding DNA Sequence Number=SeqID_14028
MPDRLRSPVGNSGKAELKVTDSLIDLGIVTGNEQYSLPELLSHCRMMTLFASDDGWCSFNHLGFRNFRLMDYGSQPPAHYCAACALEAEHFPRIALPQFSDYNFSPPFSDFYHLSVVIGKARDNPRGSKPSTDDSSSTNTLPLEPYSTILCDSWLPNHSPNSTPIPT

SEQ ID NO: 55808 - protein, 86 aa, Zea mays
  Coding DNA Sequence Number=SeqID_14029
MGADRFPSVAEGGLGGEALYCAVILWLSVTSWIIFTWAGDGGEGGRRRRGGGRSRGSPAFVGASGLCDGTGPECSGGYGICGTCLD

SEQ ID NO: 55809 - protein, 340 aa, Zea mays
  Coding DNA Sequence Number=SeqID_14030
  Homolog annotation: Hit_ID=Q2L3T9; Match level="QueryCoverage=30%, HitCoverage=50%, E-value=5e-33, Identity=70%"; Hit description=Hap5 -like protein
  Pfam annotation: Domain name=CBFD_NFYB_HMF; Domain location=221-285; Score=54.9; E_value=2.7e-13; Accession=PF00808.13; Description =Histone-like transcription factor (CBFNF-Y) and archaeal histone
  Pfam annotation: Domain name=Histone; Domain location=215-288; Score =20.5; E_value=0.0013; Accession=PF00125.14; Description=Core histone H2AH2BH3H4
  Pfam module annotation: Pfam domain module=CBFD_NFYB_HMF::Histone; Domain location=221-285::215-288
MTSIALKLPTKAKKRQQDPEPHRQLRFYRAQALLRRPLVLVLVLRTHFASSSHHWPAAPESMDPSQSGTPSLFPVMDIPVAYPPAAYPPCEVAVAAAAYPRLLYAPPDAAAAQQAAAAQQQQQLLGAPVVCPPAAYPPGEVAVAAAAYPPQLYAPPDAAAAQQATAAQQQLLGAPVRVAYAPPDAAAVQQAAAAQKHKHQLQMLWLELRREIEATTDFKKHNIPLSRIKKIMRADPDVCAITAEVLVVFPWACEMFILELTRHGWAHAEANKRRMLQKSDIVAAIARTDVFDFFRDTVLHDDAKEGADAAPAAAAAAEKAHPAAGAPATDPLANYPMPQQ

SEQ ID NO: 55810 - protein, 119 aa, Zea mays
  Coding DNA Sequence Number=SeqID_14031
MGPTADYCDEQSGPPMGFTEWPPEQLQLVRMSHEDDFAWPVWQILAASLDYLSCPRSGAGGAQRGRATARTATSTKFLLQFCEQAHKDPASKKKSATCWEKFDPMFVSLSGSIQIFLFV

SEQ ID NO: 55811 - protein, 527 aa, Zea mays
  Coding DNA Sequence Number=SeqID_14032
  Gene Ontology: Mol. function=transporter activity; Cellular component= intracellular; Biological process=transport
  Homolog annotation: Hit_ID=Q69QR7; Match level="QueryCoverage=99%, HitCoverage=100%, E-value=0.0, Identity=63%"; Hit description =Putative phosphatidylinositol transfer-like protein II|
  Pfam annotation: Domain name=CRAL_TRIO; Domain location=143-329; Score=150.8; E_value=3.5e-42; Accession=PF00650.10; Description =CRALTRIO domain
  Pfam annotation: Domain name=CRAL_TRIO_N; Domain location=57-126; Score=48.3; E_value=2.6e-11; Accession=PF03765.5; Description =CRALTRIO, N-terminus
  Pfam module annotation: Pfam domain module=CRAL_TRIO::CRAL_TRIO_N; Domain location=143-329::57-126
MSVSHADEHEISLCDPSSEDDRRRRKIGSLPLKAIHALRKKRARRRVTDFRFPAAISIEDVRDAEEERAVAAFRDRLAAHRLLPDKHDDYHMMLRFLKARKFDSDKAMQMWSEMLRWRKEFGTDTILEDFEFDELNDVLHYYPQGYHGVDREGRPVYIERLGKVDPNKLMQITSVDRYIKYHVQEFERAFRERFPACTLSAKRHIDSTTTILDVHGVGFKNFSKTARELVQRMQRIDSDYYPETLHQMYVVNAGSGFKLIWNSVKGFLDPKTSSKIHVLGSNYQSRLIEVIDSSELPKFLGGSCTCSEKGGCLRSNRGPWNDPVIMKGMLSDISNAESESDVDDVGLTVVQKSTDHSLLTPVHEEVKGSDTSIFCSSSRNAYISLHGTSAGRTLENLATGLITLLIRISSFFHLSVYRQERFIETVQPCAAAQEPEPQREEDMSACLRRLKKLESLCDHLMSKPPDMPKEKELVLMQSFDRIKSLEAELEATKNALQAAVEKQMELVETVEALQHQSTSVRRRFCCS

SEQ ID NO: 55812 - protein, 571 aa, Zea mays
  Coding DNA Sequence Number=SeqID_14033
  Gene Ontology: Mol. function=binding; Cellular component =intracellular; Biological process=protein kinase C activation
  Homolog annotation: Hit_ID=Q1SV87; Match level="QueryCoverage=76%, HitCoverage=81%, E-value=2e-76, Identity=35%"; Hit description =Pentatricopeptide repeat
  Pfam annotation: Domain name=PPR; Domain location=157-191; Score=8.3; E_value=0.79; Accession=PF01535.11; Description=PPR repeat
  Pfam annotation: Domain name=PPR; Domain location=227-260; Score =16.1; E_value=0.091; Accession=PF01535.11; Description=PPR repeat
  Pfam annotation: Domain name=PPR; Domain location=289-323; Score =35.4; E_value=2e-07; Accession=PF01535.11; Description=PPR repeat
  Pfam annotation: Domain name=PPR; Domain location=390-424; Score =48.5; E_value=2.2e-11; Accession=PF01535.11; Description=PPR repeat
  Pfam annotation: Domain name=PPR; Domain location=425-458; Score =22.8; E_value=0.0012; Accession=PF01535.11; Description=PPR repeat
  Pfam annotation: Domain name=PPR; Domain location=461-495; Score =10.5; E_value=0.43; Accession=PF01535.11; Description=PPR repeat
  Pfam module annotation: Pfam domain module=PPR::PPR::PPR::PPR::PPR::PP R; Domain location=157-191::227-260::289-323::390-424::425-458::461 -495
  Subcellular localization annotation: CTP_CleavageSite=12; ConfidenceScore=5.36e-01
MPPWGDQAAAPRGSTTRGSAQQPNAPMHGGTLELHPFLAPAFRRTTSLTTGRIVAAAVFPVISALIPGVNIQGIKERKPPDFVTSRRRYMNRSICHHLLAHCKKLRELQRIHALAVTHGLHPNHQSVSCKIFRCYADFGHVADARKLFDEIPHPDLIFFTSLMSLHLKLDHQREAISLFARVVAAGHHLDGFAVVGALSASSGAGDLVVGRAVHGLIFRLGLDHEVVVGNALIDMYSQCGEFESAVKVFDRMFLKDEVTWGSMLHGHIKCAGLDSALSFFDLVPVRSAVAWTTLITGHVQGRQPVRALELFGRMVLEGHRPTHVTIVGVLSACADIGALDLGSVIHGYGSKCNASSNIIVSNALMDMYAKSGRIEMSFSVFQEIQSKDFFTWTTMISCCTVQGDGRKALELFQDMLRAGIVPNSVTFVSVLSACSHAGLIEEGRELFNRMRQVYKIDPRLEHYGCMIDLLGRGGLLEEAEDLIADMNLVPDIVIWRSLLSACLVHGNNRLAEIAGKEIIKIEPGDDGVYVLLWNMMNLINQKYTTQMGKRLFMSRNIGAKSVAVVSRNQLI

SEQ ID NO: 55813 - protein, 623 aa, Zea mays
  Coding DNA Sequence Number=SeqID_14034
  Homolog annotation: Hit_ID=Q65XP4; Match level="QueryCoverage=99%, HitCoverage=99%, E-value=1e-177, Identity=51%"; Hit description =Putative transcription factor
  Pfam annotation: Domain name=XH; Domain location=486-619; Score =119.3; E_value=1.1e-32; Accession=PF03469.5; Description=XH domain
  Pfam annotation: Domain name=XS; Domain location=107-216; Score =115.5; E_value=1.5e-31; Accession=PF03468.5; Description=XS domain
  Pfam annotation: Domain name=zf-XS; Domain location=38-78; Score =65.3; E_value=1.9e-16; Accession=PF03470.5; Description=XS zinc finger domain
  Pfam module annotation: Pfam domain module=XH::XS::zf-XS; Domain location=486-619::107-216::38-78
MDYTSDGDSEVEAYGSSTFELLESGDLKMMSDEGLYRCPFCSDDEKDHSLNDLLQHASIVGAAHDRQAKEKADHRALARHLKGKPVESPGALLQPMLMDVQDPEHTQDEQFVWPWMAILVNMPNEFFGKSANRLKEHYSSFRPVKVHPVYSKGRPTRDAVIEFGNDWRGFRNARAFDGHFAMKGYSKNCWKEMKCGGTETVGWMARADDYNSLGAIGELLRKNGDLKTLKDIGSEGANKTERLLSNLACKVKEKEIYLEKLESEYNKRSASLNIMMQKREQRLQSYNQEILKMRKLGQQNTQRVVEENWKLQSNIQDMVDELDARNKQIEESEHDKRNLEQEKLKNAMRTSHLRLAALEQEKAGENVQKLVDKQTRETKTILDDFLRLNTQLEMRQKLELEIKHLSGKLHLMELKPGDEDPISREKMAKLKEELKEKIEELNDAENYNQDIISRESKISDELREARELMINALQSLSGSSDCPTQIGVKKVGELDLSVFLNLCKRKFPAVDAEVESARLCSKWQNDIENPEWHPFKVIIVDGKVSEALNEGDKKLQEVKELGEEPYAAVTKALTELKDGNGGRRDPFPELWNYHLDRKAKTVEAVRHALALWKASKTKGKRSR

SEQ ID NO: 55814 - protein, 104 aa, Zea mays
  Coding DNA Sequence Number=SeqID_14035
MSTSEKKGDERWNKVKHILDCLDNKVGCDGGRTSLTSGSGGKDRGGARDFGCQVEIGKTVAHLQLELMATYMEGMESGSRRENQIYSGPEHGRREWAFENAGKR

SEQ ID NO: 55815 - protein, 234 aa, Zea mays
  Coding DNA Sequence Number=SeqID_14036
  Homolog annotation: Hit_ID=O82294; Match level="QueryCoverage=74%, HitCoverage=71%, E-value=9e-25, Identity=36%"; Hit description =Similar to harpin-induced protein hin1 from tobacco
  Pfam annotation: Domain name=Hin1; Domain location=70-214; Score =126.2; E_value=9.3e-35; Accession=PF07320.4; Description=Harpin -induced protein 1 (Hin1)
MNHHPQEGVVYGYTEVTYLASTGPPPPYHPPPPLPPPPPPPPRRPSPFRIIVRVFIGVCVFIGVLALLIWLIYRPRTIQVAVATATLARFDLNTTSIFTPPVLSYNLTVMLSVSNPNRRVSVYYDQLQAAGLYQEERFGRAALPVSFQGTRRADAVPALLVGDTPMGFGDSGVAAFGEDRRAGVFPVDLWVEGVVRYKFGELMTTTASTLTIKCHLALKLMQASGWVECTVSDS

SEQ ID NO: 55816 - protein, 864 aa, Zea mays
  Coding DNA Sequence Number=SeqID_14037
  Gene Ontology: Mol. function=protein serine/threonine kinase activity; Biological process=protein amino acid phosphorylation
  Homolog annotation: Hit_ID=Q94CU5; Match level="QueryCoverage=95%, HitCoverage=99%, E-value=0.0, Identity=58%"; Hit description =Putative LSTK-1-like kinase
  Pfam annotation: Domain name=Pkinase; Domain location=8-156; Score= -10.5; E_value=6.2e-08; Accession=PF00069.15; Description=Protein kinase domain
  Pfam annotation: Domain name=Pkinase_Tyr; Domain location=8-156; Score=-134.8; E_value=0.00034; Accession=PF07714.7; Description =Protein tyrosine kinase
  Pfam module annotation: Pfam domain module=Pkinase::Pkinase_Tyr; Domain location=8-156::8-156
MESRMDQYEVLEQIGRGAFGAAILVNHKTEKKKYVLKKIRLARQTERCRKSAHQEMALIARLQHPYIVEFKEAWVEKKLLRWFAQLALAVDYLHSNFVLHRDLKDMAGLISKINRSSIGPLPTFYSSSMKTLIKSMLRKSPEHRPTASEIIKNPYLQPYVNQYRPFANILHPGRSPEKPGTDSRSSQKSMSGSQCSSISGTGSDMDSIQSNERNTSGLASSSSNTIDTEGAETTELQRHKDTACPGLKRQDSSKSVQDNQHPGHENKQPKIIKKILTTLREESKFRESNSPVRASRVKLNSPSNRERSSDDSKQSDISSSSRSSEVMSHESANASCEPVKRGHASPPLKHLSPIVEHSPKVKIKVDELLHPHLAKQVGEVVDAAAGKVKNRTPPIFIKCTSIPTRRQGVASPSRQHTGVKRAHNKVMAEHARNPCQHLHSPSNALVKLPSVPMVPPSHLEDLKRKPDNTRAKSAPPRALATKEDNSACSSSTIGNAENTNQSEPSEPDSPTYLVSSCKCLIPDTIIQKHGITSKKSSEIITTNCEKKMTSNGDLSLSAAMVQSSDIPEQEFICKDGMLSSQVGQCSETVTVPSDEDKFTVRELLSSVPDLCSLVPTTMMNTEPGRGPTLTQSSEKPSGPHLNPPPVEDIIHVISHSSFHVNGEQAVKETGSESIDVDKRLNMVREEIGVRSTEPNLIPSGPIDSDTVKPNVVEANITFQKPSSTDAIKLPTIPEGNFSTLETNNGFKQEAAPAKEILDVTSFRQRAEALEGLLELSAELLEHSRLEELAIVLKPFGKAKVSPRETAIWLAKSFKGLMNDEASRSSTWSSICSQAASPLSISAVAACVPALLLLPSPNAPSLGAE

SEQ ID NO: 55817 - protein, 239 aa, Zea mays
  Coding DNA Sequence Number=SeqID_14038
  Homolog annotation: Hit_ID=Q94CU7; Match level="QueryCoverage=70%, HitCoverage=71%, E-value=1e-37, Identity=50%"; Hit description =Putative harpin inducing protein
  Pfam annotation: Domain name=Hin1; Domain location=70-209; Score =119.4; E_value=1e-32; Accession=PF07320.4; Description=Harpin -induced protein 1 (Hin1)
MAAYEKQQRPETPLNAAYYGQPIPPPQPPAYYPPPPPPPPVPRRGGRSRCLLGSVVALVVALGVATLVLWLIFRPDNLRAYADSAALSRFDLGSGGDLLQYNLTVDIRVRNPNRFGIRYDYAEAQAFYDGDRFGFDPLQPFYLGRRSDARVTGHVQRLGGDGRRRRPRCARTGGESGEGFYYVTVKVYSDLSFRVRVVRRHDFKSKITCVLRLPVPAAGGNANSTTAMTTLGTRCDVDF

SEQ ID NO: 55818 - protein, 213 aa, Zea mays
  Coding DNA Sequence Number=SeqID_14039
  Homolog annotation: Hit_ID=Q2QXG2; Match level="QueryCoverage=28%, HitCoverage=23%, E-value=2e-10, Identity=54%"; Hit description =Uncharacterized plant-specific domain TIGR01568 family protein, expressed
  Pfam annotation: Domain name=DUF623; Domain location=146-207; Score =88.1; E_value=2.6e-23; Accession=PF04844.4; Description=Protein of unknown function, DUF623
  Subcellular localization annotation: CTP_CleavageSite=45; ConfidenceScore=5.43e-01
MSSGTGTGRSSTRRGRGGSFTLRHQPPVVDIGCNCRRPKLFSVFSSSLFRGGGKPKSPNASSTSTTTAFTATTAGGRSRSGTTTATSTDSSSWGPRVQQQRRRRSRRAPAPARHGAVAEEEVDGEEQEQEYGRRVARESVAVAVDSAEPYEDFRESMVQMVVEKEIYAWDDLNDLLHQFLSLNSPRHHPLILHAFADLWTRNGLFCPPSPCQF

SEQ ID NO: 55819 - protein, 124 aa, Zea mays
  Coding DNA Sequence Number=SeqID_14040
MSRNNGKASKLELLRMGLSRARGGPSATARPGGGQRQQRPRDDVAAPGVLLVLVHRVAAELVRVVRGQPRRGRRRAGAHGPGRVPPVHDSERNGELRYVQRGPVQYDHRCRNVSWGQTQITENP

SEQ ID NO: 55820 - protein, 258 aa, Zea mays
  Coding DNA Sequence Number=SeqID_14041
  Homolog annotation: Hit_ID=Q6BTJ4; Match level="QueryCoverage=56%, HitCoverage=28%, E-value=8e-12, Identity=40%"; Hit description =Similar to CA1621|CaIFF6 Candida albicans CaIFF6 unknown function
ESFGESSGVEPWSGEAGFVVFRFLGRVEPGSGEAEVRRLRVLARVRAWGRRSGVRHLPGLARVRALGSGGAEFAVFRVLARVRALGSGGAEFAVFRVLARVRALGSGGAEFAVFRVLARVRALGSGGAEFAVFRVLARVRALGSGGAEFAVFRVLARVRALGSGGAEFAVFRVLARVRALGSGGAEFTVVPLARPDCLSDSLCRVALQSEWHRRRCPSVRLASGSGGVTAVTSALPGARVRMKLYADGGYQLRIRRLE

SEQ ID NO: 55821 - protein, 116 aa, Zea mays
  Coding DNA Sequence Number=SeqID_14042
  Subcellular localization annotation: CTP_CleavageSite=47; ConfidenceScore=5.21e-01
MESLIPNSLSSTPSHQRRRPQRRPPRRQEQPARPLQAHRAHHLQLVSRAAGAGRQQGTGRQPPVGQAASQSQAASRAALQPHAHASSSLHDLVFSLFVVVVVLHDLLLGALQPWRC

SEQ ID NO: 55822 - protein, 90 aa, Zea mays
  Coding DNA Sequence Number=SeqID_14043
MVGLGAVCRATKDSRMDTVPSYCSHARGASIPLHWFWKFTFFVLCGGPEEARYWREQRFDFSTPRNWRPRRMTRGPGPSCHILGCWFRWR

SEQ ID NO: 55823 - protein, 62 aa, Zea mays
  Coding DNA Sequence Number=SeqID_14044
MESSSLRCGHSCTDLSKRLDPWGVQKGFRGKADFGACPPGPREEEEGDRAKGLLFLSALPGM

SEQ ID NO: 55824 - protein, 381 aa, Zea mays
  Coding DNA Sequence Number=SeqID_14045
  Gene Ontology: Mol. function=sequence-specific DNA binding; Cellular component=nucleus; Biological process=regulation of transcription
  Homolog annotation: Hit_ID=Q688X5; Match level="QueryCoverage=67%, HitCoverage=60%, E-value=3e-44, Identity=44%"; Hit description=WRKY transcription factor
  Pfam annotation: Domain name=FLYWCH; Domain location=189-257; Score= -0.1; E_value=0.072; Accession=PF04500.7; Description=FLYWCH zinc finger domain
  Pfam annotation: Domain name=WRKY; Domain location=200-259; Score =151.3; E_value=2.5e-42; Accession=PF03106.6; Description=WRKY DNA -binding domain
  Pfam module annotation: Pfam domain module=FLYWCH::WRKY; Domain location=189-257::200-259
MSSRDLYFHDELASLFAQRPAPAGEAMMTHQHQQQQQAPASWFADYLHAGAPGMGMDYDLLCRALDLPLPGDDVVKREEELLLVDTGGDGGGFAAPTPTPSGGGTAPVTPNTTSSMSSSSSEAAGGAAGGGGGREEDSPQGRCKKEEGDGEESKALDKGEEDADKGKKGSAAAGKGKGKGEKRQRQPRFAFLTKSEVDHLEDGYRWRKYGQKAVKNSPYPRSYYRCTTQKCPVKKRVERSSQDPAVVITTYEGKHTHPIPVTLRGSTHILAAQLHHHHNHHLGAFPTPLPQTGAAPFGRAAGGGVIDMLGLLPPRNHGMSGGPMSAVAGAATTTAATITTTSTTPSYPPSLQMQHFMAQDFGLLQDIMLPSFGGGGGNIQP

SEQ ID NO: 55825 - protein, 141 aa, Zea mays
  Coding DNA Sequence Number=SeqID_14046
  Gene Ontology: Mol. function=transferase activity; Biological process= D-ribose metabolic process
  Homolog annotation: Hit_ID=Q5SN59; Match level="QueryCoverage=55%, HitCoverage=25%, E-value=2e-10, Identity=49%"; Hit description =Ribokinase-like
MADGRAARSRRFCGERADRAVAACTGGQARRLPSSAFISHRRRVFFSYTFRTAAENAPLPQIVVVGSADIYVEVHRSPLIGETAARAARAPTWPPAVRPTYLVARVGDDANGRLLEDALADAGGVAPTASRARPMRHRDTP

SEQ ID NO: 55826 - protein, 71 aa, Zea mays
  Coding DNA Sequence Number=SeqID_14047
MPRPIGASFSGGRGATSGRGANISAPNAAHSQEDNDDDRFAQRRAGEGTEKWTETWTVFLQHGSPQPVFHL

SEQ ID NO: 55827 - protein, 97 aa, Zea mays
  Coding DNA Sequence Number=SeqID_14048
MAMEWTSGDELPAEDAAPSYRLSIGVRYRLSIGVRGAWALAVAAVRQQERNVDQPPYKQKPIVSFFSFLEEPVGSAIKSGKQQRNQRRISGNKDISQ

SEQ ID NO: 55828 - protein, 99 aa, Zea mays
  Coding DNA Sequence Number=SeqID_14049
MIASTTFRRRSEAGHGEEGVDSGRSQELLTEETGFARCVLGPSVDHGGRRLTRSKREGRRARGCRRGRWPLMAAGHGSDGEDVGGGGRTVHRGLHCTLK

SEQ ID NO: 55829 - protein, 163 aa, Zea mays
  Coding DNA Sequence Number=SeqID_14050
  Gene Ontology: Mol. function=kinase activity; Cellular component =ornithine carbamoyltransferase complex; Biological process=amino acid metabolic process
  Homolog annotation: Hit_ID=Q6QP54; Match level="QueryCoverage=69%, HitCoverage=45%, E-value=7e-18, Identity=56%"; Hit description =Putative kinase
MAVRRGIPALELPINLSGTIIRGTLKAPNSQLVTPISIKLQRPDGARTRAKPRKTANSAPPDPGLGLGLSPGRRRTPLRPTQGSDLGSALASADGLRLARPRGSDSTTATEDRLDLDLGGASTSPNPRARASHVNRRRHHYPTPSRVRLRGTRQASHLARSAR

SEQ ID NO: 55830 - protein, 237 aa, Zea mays
  Coding DNA Sequence Number=SeqID_14051
MGENMGSRGAGMGLSDATKFVWDCLNQDDDELMGLLGNQTPLRDCRDFFADLGDFTCKETLDLEESRESKRRRTLEYPSESSQSEVGTHDAASPFVTSEAAEISLLCTDKPQSLNWDMHHTSNNLGTSETGPMTESFIMQETRKLCTLKVSKGSSSTLVKVKENLTTSVAYPFTLIKPSWEEGDVTLQDINQRIRAPPKKAPEILGTSAFSGKPVIGKTRIRTEGGKGSITILRTKG

SEQ ID NO: 55831 - protein, 107 aa, Zea mays
  Coding DNA Sequence Number=SeqID_14052
MTPEQKQDELKKLQSAKSGTFVVERAFGRHHEPLAAHSSLDRSWRSCRWGRRCRLLLEEPPLPHEGGQSRSLASLGPRLPDRCRRSCLRHLDMVQLNQMAPLDHGFL

SEQ ID NO: 55832 - protein, 378 aa, Zea mays
  Coding DNA Sequence Number=SeqID_14053
  Gene Ontology: Mol. function=Rab GTPase activator activity; Cellular component=intracellular; Biological process=regulation of Rab GTPase activity
  Homolog annotation: Hit_ID=Q1SDX8; Match level="QueryCoverage=91%, HitCoverage=77%, E-value=1e-112, Identity=57%"; Hit description =RabGAP/TBC
  Pfam annotation: Domain name=TBC; Domain location=147-345; Score= -15.4; E_value=1.6e-06; Accession=PF00566.9; Description=TBC domain
MEFLLGVKLGSSLSSIGLFVFLHIAALQLDRKVVDLAELRRLACQGVPDAAVSSFSWDMCQLIVLYGRMNWRKRGPNTVISKMNFWLILFINLFILRKPFVPLSNSVVIHLCSGQSEVTRRMEEMTASEREEHNAEGTGVLPRAEIVRDEHPLSLGKTSVWNQYFQESEIVEQIDRDVKRTHPEMEFFNGDSSDSLSNQESLKRILTIFAKLNPGIRYVQGMNEVLAPLYYVFKNDPDQSQAALAEPDAFFCFVELLSGFRDNFCKQLDNSVVGIRSTITTLSQLLRRHDEELWRHLEVVTKEFQFRDCLSLWDTLLGDPEGPQATLLRVCCAMLILVRRRLLAGDFTANLKLLQNYPPTNIDHILHIANKLRGPLPF

SEQ ID NO: 55833 - protein, 57 aa, Zea mays
  Coding DNA Sequence Number=SeqID_14054
MASVLEKASCDHVEVVGEACFDMAIDDIKTPSKNVLNAAKRFFFENKELKKTKKTKK

SEQ ID NO: 55834 - protein, 90 aa, Zea mays
  Coding DNA Sequence Number=SeqID_14055
MADEADLQPRQCTKKLRLCAQVAKMTSKVDNFGHKPKAKLPNSAGRNPRSWGWRKYVIVLISFVNSIGSRRPIEALDSPSYVGHVGFDGP

SEQ ID NO: 55835 - protein, 85 aa, Zea mays
  Coding DNA Sequence Number=SeqID_14056
MAPVPSVKLDSGSNFVGSLLYIDNKSTLALTKNLVLHDRRVIALDVTSWLSILTEAAGLGGLQPPSVYDAMDSPDVTVGPQADPW

SEQ ID NO: 55836 - protein, 70 aa, Zea mays
  Coding DNA Sequence Number=SeqID_14057
MDSKGKGKVSDEKEKIPIDDEPKREKTVDSGSSKKEGKKKRIKKIIYYDSVLLLLCKRTMTPLVEDENGL

SEQ ID NO: 55837 - protein, 95 aa, Zea mays
  Coding DNA Sequence Number=SeqID_14058
MGDETGVANEGSLRRKTSAVARDVMGRRAAAASCDRDEIVAGGFSSKRGAQKRDEKLHVWEAFRLLAARIRPEAEPNRGYKLSKALYGLKQAPRA

SEQ ID NO: 55838 - protein, 179 aa, Zea mays
  Coding DNA Sequence Number=SeqID_14059
  Homolog annotation: Hit_ID=Q6QP51; Match level="QueryCoverage=58%, HitCoverage=38%, E-value=4e-07, Identity=38%"; Hit description =Putative growth-regulating factor 1
MDLESGLPKRLLLWVVGCPHTRECMGNNTKRRLSSQSQEPSDVRLQRNFPWLKRRILSGTIIRGTPKTPNLSWKLRLARPQGSAPVSASEDGLRLARPQGSDSASAPEDDKLRLARPQGSDSASAPEDDELRLARAQGSDSASASEDGLNLGLGGASASPDLGLGPTTSQGGHHYPTPS

SEQ ID NO: 55839 - protein, 330 aa, Zea mays
  Coding DNA Sequence Number=SeqID_14060
  Subcellular localization annotation: CTP_CleavageSite=69; ConfidenceScore=5.22e-01
MAVVEACDPARIDISSKTAASSERTTQLISGGRHAATPPLPSSCSPPTPASRSSSTVSPSPPSLHLASRARTKVSDSSRRRARTEELAESSSSTRDQRIFIAAVGVSTVVILLLRTFLLKPFKLITVFLHETSHALACKLTCVWALGVAMPPPRLSLVLPSNNVTAIVDPSYAPLTLPAPTPATVAPPRSPHPQHSATRPPQPDAPCSATPPPSSRRGCPRPPPHPLRRPNLCSRCLHFPSRCHFLCITSHAADLPRTEPARPTMPGATPSPQRRPLHGVVGRLEALASPSPCTRLGCPNCPNAMPPPHRPLCAAAQSRCDRPWRSPRVP

SEQ ID NO: 55840 - protein, 1803 aa, Zea mays
  Coding DNA Sequence Number=SeqID_14061
  Gene Ontology: Mol. function=nucleic acid binding; Cellular component= chromatin; Biological process=chromatin assembly or disassembly
  Homolog annotation: Hit_ID=O48579; Match level="QueryCoverage=87%, HitCoverage=74%, E-value=0.0, Identity=46%"; Hit description=Mi-2 autoantigen-like protein
  Pfam annotation: Domain name=Chromo; Domain location=177-228; Score =31.3; E_value=3.4e-06; Accession=PF00385.14; Description='chromo' (CHRromatin Organisation MOd
  Pfam annotation: Domain name=Chromo; Domain location=242-295; Score =38.5; E_value=2.4e-08; Accession=PF00385.14; Description='chromo' (CHRromatin Organisation MOd
  Pfam annotation: Domain name=DEAD; Domain location=333-511; Score =2.5; E_value=3.4e-06; Accession=PF00270.19; Description=DEADDEAH box helicase
  Pfam annotation: Domain name=Helicase_C; Domain location=684-762; Score=78.6; E_value=1.9e-20; Accession=PF00271.21; Description =Helicase conserved C-terminal domain
  Pfam annotation: Domain name=Myb_DNA-binding; Domain location=1294 -1345; Score=21.2; E_value=0.0038; Accession=PF00249.21; Description =Myb-like DNA-binding domain
  Pfam annotation: Domain name=ResIII; Domain location=329-505; Score= -9.9; E_value=0.00031; Accession=PF04851.6; Description=Type III restriction enzyme, res subunit
  Pfam annotation: Domain name=SNF2_N; Domain location=335-625; Score =381.5; E_value=1.3e-111; Accession=PF00176.13; Description=SNF2 family N-terminal domain
  Pfam module annotation: Pfam domain module=Chromo::Chromo::DEAD::Helic ase_C::Myb_DNA-binding::ResIII::SNF2_N; Domain location=177-228::242
MLQEQGVVGDKMMTTQEDQQMSQINPPSHASLEQFESANLQVDGMVLPHASAGIPNRPHDGTESSRNGTIEDICADESANHSGHNLEMRKDTDSKSHEKESHKREQVKKILSVCSGDETNIMKDDQVVRENVSASKKGEDETSDLPAEKDDTILPVTRACTMIRTNQDHTDESKQHGKIEQITNKDYNDAGYEFLIKWVGKSNIHNSWVSESEVKILAKRKLENYKAKYGMSLINICKEQWCQPQRVIGLRASVDEVEEVLIKWCGLPYDECTWERSDEPTLMKYSHLVTQFKNFECQALDKDVVKDYANARNRHELNVLVDQPKELQGGMLFPHQLEALNWLRKCWYKSKNVILADEMGLGKTVSACAFLSSLYCEFKINLPCLVLVPLSTMPNWMAEFSSWAPHLNVVEYHGSARSRSIIRQYEWHAGDASQIGKTKRSYKFNVLLTTYEMVLVDAAYLRSVSWEVLIVDEGHRLKNSSSKLFSLLNSFSFQHRVLLTGTPLQNNIGEMYNLLNFLQPTSFPSLSSFEEKFNDLTTAEKVEELKKLVAPHMLRRLKKDAMQNIPPKIERMVPVELTSIQAEYYRAMLTKNYQVLRNIGKGGAHQSLLNIVMQLRKVCNHPYLIPGTEPESGSPEFLHEMRIKASAKLTLLHLMLKILHKEGHRVLIFSQMTKLLDILEDYLTLEFGPKTFERVDGSVSVAERQAAIVRFNQDKTRFVFLLSTRSCGLGINLATADTVIIYDSDFNPHADIQAMNRAHRIGQSNRLLVYRLVVRASVEERILQLAKKKLMLDQLFVNKSESQKEVEDIIRWGTEELFGNSDSVDGKDNSEVPGPVADVEFKHRRKTGGLGDVYEDKCIGGSTKLVWDENAILKLLDRSNLPSSMAESTDGDLDNDMLGTVKSIDWNDELNDDPGTNEDTAPIDNDGSEQASESKQGATNRSEENEWDKLLRVSGKLRARQKERIAQRHIIKNYADDNLEEFMTPYDSIANEPAENPLVIVEDLNSSQLSGAKRFSDSTGEMRQSSKKSKRYSEIPQDLYAKIPGNTASFKHHSKATDVFNPGTPNHLLPVLGLCAPNADQVNSYKNSICAPSIKERKRASGDIVKQLSTPADHSNVHRNEAQSASDKAIFPGASEEALRRISNMIPDSYFPFSHIPPISGKGVDPVENPGPSIASFQGNLGLPNFSLEDNAPLKHIKPIPDIFPSLSLGAHKDYIRSSVPELPDGSLLPNFMADITGTSKQKSFMSGLLPGLGLSPGQPIHSAMPDNHKKVLDNIMMRAQYASNKFLKKRSKLDYWSEDELDALWIGVRRHGRGNWDAMLRDPKLKFLNNRTSEELALRWILEEQKIIDEPMSTSTRRSNSAAFPGISDAMMSRALNESNFSKMRMEQPKLQSHLTDIQLGSSDILSTFPHVDAASYINSGEGGPSQIPWQDFKHRSSYAGDFPAGAFDKLEKPDVGPIPPFMPNPFMTDSIGSLPINRKNNSSIPHSEIRSSSRENILSGVSDGQINLLHEMQRRRRVRSGKEPIEMNLNHIDHSNLQLDNTSDLGGLKPNKLPHWLQEAVRAPSSKPPERELPATVSAIAQSVCLLLGEQEPSIPPFLIPGTPLSRPKDPRINSKKKLRKAQQSNSHVEHSKIGSGEGDCVTTPAPPSIEASPALPVDCDDGEPSLNLKSASLSSSAGSKGLDELPPTFKEANQTVDGSEAVAAKSDAPEIGCQVPGSSPLHDKGSESSGSPVKDTPDAGIRLPGSDNSVMAFSALPLVDEAPGTSSRAADTPVPCDGNESKEDVPLDNAESTRKLEPNG

SEQ ID NO: 55841 - protein, 125 aa, Zea mays
  Coding DNA Sequence Number=SeqID_14062
  Subcellular localization annotation: CTP_CleavageSite=13; ConfidenceScore=5.05e-01
MTPLLYGHAFNSVVNTKKGNTRTKPLPLSKRLRLEAQRVLKERVQDIADKKGIKLRFCNLRECESHIWSLDSPCEKTRAEIGWPQGVPFVHPHDLPNKAKLGFFEAYEPGWTASQQEMELSFTEP

SEQ ID NO: 55842 - protein, 427 aa, Zea mays
  Coding DNA Sequence Number=SeqID_14063
  Gene Ontology: Mol. function=protein serine/threonine kinase activity; Cellular component=membrane; Biological process=protein amino acid phosphorylation
  Homolog annotation: Hit_ID=UPI000034F0D2; Match level="QueryCoverage =63%, HitCoverage=41%, E-value=1e-72, Identity=53%"; Hit description =ATP binding / protein kinase/ protein serine/threonine kinase/ protein-tyrosine kinase
  Pfam annotation: Domain name=Pkinase; Domain location=2-250; Score =56.5; E_value=9.1e-14; Accession=PF00069.15; Description=Protein kinase domain
  Pfam annotation: Domain name=Pkinase_Tyr; Domain location=1-250; Score=44.3; E_value=3.4e-15; Accession=PF07714.7; Description =Protein tyrosine kinase
  Pfam module annotation: Pfam domain module=Pkinase::Pkinase_Tyr; Domain location=2-250::1-250
MENGQQIAVKRLSLGSRQGVREFLNEVRLLLKVQHRNLVSLLGCCASSGHKMLVYPYFPNSSLDHTLFDRNKCAALDWPKRYHIIVGLARGLLYLHEESPVKIIHRDIKASNVLLDDQLNPKISDFGMARLFLEDATHVPYVTSRSGYMAPEYAMNGYLSAKTDVFSFGILVLEIVSGRKNIVRHLDDEKVDLLSYTWKLFGEGRSLEIVDPSLSSPDSDQALLCIQLGLLCCQAAVSDRPDMHSVHLMLSSDSFTLPRPGKPAVHGRTGRWTAATTTASGSASASSATNTTSTFGFGTDTNTTRASALLASVAEDESRNSISISFTTDGRLLGEQATAPLRAIISEIILALSLRQLLSLANARDIARDGLSCEVVKLYDPSPIRIRIRIRIVLQLVSIQSLSTCQLVPIGFRSLLSHDLARRSMAL

SEQ ID NO: 55843 - protein, 131 aa, Zea mays
  Coding DNA Sequence Number=SeqID_14064
MASHPNDSMSAHRVATIDMTAPPQECVLTRENALRRQQEGLDALVRKLGRIYGDIEKKRLEAERSQAKRFYGQLAESSDGAQYFLNIGQNMAAAAMMLQSIPKPDGPEAERLYIQSSTTRVIGTFVTRCSQ

SEQ ID NO: 55844 - protein, 148 aa, Zea mays
  Coding DNA Sequence Number=SeqID_14065
MANRSLEFPPYYRVVPRHRYTLAHASGFEGLVGVTVTALVGDFNLVITKIGGAPAGLRRCIGWRHHGPLLLQPSVRDLTVDARYRFRRIIDLIVAARSSSDGPNSPVPLRQRKNCKRAPWVMGNQPAILCGVLCVWGISRVSPQVFEK

SEQ ID NO: 55845 - protein, 221 aa, Zea mays
  Coding DNA Sequence Number=SeqID_14066
  Gene Ontology: Cellular component=integral to membrane
  Homolog annotation: Hit_ID=Q1S3A5; Match level="QueryCoverage=44%, HitCoverage=22%, E-value=4e-16, Identity=47%"; Hit description=3-oxo- 5-alpha-steroid 4-dehydrogenase, C-terminal
MPDLAIVPSHLLKPLLKLGWCQWIGAIIFIWGSLHQIHCHAILVCIRFCHSTSYLFVANANNIQQQLGSLREHKDSDEYVIPCGDWFSRVSCPHYLAELGLGAWDIGVGLLLVDEVMIGTLFSAKKGLPFYILFEILLYFSWIIRCQGHALFPHKSFLHLALLVAGTSAKRGLNPSPIAKLQRNYDVRRPSSAISPMMSPSYFVLPPFQPLMSHRKQAFIH

SEQ ID NO: 55846 - protein, 263 aa, Zea mays
  Coding DNA Sequence Number=SeqID_14067
  Homolog annotation: Hit_ID=Q8LK07; Match level="QueryCoverage=26%, HitCoverage=36%, E-value=6e-32, Identity=100%"; Hit description =Histone H1-like protein HON101
  Pfam annotation: Domain name=KaiA-binding; Domain location=33-89; Score=-24.9; E_value=0.045; Accession=PF09054.1; Description=KaiA binding
  Pfam annotation: Domain name=Linker_histone; Domain location=35-105; Score=109.6; E_value=9e-30; Accession=PF00538.9; Description=linker histone H1 and H5 family
  Pfam module annotation: Pfam domain module=KaiA-binding::Linker _histone; Domain location=33-89::35-105
  Subcellular localization annotation: CTP_CleavageSite=28; ConfidenceScore=5.09e-01
MPALAKPASRTAKPAAAPKPKPAAAKPKAATAGASHPPYFEMIKEAITALKERTGSSSQAIAKYVGDKHGASLPANFKKMLSIQLRGSAAKGKLVKVKASYKLSDAAKKASPKTKAKPAKAAAAKTTAPKPGQGRRRQVKEGSGCQAKEGRCCWDQAQSAREEGRGEAEEVPRRQGQGQAEDREVPCLQEGTEGLRMRWVALGLSSDCGWCQLGIIFSAIRIRAEENRRRRRNWGTCRSFFPALIRYLLVDNVEPVDYLRCCK

SEQ ID NO: 55847 - protein, 125 aa, Zea mays
  Coding DNA Sequence Number=SeqID_14068
MGASNNLLQASTNLTALDEDEDEGLTVFPRDEKAQSRPWMKRPPAALGIGSAAAAMGRVAATQARHRRAMARISAREVATRRGGGREPARPSGVLVGGWSERRQADVEEEMSTGIRYPLTHGEFP

SEQ ID NO: 55848 - protein, 178 aa, Zea mays
  Coding DNA Sequence Number=SeqID_14069
MTVLRIQERTTLSIWRQDGTIGHTLSGPDVLNTGRLSIEVDDGSSLIHRRGLHLLVSRGRICGSTTFEVVSECVDGGTLLLLDESSCPLPLPLPGNSDCEGRDKYGVGCNHLMGEAYSAKPGGEGSRDGIGEVGRDRDGADNSDDGFMSRPNPGDQALDTPVPRCDVPAPTGGGMTTV

SEQ ID NO: 55849 - protein, 268 aa, Zea mays
  Coding DNA Sequence Number=SeqID_14070
  Homolog annotation: Hit_ID=Q6QP54; Match level="QueryCoverage=40%, HitCoverage=44%, E-value=5e-13, Identity=55%"; Hit description =Putative kinase
MERRAHLGGAVDSEACDAGCAGGSYKGRGDGRDAGVLQVAVRVEETYGGSGARRSLGHYRRLAVEPGAVEAVTRWPACRCPPVRERRGFFDGRRAWSRGFGVGPASGKGCNAFGLWALSEGPKATIKTATLLLWGSDSGSAPEDDGLRFARPQGSDSGSAPEDDELRFARPQGSDSGSAPEDDELRFARPQGSDSALASADGLRLARPRGSDSTSALKDRLDLDLGGASASPNSGLGPTTSQEAPSLPYPKLTQAMGDKTGVTSGSLR

SEQ ID NO: 55850 - protein, 108 aa, Zea mays
  Coding DNA Sequence Number=SeqID_14071
MEAAGPAKPDHHPAAAAKEGAGCPRRSAPWSSWLSAAAAGLVAVGLGGAALLVWWALAFHPANARLWMVPAGLVLLGTPVLAWLSLLGSGPCGRQAAPPPDAGVYASA
